United States Patent Application Publication US 2017/0114356 A1 - sequence listing, part 78

SEQ ID NO: 118688 - DNA, 1164 bp, Zea Mays
agaacaacacctcctatttctcaataagttaatctgccacattgctgattaagagagcaatgatcgccattcctatgaaaactaaagttaaaggttgtttaaattaaaggggtccgaacgtgtcttgttacctggactgatcctatttgcaggatgtgccaactgccgagacttgcacacgtcacaaattaaagctgtttgcattgccggctaaccaagctccagggtataaacttcataattagacattctagatcttagttggccgacttgatcataagccactacccaaagcaaaaaaaagtatattattgaagatgcaactctcccctatatttgagagaagatgaaggatatatcagtgtgtttggtaccctgtagctcctcgtcgacctggtgcaacagcttaagctcaggaagaatgctttacaaatccgaatataagttcagtacgatagtgcaaatagagagcatcagcactaaagaagatagggagagttcaatgcatgatgtttgttttgttgacactggaagaggcgactaattgaggcggttgtcattgccaccggtgtgcacacattctttgtcaaggccgcatatcttgtcgattcaacaaaccaagttggtcattttcagaaggcaagctaagtgtgatgccgccacataagaccatgcccactgtatttatattttatactaatttttaacgtccaaaggacaccagatgtttcaatgttaatggtgctattgttatacactgatgttttgttcctgtttgcttgcaactttttgcagctgttcatgctatcggtttggaaagaacatgtggaaagccaatctcggatcttgcttccttcagggattgtctccatcctcttgatagcgatctatattggttatttccgaagaagaatcaagaagcaattcaacattcatgcaagtgtggtaccagattgagatatgtctgttagtttgtaacaatataaacttgttagttatgtgtcagagaaaacatagtaacaatgatttgtgctctatttctacccgtcattgtgtcctatctcaatggtgacttctttgtacacaactgtgtggtctctctatgtcctaataaatacatgcatcatcaatgaacttaatggatattgtcaatacagtgttcta

SEQ ID NO: 118689 - DNA, 907 bp, Zea Mays
gcgccagccattctaaatattttgttggagagaatcagactgcaagttggatttgctggacagactcgtgcaatcatattttacttctaaccactttgtcagccttgaaagaccaacttgattttagctttagctcagttagtgcttctttcacaaaagtgttgtgaagtttctcctctcatctgattcagcatcaattatgtgaaatattatttgcattatatagtcagtttattatccttaacaaagtgataaaaggatattatggtatgttccaacatgtcccctttcatatatattaagggtgctgatgattctcgcataaagtgcatgtctctaaccactctatctactacataccatagtcgtggtgttgttacaatcttgttcacattgattttaagtttcctttgttaattacatgtttatttcagtgtgcctccctaatatgttgttaattttgatgtcttactcttattcacctagctaatgctagatgaaattcctttcaaggaatgatttactgcattttgttggatgttgtcctaatcaacccaatttccttttttgcaatgaggcatcatatatctttatatatatagggattgtctccatcctcttgatagcgatctatattggttatttccgaagaagaatcaagaagcaattcaacattcatgcaagtgtggtaccagattgagatatgtctgttagtttgtaacaatataaacttgttagttatgtgtcagagaaaacatagtaacaatgatttgtgctctatttctacccgtcattgtgtcctatctcaatggtgacttctttgtacacaactgtgtggtctctctatgtcctaataaatacatgcatcatcaatgaacttaatggatattgtcaatacagtgttcta

SEQ ID NO: 118690 - DNA, 3898 bp, Zea Mays
tggcctaatatatttccaaatgctagagaacataataatggatacatgcatatacgacagacatagagaaagcaaacaccacaccttctacattatagtaccatacatttccttttccttattattaaagcggaacggaaatgccgcctaagaagctatccatgtctgccgaattattaacacacgtacgatcattcatggacatcttacattgctccacgaccatctatctcaggattgttctagctgatgtttgcctttgtggggacgactctcgttctcttcgcctctacgggtttgcagccgacgctctccatcctcgttcttgtcactccattcctctttcccacctcccctctgtcttggttcttcacacctggttcttctgcctcctgttgtctctgtcgtccgctctggtgaacccgcatcgttcctattccttgtgctgcttccgtcgtcagctccagtaaatcgctttgttcgtcagctcgagatcgtggatggcttgctaaaaaaatcaggtaccataaacatgagagcattctccgtgacaaatagagtattttctattctctctatattaacaaaccatggaagacaatcctcagtaccatcttccctacttacctaccccgaacagcatcttgtcacaagatgatgtacttggccttacaaccacgcaccagcgacatcattttccaaattatccacttctagcagccaaacaaacatggcccgatgattgctagcatatcctgatgtgccacagaatacagaggcggatgaacactacacagatcaacttaacaagaacgagctttcctcaccaccgaaaatgatgaagcacacccaagtcctagattctacaattccagaaaaatgaagcttgttacatcctcatgacatgcatgaaggaatttgcttttgcgtatctatggagggcttcgtcacttttgaatgaaaaaacatttatgtacatataaatcacttggtgaagcctttctcaggccatgtgtgttgatgcaacctctaggaaaaacaatgctattagttgttgacatatgctacttcaatactgcttgatatgtattgcactctcagtttcgtcgactgttggtccaaacagcatttgtgtacatacagaccagttgtattaaactttctaaatctgtgtatactaatgcaacctctcgaaaacactgttgttagcccttgacacgtatgctatttaaatgctacttaatatgtattgcaatctggttttcctgtacagaactgctacagttcccgttccaatattaaccggaagcttctgcaacctagcaaaatttccttaagtctgctttgtgtccatgtatttatgtgcttcataacgaatatccttcatataacatttccacgctacaatttctatccacttaaaggcttgttcgtttatatgttaatacatgtgtattggatgggattaagttggattaaatccatagcaagtaaaaatccatctcaatttcactcaatccacacaaatacacatggaatatgaataaccgaacaagccctaaatatactcacacacattctaaaatacgggtcaacaagcgcgcatggcgcacacaatacactagtagtttacactatactagaattatgccttttgttgccatagagacaaagttatagctcaccattttaagtttgaacatgtgttatattctacttaaaataatgtgttcccatgcacatcaacacttgaaatatattataatttttaatgattcatggaaaataatataatagtgatgattagctcaaagtacaattatttataatgtgcgattatattattcccattgcaacccatggatatgatcctagtttattgaatttcttcaccaatggataagcttccatacaacaatactatgcatttgtaatttatgaaaaaacacaacacaacaccaaatttcaatattttgcaagagaattcctaataaataaaaaacactgattgccatagccttacaggaaaaaacgaaaaggttctcccttgcatgtgaataaaatcatttggtgatgcttaacaagtgtggtgaaaaaaggggagaagaacatggtaaatcgaaggcaaactaggtgcacatgttgttgagcttgttccaacttcaaggcacttgcgtaaatctatattctattgtgaataacatattccattctctacacacaattatatggacaccctatgaatgatgcaaaactaaagtttggttattctttatgttgcattttgccccttttaaatgttggacaaacttttcctttttgcgaagaatgttgggccaagttgtacaaataaaacacaagatggctataaataaggtgctaatatatgcatattttattctcttttaggttaaaagcccaaattgatatgttgatgtattattttttttcatatgcaaatattatcgcatagagggatgtaaatttatcgtactagtaaattattaaatgaggaattctcaacaataaccaattgaaaatgcaagggtcaatacacagagaattcccatcatgaattaactctcgtgtgacttgcttccttagtagccatattcctgcacaggagttttcgttggccatgtattctaacaatgttagtagaagacataaaaagacataccattatatggttagtgtcatatgtacacacatgactatataacacgaagtttgtacctacatcatgccttccaaatgtactctaatatccatatatgcatccttacataatgttctatgggtgatgtgagaatttactatacatatatattgtcattaaaaatgaatttgtttctatattaaactctaaactctaaaccctaaaccctaaacaaaccaaccacttgcattcatttaattgacacttgatatcttctatagttaattagatggttgaatcataatagatcaacatagtttttgttaatcatacggaaaggaaaaagtacgcatgaacgtgaaatggtgttggtcattgttccaaaaatatgttctcaaactctatgaaagaaacatctagaaaataagcatttagcagaagggtgtgaaataacaatggtttctgttaaatgtggtcaacaaaataaaatactgtttctaactcaccttatagaggagcaaaatagtcacatttagaaattgtcagatgaataggcacaactccgtggaaatcatcgttataaaaaaaataaaaatgtatatgagtacccataatgaacgcagttctggaacacaaaatttaatatgtttgaacatagtttcagtgattagttctctattttgtaaaaaggggaaaagtattgatgattgtaatacggtggccatcatcatttgaagctatgttctcaaccgaaacaaaaaaatgcattcagtgtttatcacatctaaagcagcattatccactcagtaaggtaagaagtaaaacaacaatacaatagccagaaaatgatatgccaacattgcactcttttagtaaacacaggaggatgaattctaaacttatttaaaaggtaacaatacccatcttttggtaaacgctgtagcatggattttgatccttttttaaaaaagatatttgcaaatgttttgcatctgctggcatcgatgtcagtcgaacatagacggcggcggtcgggtaagcactaagtgaatggcggccgggtaagcaagaggcgtatgtgcaaatatcagagaaaatttaaaaaaaaaatcaaattcaccatgaatgaaacgctcaccagtgtttttcgcggtggagatgtcgcctcgcgatgacgtagttgccatgttgctgctgcgcaatccaaatgaaacccggccagggatgaggaaccgagac

SEQ ID NO: 118691 - DNA, 957 bp, Zea Mays
ctcgttcttgtcactccattcctctttcccacctcccctctgtcttggttcttcacacctggttcttctgcctcctgttgtctctgtcgtccgctctggtgaacccgcatcgttcctattccttgtgctgcttccgtcgtcagctccagtaaatcgctttgttcgtcagctcgagatcgtggatggcttgctaaaaaaatcaggtaccataaacatgagagcattctccgtgacaaatagagtattttctattctctctatattaacaaaccatggaagacaatcctcagtaccatcttccctacttacctaccccgaacagcatcttgtcacaagatgatgtacttggccttacaaccacgcaccagcgacatcattttccaaattatccacttctagcagccaaacaaacatggcccgatgattgctagcatatcctgatgtgccacagaatacagaggcggatgaacactacacagatcaacttaacaagaacgagctttcctcaccaccgaaaatgatgaagcacacccaagtcctagattctacaattccagaaaaatgaagcttgttacatcctcatgacatgcatgaaggaatttgcttttgcgtatctatggagggcttcgtcacttttgaatgaaaaaacatttatgtacatataaatcacttggtgaagcctttctcaggccatgtgtgttgatgcaacctctaggaaaaacaatgctattagttgttgacatatgctacttcaatactgcttgatatgtattgcactctcagtttcgtcgactgttggtccaaacagcatttgtgtacatacagaccagttgtattaaactttctaaatctgtgtatactaatgcaacctctcgaaaacactgttgttagcccttgacacgtatgctatttaaatgctacttaatatgtattgcaatctggttttcctgtacagaa

SEQ ID NO: 118692 - DNA, 2862 bp, Zea Mays
atggaggcgggggcgagctcacggtatccactgtggacgcggggaggagtacagacgaggatggaagggatgcggggaggagtatggaagaggcgggctaggatggaagggaggcggaggaggaggatggcggtcggatttgccggcggggatctcggtcggggggcgagggaagggggtcacagagcgctctgtgcatatttggaaaacaaaaaatctggagggccaggctggaaaattccattgccagcttgctgcgcgcctgcgcttccttctcgaggcggcccgcggccggctgtcaaatactacgaccccatcccccgattccaaccccacgagaacccaaagtcccaaaccaaacggccgaacccctgtgccgcgcaggctgctgcaatgctctccgtctccgcctccgatggcgatcgctcgccgtgtccggtggaggcacgccgcatcgtggttacccaccgcctccccctccacgcggagcccaatcccgacgcgccgtacggcttcgatttctccctcgacgccgacgcgctcccgctccagttggcccgcggtcttccccgccctgtggtcttcgtcggcgcgctcccctccgccgcggcgtcgatctctgcgtccgaggagctcgaggccgatctcctcgcgcgcttcggctgtagcccggtgttcctggaccccggcctccacaaggacttctacgacggattctgcaagcgctacctgtggccgatgctccactacctcctgccgttcacgctcacgcccttcttcggcagtggcggcctgaaattcaaagcgaacctctaccgcgcctacctcaccgccaacacgcagtacgccgaacgcgtgctcgagcaactcaaccccgacgaggacctcgttttcatccacgactaccatctgttggcgctccccaccatcctccgccacaagtcgccgcgcgcccgcataggcttcttcctccacacgcccttccccacctccgagctcttccgtacagtcccggttcgcgaggacctcctccgatccctcctcaacgccgacctcgtgggcttccataactacgattacgcccgccacttcctctccgcctgcactaggctcctcggcgtcaccagccacacccatcgcggctacatcagcatcgactactgcggccgcgctgtttccgtgaagatcctcgccggtggtgtcgacataggccagctacgtgaggtgttgtcgtcgcccgagactgaagcgaaggccaaggaggttgccacgaagtttgccggtcgtcagttgttgctcggagtagacgatgttgatttgttcaaggggattggcctcaagctcttggctatggagaggctgctagagtcgcagccggagctacatggccaggtggtgctcgtgcagatcaacaacccggtgcggagtcctgggtatgacaccgacgagatttgtgcggagctgcaggcgatgcgtaagcggatcaatgcccgcttcgcgacgccggcggggtatgaaccgatcgtgatcatcgaagaccccatgacgatgcacgagaagctggcgttctacacctcggcggacatctgcctcgtcaccgcggtgcgcgacggcctgaacaggacaccgtacatctacaccgtgtgccggcaggagggtccgatctccagtggcgtggtgggggcaccgaaggagggcgccatcgtcctgtccgagttcgtcgggtgcgcgacgtccctgggcggcgcggttcacatcaacccgtggaacgtggacgccgttgctgaggggatgcacatggcgctgaggtttaatgggcgcgagaagcaggtgcggcaagagaagcactacaggtttgtttccacgcacgacattgcctactgggggcgatcgctcgaccaggacctgcagagggcgagcaaggatcacgcgtccatgaagtttatgagcgttgggctcgccatgagctaccacatcgtcgtgcttagtcccaacttccagaagctctcacctgagcacatcaatccatcgtaccagcgggcaggcaacaggctcatcttactggactatgatgaaacagtaatgttccatccggggctgctcgacagacatcctagccagcggttgattggcatcctgaatgaactgtgctcagatccaaagaatactgtcttcgtagtcagtgggcggagcaaggatgaactggctcgatggcttgagccctgtgaaagactggggatctctgcagagcacggctacttcacaaggtggagcaggtattccccatgggagtcacccgacctgaaggtagactatggttggaaaaagatggttgagcctgtgatggacctttacgtggctgtaactgacgggtcatccgttgagactaaagaaacagcattggtctggcactacgagggaactgatccagttttcggaccaagtcaggccaaggagctccgggaccacctgagcgacgtgcttgccaaagagcctgtatctgtgagaagcggctacaatatcgtggaggttaatcctcaggaggtggacaaaggaaccgccgtgcagagaatcattgcggccatgagagatcggggaagaatgccagacttcatcctatgcgtcggcgacgacgcgtccgacgaagacatgttcaaggctgtcactgcaccgtccaacaagtccgcgttcccagaggatgccgaggtattcgcttgcaccatcggaaccaagccaagcctggccaagtactacctggacgaccccgtggaggtactgtcgatgctcaagggcctgatcaagtcgtcggtggaggagcgtcccggggacggggaagggccgtcgcgggtctcgttcgactga

SEQ ID NO: 118693 - DNA, 1096 bp, Zea Mays
attctactaccaaagttattattccgtgcgcatgtagctgcaaggacattcaggaataagattagattattggctgcttcttgaagtaactattatgtgtttgtttatcaggtggagcaggtattccccatgggagtcacccgacctgaaggtagactatggttggaaaaagatggttgagcctgtgatggacctttacgtggctgtaactgacgggtcatccgttgagactaaagaaacagcattggtctggcactacgagggaactgatccagttttcggaccaagtcaggccaaggagctccgggaccacctgagcgacgtgcttgccaaagagcctgtatctgtgagaagcggctacaatatcgtggaggttaatcctcaggaggtggacaaaggaaccgccgtgcagagaatcattgcggccatgagagatcggggaagaatgccagacttcatcctatgcgtcggcgacgacgcgtccgacgaagacatgttcaaggctgtcactgcaccgtccaacaagtccgcgttcccagaggatgccgaggtattcgcttgcaccatcggaaccaagccaagcctggccaagtactacctggacgaccccgtggaggtactgtcgatgctcaagggcctgatcaagtcgtcggtggaggagcgtcccggggacggggaagggccgtcgcgggtctcgttcgactgagagaagaggctcattttgtcgagatattcttcgttcttttttgtaacaaaagggttaggaaaatggccaggagggtgcaaaggaagaaaacaaaaatccactaggctgataggttactgatggctgatcattagcgcgaatgacaacagggttctggttcattttttgcaatcctcagtagtagtagtgtccttgtacaattcctcagaaattttgtccaaagattggaacgaaggaaagacagggtacaaagaaatcatatcgctggacgctccatctggtagtaccgtaccgtagtagccggcacaaggacacatgacagcagtgggcagtgtagcagtacaattgttacgtcttcccgcggcacacatgacagattgtttttgcttc

SEQ ID NO: 118694 - DNA, 299 bp, Zea Mays
acagaggatcgtagatattttgagaattaagatttttagcgataaaccagggttcgatacactctattttccgaatcacgaaacggaaaatccaaggtttacgattctgactaaattttgtttagatagatttcgcgactattttgggcaacacgtaaacggactggatatcagatacattattttgagacaacactagtttagtcaaactcggataaaaatttatccgatgtattaacacagttgattttattatttcacagagtgtgccgaagaataaattggattataacttctcg

SEQ ID NO: 118695 - DNA, 262 bp, Zea Mays
gaacgccgccgcacgctcacctcgcttacggtactgctgctagccattagcgtggtctgtcggtttcgcctggtcgtcgtaaacctgcgcggggcttcgacgggcggggcttgggtcaggggatctccaattggtcaccagcgaccaatttccgcctctgggccgcgccgcgatgtggccggggtaactgcactcttgatcctcgcgtgaggtcacgagtcacctgaagatcatcctggtacctggaatctcaagtcccagg

SEQ ID NO: 118696 - DNA, 146 bp, Zea Mays
aaagaatcactacatccaaatttaggtggtgcatcatgggttcaatcctcaaatttgatgggatgacaccatttctcatattagtaataactaactaactatgagaaatgagttggtgatgatcaactcatttcatttcacaaaag

SEQ ID NO: 118697 - DNA, 388 bp, Zea Mays
gttcagtcagtcgttgtgaactttcttctaatcgctcacttcattggtcgtgttgtaccaagacatattgcatggagtaaacaataacatcagttagccaaatcaaaaaatattatacagagagtagagacaatcaataaaaaatcttaaatttttttgatggatagtttacgtgggtattgttgtaagctgtcgcaacgcacgggcaaccgactagtttacattaaatttgatgtcgcactgttgaataattagacaattttcatattgaattccgaatataaatcatgaccaaataagaagaattgaagtaaaaagtcaaatcagatgatgtctatactataattgaagcaccagttccaatggtcgtcccgcgtcatctttttac

SEQ ID NO: 118698 - DNA, 110 bp, Zea Mays
ctggctagtggaattgtttgttcttaaactattattagctaattggtcgctgtcagttcagtgtcacccccacggcaaacggatctctcccaggggccaagccatgaagc

SEQ ID NO: 118699 - DNA, 954 bp, Zea Mays
atacacaaaaacagctgccagttggtcatggaagatgagaacgaaaagaaaaaggaaagcaaatctttcgcttggctgttgttcccgtttccatcgataacttgagcaaaaataaaaagaagaagaagaagaagcacaaactttctccaataagaaacaacagctagccaagcgaaagatctgttcatcgatatggtcatgcatgcatgcatgctgttaatccattcccatcgtagaagaagttacatgcaactcagcaaaattacagccacaccaccagtcccgttctccacttcatcatttgcaaaaaaaaattacaaccccaccaaaatcgtgctcgggtcggggttctcttctcctggccggagatggtttttccagcgtcaaaagcgagctcagcttctccgagcaaagcaaaaaccgagacaaaaatcacacctcaggaatgcggcgctcctgatctcctccttctctccggcgctcactgtgctcgccaccattctgtccgccggcgtccatgacgctggccacggcggcttcgtctgcctgcacctccttgttgctctcctcctcctcgtcgtcgacgcccttgctgctgctacggtcgccgccgaaggaggacgccctgctcgacatgggcgtggcgaggtacgtcggcttcgcgtccccggccatgatcaccagtatcttctcctcccataccggcggcggcaggcccgccgccggcttcgttccgccgccggcgccggcgccgggcgccggagccgtcctcgcctccccgcccggcggcgccgccctccaggtacccggagagcttccagtaggagcacgctaggatgaaaagcgccagggctatgaggcccagcatcgcggccagcccgccgaaaaggtacggaccggcgagtgccacgcggaatgcgccgcggtgctgccgggcaccggccggtgccaatg

SEQ ID NO: 118700 - DNA, 105 bp, Zea Mays
tagatcttttgagccaagattttttagatcggagcaagacataatcggaacaaatcagaacagtatttcggactatgttccatttgatttgaaatcaataatttc

SEQ ID NO: 118701 - DNA, 1958 bp, Zea Mays
tatggttataaagcccatcacccgagcaggaacccacaccacaccaccgccgacacactctcgctcgctctcgctagctagcgggaaactactatggcgtgggcgtctccgcgcggcacagcacctcagctcctcctcgtgctgtcgctgctgctggccgctgccagtgcctccctgcttcccctgagcaataatgcgcccccgccgagacttccgccggcggcgaaggcaagggagggcggcgcctcggtgtcggcggggctgctctccacgctgcgcgaggcgctggacgcggtcaaggacgtcacatccatcatctcgtcgttccccatcggcggcatcctcggggacggcggcggcgacctccgcctgtcgtccgccgtcgccgactgcctcgacctcctcgacctctcctccgacgagatgtcgtggtccatgtccatgtccaccgactcgagcggggcgggcggcggccgcctcggcaccggcgacgcccggtccgacctgcagtcctggctgagcggcgcgctcgggaaccaggacacctgcaaggaaggcctggacgcgaccggctccgtgctgggctcgctggttgccgcggggctggacgccgtcacgtcgcttctggccgacggcctcggccaggtcgccggcggcgacgacgcgaccgctccggcgtcgtcgttgccgccctcctcctcccgccgcggcgccgccccgccgcggtggctgcgcgcgagggagcggcggctgctgcagatgcctgtggggcccggaggcctggcggtggacgccgtggtggcgcaggacgggagcggcaacttcacgacggtgggcgcggccgtggaggcggcgcccgcgcagagcgcggcgcggtacgtggtgtacgtgaggaagggcgtgtacagggagacggtggaggtgaagaagaagaagtggaacctgatgctggtcggcgacggcatgggcgccacggtcatctccggccgccgcagctacggcgacggctacaccacctatcgcagcgccaccgtcgctgtgaacggcaagggcttcatcgcgcgggacctgacgttcgagaacacggcggggccggcgaagcaccaggccgtggcgctgcggtgcgactcggacctctccgtcttctaccgctgcgccttcgaggggtaccaggacacgctgtacgcgcactcgctgcgccagttctaccgcgactgccgcgtcgcgggcaccgtcgacttcgtcttcggcaacgccgccgccgtgttccaggactgcgcgctcctcgcgcgccgcccgctgcccggccagaagaactccgtcaccgcgcagggccgcctcgacgccaacatgaccacgggcttcgccttccagttctgcaacgtctccgcccaccccgacctcctcctgcagcagcagcagcagcaggcccagtccagcaacagcaacgggaccgcgaccacgcagacgtacctcggccggccctggaagccctactcccgggtggtgttcatgcagtcgtacatcggcgacgtggtgcgccccgagggctggctcgcgtgggacggggacttcgcgctcgacacgctctactacggggagtacgccaacaccggccccggcgccaccgtcgccgcgcgggtcaagtggcccggcttccacgttatgaccagccccaccgaggccggcaacttcaccgtcgcgcagttcatcgagggcaacatgtggttgccgcccaccggcgtcaagtacaccgccggactcacgtcctgatcctctcttcaaaccctgatggatgtaggctttagtacgtacgtgtacgtagtatttgcaaccttatactcctagcactttatatgctagcacaatagtcctactacatgcatggtacctcgtatctgtggaggagaatgtaaggtgggttgattagttgtttgattgggcctttttaaacaaaa

SEQ ID NO: 118702 - DNA, 480 bp, Zea Mays
atgtggagattgtcacctctaggacctacgacatcggcgaaaccggtgctttcaaaggatagggatagggatgcctctcagagacggaagtccatgagaacacccgagttgagcagccgcgcggaggacttgttcgagatagaggacgtccagctcgcaatcggcagttgcaagatcgatccagagagtgcttctggcagtgagaagcatgggcacccgttcttgcgtagatcatctcttggaaggccgatgcggcaggccagggaacgagtcaccacctacaaggagatgcctctccatgttaaactcaggagggcctagagattgtcgggtttttaggcaacgattctttggtgtattctgcagctactcaaatgcagatagtgtgtagtatctctccgtgtgaaaatcttgtgtacgtttggcttatcgacattgatactggtgaagggtgttgtgtaatctatttatcctgtttgt

SEQ ID NO: 118703 - DNA, 211 bp, Zea Mays
ctgggcgtcgttctcgccgcggcgcacgtgatccaggaccgccatgtcgcgacgcacgagacctgctttgtgccaagacaaaggttgccaaagtttgacttgcatctccaggtcgcagcgacaaagaaaggtgggcgatacggtgacgacgcgggagcacaaccaccaggtgcaattgttccacctactactctccattcctgcagagcac

SEQ ID NO: 118704 - DNA, 97 bp, Zea Mays
gtgtgattgttaatgttttataagctaaacattgtgtttgacatcatagtgaatgattggctatactccaaccttgcaggctggaattaactgagag

SEQ ID NO: 118705 - DNA, 516 bp, Zea Mays
atggaatctgccgctgagctatgtgcccagaacttctccgcggcggttgatgcagcccgtgacacattgagtgcttctgctgccacctgtgtggttgctggtgatctctgcgccacagcatcattaggtaaccatgtggtttctacgcttgatgttcttgaatccgctgtggaggcagaaaaagtgctatgtgttcttatcaacaagcgagtgcaacagtcgtttgtgcttaggagacattggccaaatactatgagaaacctgagtgctgttttcaggcttgtgatacatatgaacaaaaaacttgcacatgcactcaaatatgccatgtctcaaatgagtgatacaactaagaaactacaagatactgcctctttctgctacacagatgaggatgctgtagatggtttcatgatgactcaagtagctcgttcaatggacgagttagctgaaatactagaagtaacttcaattgactgccaggtttcgatgatggatccaactgctatattataa

SEQ ID NO: 118706 - DNA, 388 bp, Zea Mays
gtgggggaggcgggatcgtggatgaggactggaggtggaggagacggagtgtccccgcaggcacgccagcactgcagcagcgagaagcagcgcatggagcgtcgtcggccagcgagaggtgggggaggctggatcgtggaggaggactggaggtggaggagacggagtgtccccgcaggcacgccacactacagcagcgagaagcaatggttttgaagtgtactgtatgtgtctactatactgattgttacatgttcttccatgtacctgaagacttcgttcttctttcctgcctcgtaaatattgcactggagtagtggttgtggtgccctgtggcaaagagccacagttctttgtacctaggttaataatgaaatttcattgtgat

SEQ ID NO: 118707 - DNA, 677 bp, Zea Mays
caaagaaatagatgatctgttgacttatggcagtcgggcattacatttttttgcatgaaatcgacatctgagtagtgataattttgttttgatctcttctctattgcaagatttagatggctactatcctttgcaattgatcaagaatggtgagctattctaaggaagcttctgaacaatatacctgctgtcctggagtgtcacaaatcagggttgagatgattacatcatacttatacgaagatgttcctagcaaggaatggtttgaacaatattgtgattaggcaagggataatgggtacttgctctgtgatgactcaaaaagaatgagactgatcgtacgtacgaggagagttcctccatagacaaagatgaaaaaataccttgtatttgatagaatgtgatgatccattcctcaaaccaaatagaaatgtgagatcggttgtgattaatcttttgatcttaggtaaggccaaggttctaccgggctgctcgctgttgcaggattgtgtagctgtcactgtgtagctccaattgagaaatattatcagtattaagctgctttgatggttgcctggtctattgcttgcatgtagcatgcatctccacagagatctaagttattatgctttgagctattgcatcaagagtttaagatagtctttatatattttact

SEQ ID NO: 118708 - DNA, 6166 bp, Zea Mays
tccctttctatctccgtccccgtgaacccgcaccctccagcctcccgtgctccactggcgcccttctggaaccctcagccctcctaatctcagccgaagttattaacctctttttttcttatataggccaaattagttcccctcccgcgattccaaggctttgctcttcgatctcagccgcgccgtgttcttcgcggcgagttcggagcgttggtgcccaatccgtcgaggttgtgagttgcttccgctgctgctactgccgccgccaccgctggtgttagtgatctgatctggtgggcggattgcggcgcggaggtggaattgttttggctctggggaaagctagctatgcggattgaggcgtcgccggattgagcatgaggggcggggctgctggcggtggcggtggtaagcgtggcgcggatgatgggatcgccggatgggcggctcgtggagttgttcggtgcggtgaagtcgtggatgccgcggcggggcgaccactctccgccgcccgcgttgcagtcggacgcggcggctgggcagccgctgccgcatgacttgtcgagggacttctggatgccggaccagagctgccgcgtgtgttacgactgcgacgcgcagttcaccattctgaatcggcgccaccattgccggcactgcggccgtgtgttctgcgcccggtgcacggctaactctgtgccccgctcgccgggggacgccgcgagggaggacggcgagaggattagggtctgcaattactgctttaagcgctggatggaggaggaacccgcagcgcggggggccgctgcagggcaacagccgtctagcccgtctctgtctgccgctagtgtttgcagtgacaagtccagcttcactgggacgaatgggcaaatgtcgtcttatgcgaatattagctactccgaatttccggtccatggagagggcaactgcggcgaggatgacggctatcgtgaggagcagcagcctgctatggaccccgctccaaccatggagcctgcagcttacgctgataactcgtctgatcgattcaacttttgcttgcagaggagtgacgacgaagatgatgattacacagttttccgttcagatttggaagagcagcacatgcaaaattctgataaatattatggacctatgtattttgatggacatcatgttagctgtagtgatgacgcaaaagaatctacatccccaaggaaaaaattgacaaccctagttgattctttgggagcagataagaatgaagatcataacgttgatgagtgctgtaatgctcggtcttcttccatgtatagcatggaagtgctagataatgagcccgtagactttgaaaacaatagcttactttgggtagctccagaacccgaggacggagaggatgatcacgatggtgaacatgatgatgatgagggggtggatgctacaggagagtggggatatctacgcacaaacagctttggcagtgggcactgtcgaagtagagataagtcagctgaggaacacaagaaagccatgaaagacatagttgatggccactttcgggcgttagtttctcaacttcttcaggctgaaaaggtaccattagttgatgggagtggcaaagaaagttggctagatatagttacttctctgtcttgggaagctgcatctcttttgaagccagataccaccagcaaaggcggtcagatggaccctggtggctatgttaaggtgaaatgcttagcttgtggtcacccaagtgaaagtttcgttgtaaaaggagttgtttgtaagaagaatgttgctcaccggcgtatgtcatcaaaaaaggaaaagcctccaatcttgattcttggtggtgcactcgaatatcagcgtgtatcaaatttgctttcaagttttgatactttactgcagcaggaaacagattatttgaaaatggctgttgcgaagatcaaagcacaccaaccaagtgttgtattggtagagaaatctgtgtctcgttatgctcaggatttatttctagagaaaaatatctcccttgttctgaatatcaaaaggccactgctggaaaggatatcacgttgcactggtgctcatatagttccctcaattgattgtttgtcatccgagaagcttggacgctgtgatttattccatgtagagaagtatgttgaagagcatggaaccgctggggaaggtgggaagaaaatgctgaagaacctcatgttttttgaaggctgtcccaaaccgttcggttgtacaatcttgcttaaaggtgctaatggtgatgagctaaaaaaggtgaagcatgttttgcaatatggagtatttgcagcctaccatttggcacttgaaacatcattccttgtggatgaaggtgcaactcttccagaactccctttgaagtcgccaattattgtagcttttccagacaaaccttccagtgctgatagatctatctcgacaatacctatcataccaatccctagtgcttcaccgccaaacagttgcctgcaagcatttggcttgcaaaatgatgatctgacatttgatggcactaaacgaatggaacaaacagcattgggagttccttatgaacaaacagcatctgttcagatcaatagccaaaatggacatattaccggttttctggatatggtccctcaatcatctgttggtcccttgtttcagcagtcggacattcactgtcctgatggtactggaggtgtgaacagaaaaatgaatttacaaggcagcctacctggaaccactagaaatgtgttggttaatgactttagccatagtgtatctactgctcatccgacaaatttggtgtcagctaagggtgacggttcacttgccaagaatcctgagattggtgacaagatagcagataagccggctgcccctctcaacgtacagatttctcatgacgatgagagcataaagaataattcagttgcaaaaacagatgaaattccagcatctccagcagaaaatcagagtatattagtttctttatcctctcgttgcgtttggaaagagagtctgtgtgagcggccacaccttcttcgcataaaatattatggtaactttgacagacctttaggcaggtttttgcgtgaccagctatttgatcagagcaagctttgccaatcttgtgagctaccaccagaggcccatgtttattgctatgtacatccccaaggcagtttaacaatatcagtaaggaaactttcaataaagttgcctggcaatggtgaaaatgatggtagaatttggatgtggcatagatgcttacgctgccctcgagtcaatgggctccctccagcaactaaaagagtagtgatgtctgatgctgcttggggtttgtcttttggaaaatttttggaacttagtttttcaaaccatgcggcagcaagtagggttgccagctgtggtcattcacttcacagggattgccttcgcttttacggcttcggtgaaatggttgcttgcttccgatatgcatcaattagagtccactctgtgtatttaccaccaccaaaacttgattttacttctgagcatcaggaatgggtagaagaagaagcaaaagaggtggatgactcagctgaacttctgttctctgaagttctgaacgcactccacaaaatttcaggaggaaggccaattacaggttcttttgatggcaacttgaagattcttgagttgagaagaaatattggagaactggaagagatcctggtggcagagaagactgactttatggagtcattaaagaatctactgaaaacggatatgagaaaggaacagccgttcattgatattcttgatgtcaacaaactaaggaggcacttattatttctgtgttacttgtgggatcaacggctgaaattcattgcaaattcaggtggcaagtactgtgatgcactagctggtttacggattgggagtgggaattctgattttaatggtaaaccagttggtgcagccccaaagctagagaagggctcaaaggctacagttctttcaattgctaaggaagggtcgttacaacagagctcttgtccatctcatggtgaagatgaggggttcaaccaagccaatgaatataatgaaaatatctcaaggaatgctgcagaattgagcggcactgaagattccattgcaaaaatcaatcatgctaccagtgcagatgttaaggatcgactggataaccaagaatccagaactggtgtacgcagggttgtttctgatggacaatttccagttgctactgacattccagacacattggatgcaaaatggagaggtcagaatgaacctgctcctgattcaaacttggcaaaaccaccactttcagtcgaagacacaacagttgatgttaaaagtcaagccaaggctgtgcatacttttactttcactgttcgttctggagatgcagcagaggaattacttagatggattaagatgccatacatgacatcaaacagttccttaaacacaacttctagttcaccactgagattcacttccttggcagagtacattcctaaatacgtcgagttgttttgtgatctatcacagaaaggtggagcaagacttttcttacctactggagctaatgacattgttattcctgtatttgatgatgagccaacaagtgttatttcgtacgcacttgtttcacccatgtactgcttccagttgtctgatgacagcagcaaaaatagagacaaggagtcttcacttccattgcctgtatatgattcaggaaattttaatccatttcatttgtttgaggaatttggatcccactacgatgttacttcatcagtgtctggagttagaggatcctttgctcctgatcaggtgcacttgagtgtttcttttgaagatggtgggccacttgggaaagtcaaatataatgtcacatgctactatgcaaaaaagtttgaagcactaagaaggtcttgctgtccatctgagcttgatttttttagatccattagtcgatgtaaaaaatggggagcacagggtggtaaaagcaatgtgttttttgcaaaatctttggatgatagatttataataaaacaagttacaaagacagagcttgaatcattccttaagtttggcactgaatattttaaatatctgtcagagtccataagcactggaagccctacatgcttagcaaaaattttggggatctatcaggttactagtaagcatgtaaagggtggcaaggagtcaaagatggatttgcttgtgatggaaaatcttttgtttggacggaatattaccaggctctatgatctaaagggatcttcaaggtcaaggtataatgcagattcaaatggtagcaacaaggttcttcttgaccagaacttaattgaagcaatgccaacttcaccgatttttgttgggaacaaggcaaagcggctactggaaagagctgtttggaacgatacatctttcctagctggaatcgatgtgatggactattccttgcttgtgggagtcgacgaggagaaacatgaactggtcttaggaattattgattttatgaggcagtatacatgggacaagcaccttgaaacatgggtaaaatcttctggcattctaggtgggccgaagaacgcttctccaactgtcatttcacctatgcaatataagaagcggttcaggaaagccatgtctgcttattttattgtcattcctgagcaatggatgcctgcaataatcaatccaagcaaatcatcatcaaatatttgccaagaagattctcaaaatgggtctcaagagtgatatgatgttcgataagtccggttttttgtcctgtcctgtcgtgaaaagttctgaactgctagtctggcgcaatgccttggctgctactgttgcgtcaaagtgatattctggctgaccgcattctcttgtgctaattggcacaggtccgattgcatcattgagtccctcaagcatcggatgtgtatattcccaaagatgtaattatgccctagtcgtagttttccccccttcaataaatcagttccatagtatcatcacttgtgtcgtcgtcgcttaatttttgttgtatgtatagaactagcaggacgcttgtttttgtggtcgttttgtatattattaaatcttccatttt

SEQ ID NO: 118709 - DNA, 990 bp, Zea Mays
atggcagccgggtcttccaatggcgccgccctagtcgccatcgtcgacgacttctacttctccgtcctggctcacgggcgaaacgacgacagcgccgccggggatgacgtgctcttcccgatatccgacgagaagtacgccacggagctccagctgcaggaggtgatcatgtcctccgccatcgcggccacggcgcgctcctcggccgccccacctcgcagtcgcagcagcacagatgccagtgcctctagcagcaacaacgccgccgcagccgcagccgcagccgcagcaacgtcgggtcacagccaaggtaagtgcgcctacgcctcgtcgtccaggccgtccgtctccgttgccgcggcggtcgtgttttgcaagatctgcatggacgtggtgccgccctcggacgtgcaccgcgccagccgcggctgcgcgcactccttctgcggccggtgcctcgcgggctacttgggcgccaagatccaggagaggatcgccgaagtcaggtgccccgaggagcggtgcggcggcgtgctggacccggagctctgccaggacatcttgccccgcgatgtcttcgagcgttggggtgccgcgctgtgcgagtccctgctgctggggggcaagagggcctactgccccttcaaggattgctcggcgatgatgctggtggacgacggcagccacttcacggagtcggagtgcccgagctgcaggcggctcttctgtgcgtcgtgcaacgtggcgccgtggcacgccggcgttacctgcaccgagtacaggaaccttgggaagcgggacagtggcgtcgaggacagaatgctgcttgagatggctaagggcaagaagtggaagcggtgtcctaagtgcgagtacttcgtggagaagcgtgatggctgcctgcacatcacttgcaggtgtggctttgagttttgctatggatgtggcaagaaatggacgacttctcattcccgttgcacaacagcctga

SEQ ID NO: 118710 - DNA, 1145 bp, Zea Mays
aactgaactgaaccccagagaagccaaactgaagttgcaggcatagattcttcgtcattttcctcgcaaaaggaagccggtgagccggagagattcccgtcgtttcgacgcaccggatcgcgggacctctcgcctcccctcccttcccttccctgcgccgcccacggcagaatggcgggagccgacggggcgcagcaacaccatccttgcagcatctgcatggagcccatggcgccctccgcggcccaccgcggcggcgccgcctgcacgcacgcattctgcggcgcgtgcctgtccggtcacgtccgcgccaagctagagtgcggcggcggcggcgccgtggtgcggtgccccgacgcgtcctgcgctgccacgctcgacccggagctctgccgcggcgcgctcccctccgaagtcttcgagcgctggtgcgccaagctctgcgagtccctgttcctcggagcgcgccgcacctactgcccgttcccggactgctctgagatgatggtggccgacgacgacggcgaggagtgcgtgacccagtccgagtgccacgggtgccggcggctgttctgcgcgcggtgcgcggtgccgtggcacgccggcttgacctgcgaggagattgcgcggctcggtgagggggagcgcgagcgggaggacctgctgctcgtgaaggccgcccgggagggcagctggaagcgctgcccgcgctgcaggttctacgttgagaagtccagtggctgcctgcacataacctgcaggtgcggatatgagttttgctatggatgcggtcagcaatggcagctgatacatgacggctgtcctggagcatgaaacagggcttcgagctctcctgtggcttcgttaagcaatgggagctgatacgtgaatcacgtgatgagggtttcaaggatggagtaggtattgatgttgctatcagtatggtttctgtagtcccatggaacaatggtccatggatagtctgacaaccttctctacagaactttggaacattcttctctcatgtatgttgtctgtcttcagttaacatgccagacataatatctttctttaatttagctgagtttgacagtgcttggagttttgcgatgcattatatacagggtaattgcattaacaggaca

SEQ ID NO: 118711 - DNA, 554 bp, Zea Mays
cttgtcgaaatcatgttgctatgttgtttaatttgtgcttacagcatgacaccatgcgattaaacccctaatgagacgttacagtacgaggaataaattataatgagaggacttaacatctttggtacagcactggttattgttaagtggaagcagtaagctctcaatgcagaaaattgtcaaaattaaaattatgttttatcttgtagttactgttgacattgcatagtacgtttgatcaattgcagggcttcgagctctcctgtggcttcgttaagcaatgggagctgatacgtgaatcacgtgatgagggtttcaaggatggagtaggtattgatgttgctatcagtatggtttctgtagtcccatggaacaatggtccatggatagtctgacaaccttctctacagaactttggaacattcttctctcatgtatgttgtctgtcttcagttaacatgccagacataatatctttctttaatttagctgagtttgacagtgcttggagttttgcgatgcattatatacagggtaattgcattaacaggaca

SEQ ID NO: 118712 - DNA, 2943 bp, Zea Mays
ctggcctggccacctgcctccccctcttgtttacccgaggtggcagcgaggcgcctcgctttcctctttcccccccttcgccccgctgcccccaaccaattttcccgatccggcaccgcgcaatgccgctgcagctgatgccgccgcactactatcccgtcctgctgccgctactggttcttgcggctgtggcgggcgtctccgcgggtggtggcggcgacggagatgtcgtggagcggacgtacatcgtgcgggtggacgccgacgcgaagccgtcggtgtacccgacgcacgcacactggtacgaggcggcggtgctggcggccgccggcgacggctcggagtggccggaaggggggccgctgatccacacctactcggcggccttccaggggttctccgcgcggatgtcccccgcggccgccgaggcgctggcgtccgcccccggggtggcggccgtggtgccggagcgcgtgcggcagctcgccaccacgcgctcgccgaggttcctgggcctgctgtcctccccgccctcggcattgctcgcggaatccgacttcggggccgacctggtcatagccatcgtggacaccggcatctcccccgcgcaccgcagcttccacgaccgcgggctgggcccggtcccgggcaggtggcgcgggctgtgcgcgtcgggtcccgggttcccgcccagctcctgcaaccgcaagctcgtcggcgcgcggttcttctccaaggggtacgaggccacctcgggacgcatgaatgagacggcggaggtcaggtccgcgctcgacaccgacgggcacgggacccacaccgcgtccatcgccgcggggaggtacgtgttcccggcgtccacgctcgggtacgcgcgcggcgtggccgccggcatggcgccgaaagcgcgcctggcagcgtacaaggtgtgctgggtgggcggctgcttcgactccgacatcctcgccgccttcgacgccgccgtcgccgacggcgtcgatgtggtctctctcagcgtcggtggcgttgtcgtgccgtactacctggacgccattgccattggggcgttcggcgccaccgaagccggtatcgtcgtctctgcttcggccggcaacggtggtcccggcgggctcacggtgaccaatgtggcgccctggatggccaccgtcggggctggctccatggaccgcgcgttcccggctaacgtgcggctcggcgacgggcaggtgctcgacggcgtgagcgtgtacgggggacccgcgctcgagtccggcaagctgtacgaactggtgtacgctggggcgagcggcgggggtgcctcgtccgcgtccgacggctactcggcgtcgatgtgcctggacggctcgctggacccagccgcggtgcgcggcaagatcgtggtgtgcgaccgcggcgtgaactcgcgcgccgccaagggcgacgtggtccgccgcgcggggggcgtcgggatggtgttagctaacggggcgttcgacggcgagggccttgtcgccgactgccacgtcctgccggcgaccgccgtcggcgcggccgcgggcgacaggctccgcaagtacatcgcgtcggccaccaagcagaggccggccaccggcaccatcctgttcgagggcacccacctcggcgtgcacccggcgccggtggtggccgcgttctcggcgcgcggcccgaacccgcaatccccggagatcctgaaaccggacctgatagctccaggcctcaacatcctggcggcgtggcccagcggcgtcgggccggccggcatcccctcggacggccgcagcacggagttcaacatcctgtcgggcacgtccatggcctgcccgcacgtgtcgggcctcgcggcgctgctgaaggcggcgcacccgagctggagccccgcggcgatcaagtcggcgctgatgacgaccgcgtacgtgagggacaacagcaacggcacggtcgcggacgagtcgacgggcgcggcggccggcgcgttcgacctgggcgccgggcacgtggacccgatgcgcgccatggacccggggctggtgtacgacatcggcccaagcgactacgtgagcttcctctgcaacctcaactacacggagcggaacatccgcgccgtcacgcggcgcccggcggactgccgcggggcccggcgcgccggccacgcgggcaacctcaactacccgtccctgtccgccacgttcgtggccgccggggcggcggcggcggcggcggcgagtaggacgcacttcatccggacggtgaccaacgtgggcggcgggagcgcggtgtaccgcgcgtcggtcacggcccccgaggggtgcaacgtgacggtgcagccgcggcggctggcgttccggcgcgacgggcagcggctgagcttcgcggtgcgggtggaggcggcgctcggagggaggatggagcccgggagctcgctggtgcggagcggcgcgctgacgtggagcgacgggcggcacgtcgtccgtagcccgatcgtggtgacggtgcaggcgcctctgcagtgagtgctgtactgaccagctgccccgaccgccacgatgggaggtggagaggagaggacacagtctcagtgttctagcttttctgtactattaaggttgctgttagctgtagaatacgtcgtggaagagctgtatcgttagctactacgtaacgtaagctacactggaaatcatggagccctggagctccgttcttccccatttctttctttctcctcgccttgctgctaccatttgcttctgtattgccggcctccggcgtgcggttttgcacggaatggttttcaagtgcttcgtcgtctgcacctacggagtacggtcggtctggtgtgccagcagtggctgacctgaatggtcctcggctgagctcacatggccgcgtcatgtgagatatgatcatatggttgtgagtggg

SEQ ID NO: 118713 - DNA, 723 bp, Zea Mays
attcttcaatcccgcgcgcgtcggctgtgttagccggtagccctccccccgtccgaggtccgagtccgaccgaaggagagaggcagcagccatggctaagggcgggctgagcaaactccggtgcatggtcaagaggaggtggcactcgtcgagccgcatcgtctcccgcgccccgtcgccaccggctcacgccgacgccgtcgccgccacctccggcaacgcgcgcggcgcgtcgttccacggcgcggacgaggcgcccaagggcctgcacgcggtgtacgtcggcaggtcgcgccgccggtacctcgtcgcgcaggagctcgtgggccacccgctgttccagaccctcgtccaccgcgccggcggcgccgggggtcccgcgggtaccgtcatcgtcggctgcgaggtcgtcctcttcgagcacctcctctggatgctggagcacgccgacccgcagccggagtccctcgacgagctcgtcgactactacgcctgctgaactgcgattccgatggtagatagagtagacgaagcattgttgcagctcatgaacgctgtgttgctttggctcgttggtttgattttggttcgattggcattggtatagttttattttatttttttcgtcacttcacttaataataaggtctctggaatctggacgagtgcttctatgtacgctgaaacagagagaaagaaaaacaaattattctcccaatacaa

SEQ ID NO: 118714 - DNA, 2507 bp, Zea Mays
ccctctgtcccagcagccctgtgcgccatcgcgcggcccacacgagcggcttgccggattcgcgccgacgcggcagacccagacaggtcagcttcggatcgaggaagaggaggcggtggaggcgaggagtcaactaaacttgccagccatggacggatcggccgcggagctggaggcggcggagcgggtggtgatgcggtgggactcgtccttggcgtgcggtggcacggacgagccgatgctgttcgacggcggcggaaaccgtgccgaggccgaccggttcctccgcgccgtcgacgacctgcgccggctcgcgccgccatcgcccgcggtcgtgggcagcccgcgccgcctctcgtcgtcttcggcggcgaggagcggcgccgtgctggtcgctatgacacggctcgaggacgagttccgccacgtgctgtcgtcgcgcgccctcgaccacgagatcgaggcgctcgcggaccttagctcgctctccatcaacggcgaccggtccaactcggcctcctccgccgacctctccgccgccgacgaggacgactccgtgtcctcctccattggccgccgcagcaccgcctaccgctcgctccggagcatccgcgagatcgacctgctgcccgacgacgccgttgcggacctccgcgccatcgcgtcccgcatggccgccgccgagcacggccgcgagtgcgcgcaggtgtacgcgtccgtccgcaagccctctgtcgacgcctccctgcgccggctcggcgtcgagcgcctcagcatcggtgacgtccagcgcctcgagtgggacgcgctcgaggccaagatccgccggtggatccgcgccgcccgcgccgccgtccgcggcgtcttcgccagcgagcgccgcctctgcttccacatcttccacgaccttcccatctccgccgcctcagcgcccgccacgcacgacacccccttcgccgaggccgtcaagggcgccgcgctgcagctcttcggcttcgccgaggccatcagcatcgatcgccgctcccccgagaagctcttcaagatcatagacctccacgacgcgctctcggacctcctacccgacgtctccgacatcttcgccgcctccaaggtcgcggagtccatatacgtgcaggccgttgagatccggtcgcgcctcgccgatgccgtgagagggatattctcggagttcgagaacgccgtgctccacgacccgcccaagaccgcagtgcctggcggtaccgtccacccgctcactcggtatgtgatgaactatagcagcctcatttgcgactacaaggccacgctatccgagctgatcgtatcgcgtccatcagctagcgctcgtcttgctgctgagggcaatgagctcgtgccgtccttagctgacctcgagctccccgagcttgagaaccagttaccacttgcctctcacattgtctggatcattgttattcttgaacacaacctggagggcaaggcaacactctacaaggatccagctctctcgcatctgttcatgatgaacaatgtgcactacatcgttcacaaggtgaaagattcgccagatctctggggcatgatagctgatgattacctgaaacggcttactggcaagttcacaatggcggccacaaactaccagcaggcctcatggttgaagatcctgaattgtttgcgtgatgaggggctccatgtaagtggtggcttttcgtcagggatatccaagtcggcactgcgggagcggttcaagtccttcaacgctgcatttgaggacgcgcatagggtgcagtcagggtggtgcgtgccagacaaccagctgagggaggagctcaggatctcgattgctgagaagctgctgccagcataccagtcattccttggcaggtttcggcatcatatagagaatgggaagcatccagagctgtacattaagtactctgttgaggaccttgagatagctgtgggtgatttctttgagggcgttcctccttccccgcatcacaggaggagatcacatgggtgaaggtcctgtacatcaggtattcaactagctgttgttgctatttattcttttattcttcacgaggaagctggtgctggtatttgggctcgatttcttctgtcctgatagatgtgagtataaatttggtgatcttcaatcaaagatggcaaatatgaatatattttgggggtctttctgaagctgtcaatcggcacagtggttcctactccgtaagagaagttgttcatttggcttcaatcaaagatgttatatagatcttgcaagtagcatgtccatataggaaattttttcagtaacgtggatagttggaacaacccatggcatttctgcccctgttttgcaccagcttttgttatccttttcaatgttaacaattatccaaagggtctatgctttgtgggttagatgtaaaaagatttatgtaactctcatgtaccacatgattttgtaatatgataatatcatgcttttacaaatt

SEQ ID NO: 118715 - DNA, 1291 bp, Zea Mays
cgcctcgccgatgccgtgagagggatattctcggagttcgagaacgccgtgctccacgacccgcccaagaccgcagtgcctggcggtaccgtccacccgctcactcgctagcgctcgtcttgctgctgagggcaatgagctcgtgccgtccttagctgacctcgagctccccgagcttgagaaccagttaccacttgcctctcacattgtctggatcattgttattcttgaacacaacctggagggcaaggcaacactctacaaggatccagctctctcgcatctgttcatgatgaacaatgtgcactacatcgttcacaaggtgaaagattcgccagatctctggggcatgatagctgatgattacctgaaacggcttactggcaagttcacaatggcggccacaaactaccagcaggcctcatggttgaagatcctgaattgtttgcgtgatgaggggctccatgtaagtggtggcttttcgtcagggatatccaagtcggcactgcgggagcggttcaagtccttcaacgctgcatttgaggacgcgcatagggtgcagtcagggtggtgcgtgccagacaaccagctgagggaggagctcaggatctcgattgctgagaagctgctgccagcataccagtcattccttggcaggtttcggcatcatatagagaatgggaagcatccagagctgtacattaagtactctgttgaggaccttgagatagctgtgggtgatttctttgagggcgttcctccttccccgcatcacaggaggagatcacatgggtgaaggtcctgtacatcaggtattcaactagctgttgttgctatttattcttttattcttcacgaggaagctggtgctggtatttgggctcgatttcttctgtcctgatagatgtgagtataaatttggtgatcttcaatcaaagatggcaaatatgaatatattttgggggtctttctgaagctgtcaatcggcacagtggttcctactccgtaagagaagttgttcatttggcttcaatcaaagatgttatatagatcttgcaagtagcatgtccatataggaaattttttcagtaacgtggatagttggaacaacccatggcatttctgcccctgttttgcaccagcttttgttatccttttcaatgttaacaattatccaaagggtctatgctttgtgggttagatgtaaaaagatttatgtaactctcatgtaccacatgattttgtaatatgataatatcatgcttttacaaattcaaaaactccatggcac

SEQ ID NO: 118716 - DNA, 617 bp, Zea Mays
agttttgtagattgttttgtcctactgcctactatctgacttgaggaagtaccaaggggtttcggttccgtctttagtggcacaaacaagattggtgatggtggtttcggttctgtcttcagtgacgcaaacaagattggccacttctatcatacgtggtaatttgcaatatgcttatctaagtgcactaagaaggctttcacttgatcctggtaatcaaacattcctccaacgagatgtgcaaggatatctgcgttaaggaattgacatgggaatttttagccaggggatcatatcaaggagagctttaggtggccttttttgctgaaaagctttgcaactgtttgcaatgggtttaggagatattctccgcaatgatatgtccagtttgtcgtggcatctataattgcagtatatgcagaactaagaaaggatggttccctactggttctgcatgtaggaaggcggtcggacttgggtacaaatctgtagcacactttctaattgccaagcataataacaaacaagtgccactgatatagtgaacaacgcggaggagctccaataatctgatgtgggaacaggacctgccatgtttgaggataagaagataggtg

SEQ ID NO: 118717 - DNA, 1767 bp, Zea Mays
taaaacgaactagaactgttactttaattatatctctgataatcgtatctccatgacgacgatgcaagcgaaacaagtacaatcgatagtataatgcttcccttttataagaagcacaacaatgtatgttcacacccattccaaggcaaccacacagatttgtcgatgccacctcttgcacctccaatcctaatggagctatcgtcgtcgccaatgttactcacctgccttggcatggtgctcaccatcgtgatcctgatcctccgcagtctgaaatgcaagtcccgccgccgtgtttatcgcctcccgccgggcccgaggccatggcctgtcatcggcaacctgaacctggtcggcgcgctcccgcaccgctccatccacgagctctccaacaagtacggcgagctcatgcacctccgcttcggctcctactccgtcgtcgtcgcctcgtcgcccgagatggccgagctgttcctcaaggcccacgacctgctcttcctggaccgccccaggacggccgccggcaagcacaccacctacaactacgcggacatcacgtggtcgccctacggcgcgtactggcgccacgcgcgccgcatctgcgccacgcagctgttcagccccggccgcctcgcgtcgttcgagcgtgtccgcgccgaggaggtgcggcgcctcgtgcgcggcctcttcgcggcgtcgggacgacgacgcgccgtgcgcctcggcaaggaccacctgtccacgttcagcatgaacgtgatcacgcggatggtgctgggcaagcggttcttcgacggggaggaggcagaggagagcgcggcggagggcccggtgtcgtccctgcccgagttcatgtggatgatggatgagctgatgctgctcaacggcgtgctcaacatcggcgactggatcccgtggctggactgcctcgacctgcaaggctacgtgcggaggatgaagagggtcgcggcgaggttcgacgcgttcctagagcacgtcctcgacacgcacggccagcaacggcggcgcgagggcgagagcttcgcggcgcgggacatggtggacgtgctgatgcagctcgccgatgaccccacctccgaggtccagatcggccgggtaggtgtcaaggcgttcacccaggacctcatagtcggtggcacggaacccgtgtcagccaccgtggagtgggccatgtcagagctcctgaggaagccgtccgtcctcgccatggccgccgaggagctggaccgggaagtcggccgcgggcgctgggtcacggagaaggacgtggcacatctcccctgcctccaggccatcgtcaaggaaaccatgcgcgtgcaccccatcgcgcctctcctgcccccgcacgttacccgcgaggacgcgtccatcggcggctacgacatccccaagggcacgcacgtccttatcaacgtgtgggctatcggcagggacccggctctgtgggacgcgccggaggagttcaggccggagaggttcgtcgggagcaagaccgacgtgaaaggacgggatttcgagctgctgccgttcgggtccggccggcggatgtgccccgggtacagccttgggctgcaggagatacagctcagcttggccaaccttctccacgggtttacttggacgctgccggagggtatggcgaaggaggacctgaggatggacgaattgttcgggctatccacgacgcgcaagttcccgctcgaggtcgtcgtccggcctaggctcgcttctgaactctatgcatga

SEQ ID NO: 118718 - DNA, 784 bp, Zea Mays
catttcgcaagtacctccaacaaccaccaagcccaacgacgaccccttgtcattggctcttctgcatccacaattccacacatcgctcgccacgcccacacctacccaccactcgatcctaccggctcccacgttccggtctcgccccaatcggccgggccgctacgctccatggcgctcgacctcctccggccaggcgtccccggcatgcagccggtcggcgacctccgcactgccaagtccgcgatcctgttcggggtggtcaacggcctcttcttgccgccgttgctggagccctgcctctgcaccgccagcgccctgtgcgacggcggcggcggcggcggcggcggcgaccacgcggagcagaggtactaccagctcgcgaactgcgtgctcaccatgctcggcgtcgccctcctgttcgtggacatggcgctgtcgcgggcggtccatcaggcctcgccgctgtggccgcccacgctcagagcgacggtgtggctcaccaagaccttgacctgcggcactctccagttcggcgtcaacctcgtgtacttctgcctcaagatgctgtgcgctaggctcttgctcgttttcgcctgacttcgttcgccattgttttcactaggaagggacctagatccaccttatacgattcttttttttcttttcgcctaaattgaacctgtgctgtgtgtactcgttatggagttctgaaatcgggtgctcaaataaatctatctatgataacgaagcgcactgtgtgagccttctcgttcctaacgat

SEQ ID NO: 118719 - DNA, 658 bp, Zea Mays
gagaagaaacaaataaatataggtcacatgttcaagtgtcacaaatatattacaccttttaaggatgattcatcctaatttctaaccaactgaatattcacggagctgtcacctataacccagcacaccattctcgtcggccctggactcgcgtcgcctaggacacgcgctggcaccagaagttgtcccggcctccgctgccctcaccagcaggggcggacccaggcccatggccgcccaggacaagtgcaggtacaatttttttttaaaagagctcgtgtccaagtctggctggactatgctgaagagctgcaagcctgcatctgctgccctctggcctctgctggtctgccctctaccctcgctgagtcatagttatatgtatgaatatccatccggcacagtgcaagcttcgcaagcacaggataacacacatgcaagcaagagcagactaagaccacctacatgtgtcctgcagatttacatactagactagtagcaaggcctcgggcagcacatgctaggcttctgctagtctagagagatggagggagggagagactagagagcaaatcatcgagctaggataagcaaaaaattctcaagctagcaaatgattctaaaccgaagagacaaaaaaaattacaagccacagggc

SEQ ID NO: 118720 - DNA, 813 bp, Zea Mays
caaccgaaacattcacaggaatggcagtaacgcgtcgtaacttctcaaacttcgaaatgcacattcagagtattcacatgcacacaaacatcacgagataaaggtggccaacaacaaagagagaggatccacaaataagcaactagctggattcaataagcattgttactgttccatcagataacagttgctaccggaggagaccagacacagcagcacctaactacagcaagacacgcgaacatacgagggaagcctgcaagcggaggccacgcagcctaggacgaggtgaacttggtgacggccttggtgccctcggagacggcgtgcttggcgagctccccggggaggacgaggcgcacggaggtctggatctcacgggaggtgatggtgggcttcttgttgtaccgcgcgagcttggcggcctcggcggcgagcttctcgaagatgtcgttgatgaaggagttcatgatggacatggccttagaggagatgccgatgtccgggtgcacctgcttcagcaccttgaagatgtagatcttgtaggtctccacgctcttcttgcccttcttccggcccctctttccctcgccgccctccttgccggcggacttgcctgctgggacacgcttctccgccttgggcttcttcccggccggcgccttctcggcagcgggctcctcctccgccggcttcttcgccgcgggcttcttctcggccttgggcgccatcgatgcggggcgacttggagttcggagagggggcgggagaagacggagggaaatgaaatgcttttccgccggcgcgccgttg

SEQ ID NO: 118721 - DNA, 262 bp, Zea Mays
agctcataccgaagggttgggcgactgtttggcctgcggtggcaccacgacacgtcgggacactagtgagaaatctggagccgcacgacaaaaatctacccccgccgaggcgcccaatacgcacagcgcgaccacggcaatggctaggaacaccttccaagagcgcagcggcgaagcaattgggtggactactgcggcggtgatttggcttcggcggagtggttcacggcgatagtggaggtcgcttccgcgtgtgagttgc

SEQ ID NO: 118722 - DNA, 1811 bp, Zea Mays
atgaaccaagagatgacaacaatgttccctagtggcatcaaagccttgattgtggaggatgatgcaaggttcatcaagtcatcttccatgcttttttctctcctaaacttcaaggtggcatcttgtggaagccctatttctgcacttagactcctctccggtgacaagatcaaagacgtgcacgtggtcctcgtcaacgctgagaaggctaccacctgcggcttcgacttccgcgccattgtcgagaccgatctctgtatcccggtcatctacttcttgccgcgcgaccacgtggccaccggcgacgaggcggacgagctgctccgcacgctgagggactcgacctacgtactcaggagcccgctgcaggccagcgatgtcggcgacctgtggacggtcgtcgcgtggcgcaagtgctacctggagaacaaggcgaagaaggcggccgaccgccgccggcgcgtggttcccgccgccgttcaggcgtttctggccggtggttattctaccgtgggcgagggaaggaacgacgacgaaagccgggtccacttcaaggcggtgagcgccggtggtcgtaggggccgcaagaggaagagcggcggccacaccgtcgtcgtcggttcctcaggagacgaccagacaggcaagggacatgggaagatgaacgcgacaggcgggcacgagaacgacgacgacgacgacggcggcgtgtctagccagcaacagcagcagcagcaacccgtggccactgctgcaacatcccgctggaaccaacccgcggccggcagcgtcgcaccgccgacggcggcagtaggaaacatggctaccaccgtcacagacgagccggagttctcccgcggcagccaccaccaccaggccgtttctctgccgctgatgttcggaccgtttccgtaccagggcccgcggccgcaagtgctgaagcaggccatgttcgtgccgctgccgcgatacagcgggactgagagcatcggtggcgcaaccgtcgctgcagatgcaagagagtacggcaacgctgccggttcacttcttcagcccctgaaccttggcacaggaccacacggccacgacgagcttgcagccatgacggcgtacaccgagtccaatgatccaccggtggcagaggcagctaccaatcctaccatagaagaagtgctcaacaatggcgacagcttcagcacctacagcacctcgctcatggcacctaatcaggttcttgatgacatggcttcggatgtgaatgagttggcaatggcaggaggagcaattttcagcaacgacgacgcatcgtttacggcgcctcaggatctcgccgcggcgctagatggtggccagctagcaccaggagcattggacgccatcagtgcatcgctcatggagacggacgggaaccctggtctcgagctagaggcaatgttttctcctgatcagtacgagaacaccttgtttccgctggaagctctgctggggctggatgatgctcccgtgtacgaggacggccaagactaccggcagggtggcgggagtgccgacgatgaggctgcagggacctcgctgatcggcggcgctgatgacagtcttgacgtcctggatgattatttgttcatggacagcgctggggatttcaacgacgatgaacgtgactaattcctggagtgcagtatcagcagtacctgatgagctgagaataagagagggacgggatcatgagtttctgtttcctcaagtaaaccagctttgaataatgtatgtactctctacatttttaaatgtgcgatgttttttttaacagt

SEQ ID NO: 118723 - DNA, 106 bp, Zea Mays
ccccgtcttaggacctgtttccttcaagcatgaacataaaggtgtagatttcaggacagatggtcccataacctgcaaaattgtacatagattcatggcgttgtca

SEQ ID NO: 118724 - DNA, 829 bp, Zea Mays
cagaaattgcacgccacggacaatcagctttaatttgctcaaatacttccgaaaagagcgcacaaaactactatgatgaacattccgaacaggtaacagatagtctcaaaatgctgaacaacgacctacaaatccttgcatacatagttcatatgctcaaagaatatatagcgtgccactgcagacagacaggagatggtgacaaagcaaaataatggcagaaaacattacacctacttacacgctcacaaagcagctacagcaaaaagaatggccgtcaccagcctcagcgcaccagcactggtcaaaacggcgccatttgtggggcccgagcagtcgtcattgttgccactgaagcatcccgggtggatggctgccttcggcacttcgccatccaccttgaagctggtagtcggcttgccgtcactgaacaggacgcaccagaagtacggtccaccgccatcggtgccgctcacagccgccccgacctccgtgtggttcttgctgcgcagtatctggaggcccttcgcgtcgttcaccaacaagacgccaaaggcctcagctggagccaagtactgggactggcaagccaccagccttccggtgatcttggagagggttgtggcctggacgccacaggtcggggcgaacgtgtcggtgaagcttgactccatcggcttcttgtcgtccacctggtcacaatggccttcgtatgctttgatgtactgcagagcgatgcatcccaaaccttggttgtccgaaacagaagatgccttgccagcagtgcggttgctgttgatcagtgccacgagctcatcagcagggttgc

SEQ ID NO: 118725 - DNA, 792 bp, Zea Mays
ctcaaatacttccgaaaagagcgcacaaaactactatgatgaacattccgaacaggtaacagatagtctcaaaatgctgaacaacgacctacaaatccttgcatacatagttcatatgctcaaagaatatatagcgtgccactgcagacagacaggagatggtgacaaagcaaaataatggcagaaaacattacacctacttacacgctcacaaagcagctacagcaaaaagaatggccgtcaccagcctcagcgcaccagcactggtcaaaacggcgccatttgtggggcccgagcagtcgtcattgttgccactgaagcatcccgggtggatggctgccttcggcacttcgccatccaccttgaagctggtagtcggcttgccgtcactgaacaggacgcaccagaagtacggtccaccgccatcggtgccgctcacagccgccccgacctccgtgtggttcttgctgcgcagtatctggaggcccttcgcgtcgttcaccaacaagacgccaaaggcctcagctggagccaagtactgggactggcaagccaccagccttccggtgatcttggagagggttgtggcctggacgccacaggtcggggcgaacgtgtcggtgaagcttgactccatcggcttcttgtcgtccacctggtcacaatggccttcgtatgctttgatgtactgcagagcgatgcatcccaaaccttggttgtccgaaacagaagatgccttgccagcagtgcggttgctgttgatcagtgccacgagctcatcagcagggttgc

SEQ ID NO: 118726 - DNA, 610 bp, Zea Mays
aacaaaaacaaagcaatttcatgaatcaatctgagcttgtaagcacatcttcattcctttcagtgagtatatcatcaacttcatcatttacctcatgaaccacattgctatcaaagccttctattaaatatgcctcacttcatattttttcagacagtgaactagtgtattctattgcataaacatgaactgctcatatatttacatccaaatgtgcagctagtgtatttgtttatataaaccatggatacacttgtaagaatggtgacaatctgaagcagaaactgaaacacaaactgaaactatttgaatcagcttgcaactaatggattctctaactattcatccagtgtatatccatcattttcaatcatcttgcagggttaccacaataaccgaacgctgcacttttcaagggaagcaagaatggtggtattgctgccttttctttttccgaaggcgacggggagggtcaccgtcgaggctgtgttgtgccgtcacttcgctcagcctcctcttcgcctcctcggtcgccactcgccagtgttgcgccgtctcaccgagattcgatccggagggtagaagaccgggattcgtaccgaacagtagt

SEQ ID NO: 118727 - DNA, 2012 bp, Zea Mays
gaacactccaacacacaagacacatacatatattctccctcgctctcaaacccttttccactcacgaagagcagagctgttgctagagctggtcgtcttcctcttcctcttcctcctcctgcctcgatctgacgagagctcagccttgccttagtctcgccatcgcagaaggcagaagcactagttcctgacagccacaaccaaccaaaggccaagctaccgtgaggcgagggaaagggaagaaagatcacatatcgcctattcgcctacctctgcgtgcatcagaagatgatccccttcataaagatgaaacattcccattccctccactagaagctccgggaggacgcagcaagctcaccgaagccagcaaccgatggatcagaggcgcgtcacagcgaggttcggcagcaagacgagctcggagcggaggatgctgcggcgcgtgaggctccccttctggtcctgccctccaaaccggcctccaggcacctgagcgcctcgaatcctcgatagaacagctggtctcgtgctcccctcccccctgtctctctactctgactttctttctttctttctccgctccgctccccgtgcccctcctgctccttggaccctgcctgttctgtcagtcagtctccctccctagaacggcatggctctgcgttttgtgtgatctcgtcgcgagcctgtccgccggtgccggtgcctcaatccccttgggagaagcaagggctcctgtctggtccgtgttcttgggaaccagggccttggtactgctgctgccgcgtgcttcactgcttcctcgctgcctccgatcctctcgtctcgtgtgtgaaagaaacattccggaggcgcgtgttcttggcccgttgtgcctgcaacttgctggatgcaagagctgccctgtccctgccccgagcccctgtttccatcggaaaaggcaacagctcttgcctgcttggcacctgccgagtaattcgttatatatacagtgctcccacgaggccacgaagcactagttggcagctgctgcgctgttatgttcttgtgcctcgtggatcgtcgccgtcggcctcgaagctttccacgacgaaatggacgacataggctccgtccccttcgccgacgccgggctcctcgacgggttctacggcggtagccatggacatggtggtgactacgggctgcttgctagccagctgggagcgggagcgggagcgtcgtcgacgtcgcctgccatcttggacggcagcgtgccgctggtcgacgccgcggcctccgcggaggaggcgacgaggaggaagggagaccacctccaggacgacaaggcggcgatggcgctcaagagccacagcgaggcggagcggcgccggagggagaggatcaacgcgcacctcgccacgctccggaccatggtgccctgctccgacaagatggacaaggccgcggtgttggctgaggtgataacccacgtgaagaagctcaagtccaccgcggcgcacatccgagaccgctgcgccgccgtcccggccgacgcggacgacgtcgtcgtcgagctggtccatggcggcgcggcgccgccgtcggccggaggcggcgtcctcgtcagggcgacgctcagctgcgacgacggcgcagacgtgttcgcggacgtcaggcacgcgctgcggccgctgcggctcagcgtcgtcggctccgaggtcaccacgctgggcggccgcgtccgcttcaccttcctcatcacatcgtcgacgtgcggcgacgtgggcgccgtcgtcgtcgactcggtgcgccaggcgctccagtccgtcctcgacagggccaactctgcgctggagttcgcgccgagggcgtcgcttctcaacaagcgcaggagggtgtccacgttcgagtcctccagctcctcttctgcttgacgccgatcagatgattgattcagagaagacgaagacgaagacgtacgtgcaagcaacatgcatcatgtacctttgttatactgtgtcatgtgt

SEQ ID NO: 118728 - DNA, 1888 bp, Zea Mays
acccagtagtgtattgttccgtaatgtcaataatctcccccacaccgcgactctgtctaaacgccggatcctgatccgccattaccgccctcagctcgagagctcgactcttatcacagaggcgcgagttccccgctctgttataaacccgcgccgcgccttcccgtcctatcccctctctcaggctccgtcgcgggatccgaggggcgcgcgcttgcgtcaggtccaggtccgccagaggcgatgctcacgtgcatcgcgtgctccaagcagctcccgggcgacgcgccgccgctgcgcgagccgtcggacgacgatgaccgcgccaacgccggaggcgggggcgaatcggcggcaacgcccggcacgaggcaggccatcagggtgctcaccgcccagatcaaggacatggcgctgaaggcatcgggcgcgtaccggcactgcaagccctgcgccggttcgtcctccccggcggcgtcgcggcggcagcaaccgtactaccacggcgcgtacgcggagtccgggtccgaccgcttccactgcgcgtaccagcgcgccggcagctccgcagcatccacgccggggctgcgcacggggggcgcgatgtccagcggtgacatcacgccatcggtcagcgcgcgcaccgacttcctcgccgacgacgaggaaggggacgatgaagagggaacggcgactggcagcagcgaggaggatgaggagaaggagtgggtcgcccaggtggagcccggggtgctcatcaccttcctctcgctgccgcggggcggcaatggtctgaagcgcatccgattcagccgtgaaatgttcaacaaatggcaagcacaaagatggtggactgaaaattacgagaaggtcatggagctttacaacgttcagaagtctaacagtcaagttgatcctctgccaagcattccaaggtctgacagtgagatctccaaagacgataccccagctacagcaccgcttaacaaggggcaattgctacgtacttcacccagaccactaaaaggcagtgaagccataggctattcatcttcggattgtcctcagcaccaatccagtcattttcgcaacgtttaccgcaaagaccgctaccttgggcaccagttctgtgatccagttgaactggcatcgacgcctgagttatcaagcatcagtggtgcgaagacagagacgtctattggtgcatcagtgaggacaagctcatctcctgaagaggtcgatggatcgggcgaactttcagcctctgtcagcaacgcaagtgacgaagagagggaatgggtagaagaggacgagcctggcgtgtatattactattcgagctttgcctggtagcatcagagaactacgccgcgtcagattcagccgggagagattcagtgagatgcatgccaggttatggtgggaagaaaaccaagcgagaatatatgagcagtatctctgagagaagacgtgttagctacattttaccatttgatgcttctacaattatagaaacatctctacatcaggcactaacatcgtgtcatcaggtttgctccttgcaggcgcaacaatgaccctgggcagttaggctgttcgcattgcatgtgtgattgcttcgaggcttttcctttccttttctttttgtgtttaacatttgctctgtttgtgtgatattcacattttttccctttttttgctgcgttgtcgttagtcagtctggatagacggtttatttcagaaaaaaaatgagaaactgtacattttatcaaccataagttgttgtttcggaaaacaaagctggactaatgtcttcatgatacgcatgaaatttttaaagttctccgcacggaaagtgattttcgtgcatcaggaacagaagctttgag

SEQ ID NO: 118729 - DNA, 151 bp, Zea Mays
tttttttgaaacatttccggtcgttttggtagatgaagagggaattgtgagagcagacgttccttttagaagagcagaatccaaatatagtgttgaacaagtaggcgtaacggtggagttctatggtggcaaacttaatgaagtaagttat

SEQ ID NO: 118730 - DNA, 1479 bp, Zea Mays
atcgcattccattcacccccatatggccatatcctgcaatattctaaaacttcgccgcaaccaaacgtctccacacgcactagcgcggagcggcggcagctacctttcctccatcacttcttcgccttcctctcccaatcaaaccctaaccctacgcttagctagctagctacacgtacccgccgctctcaagctagaccagaaccagaccgatcgatcgatcggtttagcaggatgagcgagcgagatgcgcgtgacgatgggaacaccaccggccgcagcgcgccggccgcgggcatcgactcattctcgcagctgccgttcatccgccctctagcccgcgagaagcagaagcagcagccgcctccaagctcagggacatcgtccggcatccggctgttcggcgtcgacgtcccaccggacgctgtcgtccctgccccggcctcccccgccgacgacgtggaagaagaagatagctttgtcaacgagagcaccgccaacaactccgctgccgagacggcggcaggtgctgggggaggaggcagcggcgacggcgacggagtcggaggggcccggcggaagttcgagtgccactactgctgccggaacttccccacgtcgcaggcgctgggtgggcaccagaacgcgcacaagcgggagcggcagcacgccaagcgcgcgcagttccagaccgccatggccatgcaccagcaccgcagccagtactactacccgcacccggtcccggaccccgcccacctctaccccgccttcgcggcttatagacaccaccaccgcttcgccgccgccacgccgccgccgcactacccctcgtgggcgggcgccaccagcaggcactacagcagcgggcccgggtccatctcgcagccgatcgacggcagcccggtgacgccgccgtccgggctgtggctgcaggtccccacgggcggcggcatcctagtgggtggtgctccgtctccgttggccgccgcgcgacgtcaagaacagcccgtgcaaccacttccggtactcggagctgaggaacccgcagtggtggggcggggagctgctggctcagcgcccttctcgccgtcaacctcctcctcgtcatcgccggccgcttcgcctcataagcgccccgccccgccggagaatgtgagtttggatctgagcttgtagccgcgagaaatgacggtcgatcgtccgtacgtaaaattgctggtcttccacaaagcaaaattgagtgccctctttttttttttggcctcctgccgtcccatgcttgcaatttttcagttcagcttctatgtccagagataattaagaaaacaaatgatctttctcaactgttagtttatctgcgcttctggaactgttcagttcctttttgaacaattcttttaattagctgaaatttcgaacgggaaaagggattattattgctggtgaatggagtaattgacaatattagattctgaa

SEQ ID NO: 118731 - DNA, 3057 bp, Zea Mays
gctctcgcacgagacacgcacgcccgcgcgcgtgaaggtacgcggaagcaggggcgaggattctccgaagcggagggcgaggcggcggcagcgaccttgagggagatggcggcgggcggtagggtttcaatcccggcaggggcgcggcgcacgatcgcggacatcaaggagatcgccggcggccacaccgacgaggaggtctacgctatgctccgcgagtgcaacatggatcccaacgagaccgttcagaggctcctcctcgaagatacctttcatgaggtgaaaaggaagcgtgacaagaaaaaggaggttagtaaagagccatcagattctcggtggagacctgccgtgcaggggcaaggtggaaagaattgtcggaattgtgcttcacgcagtttgtccagctctaatgattctgctggacgaagtgctatttctggaaaggagaatggaataagtttgatcatgggaaaaggtagtggttctactccgataaccaatatgaatatggatgtcaaagcttccactttcatgccaagtaacagtttgttgagtggtctttgcaacggtccatatcaatcagttgatcctgctgctgtgctggtgtctagttctagtgctgttggtgataagtctggttcaacagccttggctgatcttacaggtggtcttccattcaaagatgtagtcgctactatagatccaaattcactgcaaccattgaaaccagcaccaccatcagatcctgtggttgtatcttttctcaactctcacagccttggtgacgttggtgcttccagacaaactattggaatcaagaagacatcagtagaacataaggtggggcgtgatgtatcaacagacaaaggctcctccgaacaatctgtgcaatcttcatttcgacgatcctctgctagtagaccatcttccagctacaacagtcattcagaacaatcccaaaaagcaaccgaggatgctaccgtacatgataatgtacctttggctgctgctgacactatcacccaatcagctccagtaccgaattcagctggtacagaggattcgttgaaggtggacatatgtttaaatgatctacagttatcagataagcagcatgtgataattccagatcatcttcaagtttctgagtctgaaaagtatgttctaagctttggaagcttcgacgtcagttttcagcaaactaagggctcttcagatcctgattatgtgaagagctctttaccgaaattcagttcgtctcatgagttggatggcaacattgatgaacttcagtccatgcaaagagatcagaattcaacatctgttgtccaagaggaagctggtcatgttcctcaaccttctgcaaagctagaaaaatgtgcaccctcagcaatggagatttcatctattgcccttatggaatcaaaagactgtgatgacgattcagccacttcaggggatccccaatctacaggaactcatagtgcaccatcttatgtgacatatggatttgcaccacaatcacatgttaatcagattgagaagtccgaatctcattctcagtcgtaccatcccacaactgatgctgatgaacggctgtccccttctcttgctactcaagctgctcacaagtatgggaatatcccagttgttcccacacaaactggccaggatcaagaggggaacgactcacctgtgattatttcatctgtttctgcttccgttgctacccctgctgctggagttctgtcggcttcagttgctatccctcaacagtctgttcctgtatttcgccagcctttaggtgttcatataccacatctcccgatgaattatgtcccttacaatcagtacatttcaccattttttattccaccccctacccttcacccttttatgggtaatgctacattttctcagccaccttcaacaggggtcatgtacccaactcctggaaccgcaagagttcttccacctgtcaaattcccagttccttcattcaagcctggtgctaacattgggagccaggcatctattggagttcctggttgctatggaacatatggttctagtccatcggtttacactaataacgcacccgtgtcatctggaaatctagcagaaaatgacaatgttacttcatctcagttcaaggaaaataacatctattttgctgggctccaggtcaattccttctatggtctcccccctccgggacaccaggtaacatatgcgcctcaggctggacatggtccttatggagggatctaccacccagcacattctgtggcaggagctactgttactccactgctccagccatctcacacaatggctggagctgttgaaatagttggggcacctggtggtgtttaccagcatccccaagctcacatgaattggggaagttactgataggccatgattattgtttctttgactttgggtgtccatgacaacacatttggcagaggtgttcaagttttaacaaaggtgaacttgatcaggagtgtatatatgttctcagcatggctgatctgcagggcgggttattgcttccagaagcttccagattgttgtggttgtatttgtagcagataatggccatgaaattggttgagtttatctgctcaggttccttaatacaattttagcctcctgcgcccatcctgaaacttctgcaaggagcgtgatttcgctatcttgtctgattgagggtatggagtacttgaaactgaaattgagcaagtggattttcgttctttccgctgctttacatgtaaattaaattttggttcgatgtgtgacagctgttgtacttggtatcagttgtggacttgcagctaaccagagtcaaagtgctttgaaggacttactgagcacgtttctgttcctgtaggctgtagctcagagcctagtgcttcgttatattgcttattactcattattactatttattgttcctatgaactcgtattgtttggggttaaagggccagacatttgttagtgcccctttggtataagaaaaaatggcatgcaggctacgtgccgactc

SEQ ID NO: 118732 - DNA, 2985 bp, Zea Mays
gctctcgcacgagacacgcacgcccgcgcgcgtgaaggtacgcggaagcaggggcgaggattctccgaagcggagggcgaggcggcggcagcgaccttgagggagatggcggcgggcggtagggtttcaatcccggcaggggcgcggcgcacgatcgcggacatcaaggagatcgccggcggccacaccgacgaggaggtctacgctatgctccgcgagtgcaacatggatcccaacgagaccgttcagaggctcctcctcgaagatacctttcatgaggtgaaaaggaagcgtgacaagaaaaaggaggttagtaaagagccatcagattctcggtggagacctgccgtgcaggggcaaggtggaaagaattgtcggaattgtgcttcacgcagtttgtccagctctaatgattctgctggacgaagtgctatttctggaaaggagaatggaataagtttgatcatgggaaaaggtagtggttctactccgataaccaatatgaatatggatgtcaaagcttccactttcatgccaagtttgttgagtggtctttgcaacggtccatatcaatcagttgatcctgctgctgtgctggtgtctagttctagtgctgttggtgataagtctggttcaacagccttggctgatcttacaggtggtcttccattcaaagatgtagtcgctactatagatccaaattcactgcaaccattgaaaccagcaccaccatcagatcctgtggttgtatcttttctcaactctcacagccttggtgacgttggtgcttccagacaaactattggaatcaagaagacatcagtagaacataaggtggggcgtgatgtatcaacagacaaaggctcctccgaacaatctgtgcaatcttcatttcgacgatcctctgctagtagaccatcttccagctacaacagtcattcagaacaatcccaaaaagctccagtaccgaattcagctggtacagaggattcgttgaaggtggacatatgtttaaatgatctacagttatcagataagcagcatgtgataattccagatcatcttcaagtttctgagtctgaaaagtatgttctaagctttggaagcttcgacgtcagttttcagcaaactaagggctcttcagatcctgattatgtgaagagctctttaccgaaattcagttcgtctcatgagttggatggcaacattgatgaacttcagtccatgcaaagagatcagaattcaacatctgttgtccaagaggaagctggtcatgttcctcaaccttctgcaaagctagaaaaatgtgcaccctcagcaatggagatttcatctattgcccttatggaatcaaaagactgtgatgacgattcagccacttcaggggatccccaatctacaggaactcatagtgcaccatcttatgtgacatatggatttgcaccacaatcacatgttaatcagattgagaagtccgaatctcattctcagtcgtaccatcccacaactgatgctgatgaacggctgtccccttctcttgctactcaagctgctcacaagtatgggaatatcccagttgttcccacacaaactggccaggatcaagaggggaacgactcacctgtgattatttcatctgtttctgcttccgttgctacccctgctgctggagttctgtcggcttcagttgctatccctcaacagtctgttcctgtatttcgccagcctttaggtgttcatataccacatctcccgatgaattatgtcccttacaatcagtacatttcaccattttttattccaccccctacccttcacccttttatgggtaatgctacattttctcagccaccttcaacaggggtcatgtacccaactcctggaaccgcaagagttcttccacctgtcaaattcccagttccttcattcaagcctggtgctaacattgggagccaggcatctattggagttcctggttgctatggaacatatggttctagtccatcggtttacactaataacgcacccgtgtcatctggaaatctagcagaaaatgacaatgttacttcatctcagttcaaggaaaataacatctattttgctgggctccaggtcaattccttctatggtctcccccctccgggacaccaggtaacatatgcgcctcaggctggacatggtccttatggagggatctaccacccagcacattctgtggcaggagctactgttactccactgctccagccatctcacacaatggctggagctgttgaaatagttggggcacctggtggtgtttaccagcatccccaagctcacatgaattggggaagttactgataggccatgattattgtttctttgactttgggtgtccatgacaacacatttggcagaggtgttcaagttttaacaaaggtgaacttgatcaggagtgtatatatgttctcagcatggctgatctgcagggcgggttattgcttccagaagcttccagattgttgtggttgtatttgtagcagataatggccatgaaattggttgagtttatctgctcaggttccttaatacaattttagcctcctgcgcccatcctgaaacttctgcaaggagcgtgatttcgctatcttgtctgattgagggtatggagtacttgaaactgaaattgagcaagtggattttcgttctttccgctgctttacatgtaaattaaattttggttcgatgtgtgacagctgttgtacttggtatcagttgtggacttgcagctaaccagagtcaaagtgctttgaaggacttactgagcacgtttctgttcctgtaggctgtagctcagagcctagtgcttcgttatattgcttattactcattattactatttattgttcctatgaactcgtattgtttggggttaaagggccagacatttgttagtgcccctttggtataagaaaaaatggcatgcaggctacgtgccgactc

SEQ ID NO: 118733 - DNA, 767 bp, Zea Mays
atctccgtcacttgcgtcagctcgccagacctacagctccataacctacagctccatatatgtcactctcccgtatcgtcatcgaggccggtgaaccacgttcttctctgctcgatctcgtcgaaccacgaatcccgaactttagacaaaaataagcgaggtccctgtgcatcgcttatcaagtactcggtcgaagacttcaatcgaagatcgtcgtcattccgtgcgtcatcaaggaatcctaaggatcggatgaagacgaagctagcagcgcgatattccccaagcgctcgacaaattgtctggatcggaaaatcgctaccgatctcgtggattcgtgtcagctgtggaaacggtaagctgataaattatttagaatagttcgatcgatgaataaattaatgtgctagtgcgatgctcattaaggtgctcgataaattgcgtaagtcatgaaactctcgtcgacttcgcagttcttgcgattatcgagccaggttcagctatagcgagttatttcgctattccggccaattagcggaattagtgtaccgaatagaatattaatagacctgtgtgatgaggaaatagtttaatcacttatacatatgtgtgtatatatttacgataaagaaatatttaagtaattgttgatatgaaaatcatgtgaggagtaaaataaaatttaaaatagttctttatgagcgatgtagaataattcataaaacgagggataagtttagaattcaattaattaactgataagttgt

SEQ ID NO: 118734 - DNA, 369 bp, Zea Mays
ctcttctatcccccactcgcgctagcaccgctctcgctggatcgccatcctagtagccagagcacagagagatcgagcagtgtatctgaggacgtttccgccgtcggtgaacaaggagcacagtcacgccgacgccttccttgggcaaccgtacctgctccttggactccgggatcttgcccacgttgccgctcgggattcaattggggacctggggggtttcgtcctggtgtggagtcgacgcaccttgctgcgccgggtgagaatttgggctgggggcgtgccaattgctcgccggacctctgctctgccgctgacccgtccctcgttgtggccagtgcccaccactactcgaacaaaggtaataat

SEQ ID NO: 118735 - DNA, 104 bp, Zea Mays
aaggaatattttgcttttatggaagtattagatgtattaatgaatgtcaaaaagggtttttgatcattgtatcacatgctggagcattagtcttcttgttgttg

SEQ ID NO: 118736 - DNA, 426 bp, Zea Mays
atggtcgcgggcgggctggccgctgcgagctgccacgccggccgcgccggttgtcgagccgccgtgctgtgccgagcgcccgcacgccgagccagggtcgcgcgcccgcgccggggccgctggttgcccctgctgctggttgccaaggagagcagtgaacggatgcttggggttgaagaagtcgtggacgtgcgtgaagaggaacaacctggcggctgggaaacaggagtagtggaggctagggaagggagtgggcagttgagggaaataggcctgataagtgggtcccgcaccctgctgacgggtgggcccacgaactggatggacgctacccatgctcccgtgcacgcgacgaggctggaaggccgagcgggccacggacatgccgagcagctgggccttttctttcttttttgtttattttga

SEQ ID NO: 118737 - DNA, 2037 bp, Zea Mays
acccgttgtcgccttccctcgcctcccgcacgccagtccctgctgccctgccctcttccgccgcgtcgtcccctcctacgttcccctctccctcggtccgcctagatctcgccagggtttgccgcgtctcgtcttgatttttgctccggaaccagggctccatcggggcagagaggcaggaggggtaggccatcccggaaagtggcggatctgggtgttatcggaggaagagcatcgtgtagcgtttctgtcggtggcaggcatcgacgaggtgtgatttagaaggcatttgtgagtacggcatggactgcgtcggagctgtggacagcagcggaaccgatgatgatcttccacaatcatatcagaacagcagaggcatgaaaggcagtggacgcatcactggtaatggaagagatagtgttggtgcttctctgtatactagagttcaacctcagacagacatggaaacacaaatacatgagcttgagcaagaagcatattgttcagttcttagagcattcaaggctcaatctgatgctataacatgggtacactcttgtctcttcatgtaattaatttatttactctggttggcctagatttcatggagtcttgtaagggtttgaattcattgtctcaggaaaaagaaagtctcattactgagcttaggaaggagctacaagtatctgacaaggaacacagggagttgctaaacaaagttaatggcgatgatattattcgaagaataaggaaatggagagagtcaactggtgggcttatgattaatttggtgaataattctcagcgtacacatgaccctattcccagccctacgacatctgctcgcaagaggcaaaagatgtctcaacccattctctctgcatgtgtacctgcaccatctgctatgcattcacagcctttaactgcaccgatgcaaccatcatcttcaggagcaaaaaagggagctcaacccggcacaaaagtgaagaagaccaaaccaggccagaagatacctggtggctctgcagtcaaatctatgccatcttctgctggtcctggtgggcgaggaactattatcaataggaatatgtctgctggccttccacctgaaagttcacaattaaatccattaattggtcgtaaagtcatgactcggtggcctgacgataatagcttttatgaagctgaaataactgactatgatgcatcaaaggatatctatacactggtttatgacataaatacagcagacgagacatgggaatgggttgacttcaaggagatggcacctgaggatataagatgggatggcgaggagcctgatttaaaccttataggtcgtggtgctcccgtccatggtatgaagtcaagcagtcgtggtggccccatgtcaggtaccggaagagacagaggtccccaaaagaactcattcaagaaagattatccatcacaaaacggtattgggaagaagagtgttgactacatagaaattctccatacagagacactcataaaggaggtggagcgggttttcagttcagccaaccctgacccccttgagatggagagggctaagaaagcgctaaaggagcacgaacaatcattaattgatgcgattgcaaggcttgctgaggcgtctgatgatgatcgtgtgcgatctttggagtataaccgtggatggaggaaccaacatggaggaagatatgcggatgatatgaccatggacggccacatggctggagatgcagatgccatgtaaacctgccaatgtgtacacaaaattccttcattagcttattttttgcctgttgtaaaatcttgacgctaatttttctctctctagatttagccgtaggtacttctgattggtcctaaccaaagaaacagttaggatcaccactctgattgttcagcttttgtagtagaattacgcccagctcatcctttacactgtaaatttagatttggagctgattttgtcggtcgctagacatttgataagcatctgccgtggcctgtttggtttcctagtgcaaa

SEQ ID NO: 118738 - DNA, 2011 bp, Zea Mays
acccgttgtcgccttccctcgcctcccgcacgccagtccctgctgccctgccctcttccgccgcgtcgtcccctcctacgttcccctctccctcggtccgcctagatctcgccagggtttgccgcgtctcgtcttgatttttgctccggaaccagggctccatcggggcagagaggcaggaggggtaggccatcccggaaagtggcggatctgggtgttatcggaggaagagcatcgtgtagcgtttctgtcggtggcaggcatcgacgaggtgtgatttagaaggcatttgtgagtacggcatggactgcgtcggagctgtggacagcagcggtctcttggtgctctctggtcgcggtcgttctcacatggactacggtgccactgtgtatgagtgaggaaccgatgatgatcttccacaatcatatcagaacagcagaggcatgaaaggcagtggacgcatcactggtaatggaagagatagtgttggtgcttctctgtatactagagttcaacctcagacagacatggaaacacaaatacatgagcttgagcaagaagcatattgttcagttcttagagcattcaaggctcaatctgatgctataacatgggaaaaagaaagtctcattactgagcttaggaaggagctacaagtatctgacaaggaacacagggagttgctaaacaaagttaatggcgatgatattattcgaagaataaggaaatggagagagtcaactggtgggcttatgattaatttggtgaataattctcagcgtacacatgaccctattcccagccctacgacatctgctcgcaagaggcaaaagatgtctcaacccattctctctgcatgtgtacctgcaccatctgctatgcattcacagcctttaactgcaccgatgcaaccatcatcttcaggagcaaaaaagggagctcaacccggcacaaaagtgaagaagaccaaaccaggccagaagatacctggtggctctgcagtcaaatctatgccatcttctgctggtcctggtgggcgaggaactattatcaataggaatatgtctgctggccttccacctgaaagttcacaattaaatccattaattggtcgtaaagtcatgactcggtggcctgacgataatagcttttatgaagctgaaataactgactatgatgcatcaaaggatatctatacactggtttatgacataaatacagcagacgagacatgggaatgggttgacttcaaggagatggcacctgaggatataagatgggatggcgaggagcctgatttaaaccttataggtcgtggtgctcccgtccatggtatgaagtcaagcagtcgtggtggccccatgtcaggtaccggaagagacagaggtccccaaaagaactcattcaagaaagattatccatcacaaaacggtattgggaagaagagtgttgactacatagaaattctccatacagagacactcataaaggaggtggagcgggttttcagttcagccaaccctgacccccttgagatggagagggctaagaaagcgctaaaggagcacgaacaatcattaattgatgcgattgcaaggcttgctgaggcgtctgatgatgatcgtgtgcgatctttggagtataaccgtggatggaggaaccaacatggaggaagatatgcggatgatatgaccatggacggccacatggctggagatgcagatgccatgtaaacctgccaatgtgtacacaaaattccttcattagcttattttttgcctgttgtaaaatcttgacgctaatttttctctctctagatttagccgtaggtacttctgattggtcctaaccaaagaaacagttaggatcaccactctgattgttcagcttttgtagtagaattacgcccagctcatcctttacactgtaaatttagatttggagctgattttgtcggtcgctagacatttgataagcatctgccgtggcctgtttggtttcctagtgcaaa

SEQ ID NO: 118739 - DNA, 1967 bp, Zea Mays
acccgttgtcgccttccctcgcctcccgcacgccagtccctgctgccctgccctcttccgccgcgtcgtcccctcctacgttcccctctccctcggtccgcctagatctcgccagggtttgccgcgtctcgtcttgatttttgctccggaaccagggctccatcggggcagagaggcaggaggggtaggccatcccggaaagtggcggatctgggtgttatcggaggaagagcatcgtgtagcgtttctgtcggtggcaggcatcgacgaggtgtgatttagaaggcatttgtgagtacggcatggactgcgtcggagctgtggacagcagcggttctgccagtgacagactggccattggtacctacccactggtttgaaccagtcagcagaggcatgaaaggcagtggacgcatcactggtaatggaagagatagtgttggtgcttctctgtatactagagttcaacctcagacagacatggaaacacaaatacatgagcttgagcaagaagcatattgttcagttcttagagcattcaaggctcaatctgatgctataacatgggaaaaagaaagtctcattactgagcttaggaaggagctacaagtatctgacaaggaacacagggagttgctaaacaaagttaatggcgatgatattattcgaagaataaggaaatggagagagtcaactggtgggcttatgattaatttggtgaataattctcagcgtacacatgaccctattcccagccctacgacatctgctcgcaagaggcaaaagatgtctcaacccattctctctgcatgtgtacctgcaccatctgctatgcattcacagcctttaactgcaccgatgcaaccatcatcttcaggagcaaaaaagggagctcaacccggcacaaaagtgaagaagaccaaaccaggccagaagatacctggtggctctgcagtcaaatctatgccatcttctgctggtcctggtgggcgaggaactattatcaataggaatatgtctgctggccttccacctgaaagttcacaattaaatccattaattggtcgtaaagtcatgactcggtggcctgacgataatagcttttatgaagctgaaataactgactatgatgcatcaaaggatatctatacactggtttatgacataaatacagcagacgagacatgggaatgggttgacttcaaggagatggcacctgaggatataagatgggatggcgaggagcctgatttaaaccttataggtcgtggtgctcccgtccatggtatgaagtcaagcagtcgtggtggccccatgtcaggtaccggaagagacagaggtccccaaaagaactcattcaagaaagattatccatcacaaaacggtattgggaagaagagtgttgactacatagaaattctccatacagagacactcataaaggaggtggagcgggttttcagttcagccaaccctgacccccttgagatggagagggctaagaaagcgctaaaggagcacgaacaatcattaattgatgcgattgcaaggcttgctgaggcgtctgatgcagatgatcgtgtgcgatctttggagtataaccgtggatggaggaaccaacatggaggaagatatgcggatgatatgaccatggacggccacatggctggagatgcagatgccatgtaaacctgccaatgtgtacacaaaattccttcattagcttattttttgcctgttgtaaaatcttgacgctaatttttctctctctagatttagccgtaggtacttctgattggtcctaaccaaagaaacagttaggatcaccactctgattgttcagcttttgtagtagaattacgcccagctcatcctttacactgtaaatttagatttggagctgattttgtcggtcgctagacatttgataagcatctgccgtggcctgtttggtttcctagtgcaaa

SEQ ID NO: 118740 - DNA, 1945 bp, Zea Mays
acccgttgtcgccttccctcgcctcccgcacgccagtccctgctgccctgccctcttccgccgcgtcgtcccctcctacgttcccctctccctcggtccgcctagatctcgccagggtttgccgcgtctcgtcttgatttttgctccggaaccagggctccatcggggcagagaggcaggaggggtaggccatcccggaaagtggcggatctgggtgttatcggaggaagagcatcgtgtagcgtttctgtcggtggcaggcatcgacgaggtgtgatttagaaggcatttgtgagtacggcatggactgcgtcggagctgtggacagcagcggaaccgatgatgatcttccacaatcatatcagaacagcagaggcatgaaaggcagtggacgcatcactggtaatggaagagatagtgttggtgcttctctgtatactagagttcaacctcagacagacatggaaacacaaatacatgagcttgagcaagaagcatattgttcagttcttagagcattcaaggctcaatctgatgctataacatgggaaaaagaaagtctcattactgagcttaggaaggagctacaagtatctgacaaggaacacagggagttgctaaacaaagttaatggcgatgatattattcgaagaataaggaaatggagagagtcaactggtgggcttatgattaatttggtgaataattctcagcgtacacatgaccctattcccagccctacgacatctgctcgcaagaggcaaaagatgtctcaacccattctctctgcatgtgtacctgcaccatctgctatgcattcacagcctttaactgcaccgatgcaaccatcatcttcaggagcaaaaaagggagctcaacccggcacaaaagtgaagaagaccaaaccaggccagaagatacctggtggctctgcagtcaaatctatgccatcttctgctggtcctggtgggcgaggaactattatcaataggaatatgtctgctggccttccacctgaaagttcacaattaaatccattaattggtcgtaaagtcatgactcggtggcctgacgataatagcttttatgaagctgaaataactgactatgatgcatcaaaggatatctatacactggtttatgacataaatacagcagacgagacatgggaatgggttgacttcaaggagatggcacctgaggatataagatgggatggcgaggagcctgatttaaaccttataggtcgtggtgctcccgtccatggtatgaagtcaagcagtcgtggtggccccatgtcaggtaccggaagagacagaggtccccaaaagaactcattcaagaaagattatccatcacaaaacggtattgggaagaagagtgttgactacatagaaattctccatacagagacactcataaaggaggtggagcgggttttcagttcagccaaccctgacccccttgagatggagagggctaagaaagcgctaaaggagcacgaacaatcattaattgatgcgattgcaaggcttgctgaggcgtctgatgatgatcgtgtgcgatctttggagtataaccgtggatggaggaaccaacatggaggaagatatgcggatgatatgaccatggacggccacatggctggagatgcagatgccatgtaaacctgccaatgtgtacacaaaattccttcattagcttattttttgcctgttgtaaaatcttgacgctaatttttctctctctagatttagccgtaggtacttctgattggtcctaaccaaagaaacagttaggatcaccactctgattgttcagcttttgtagtagaattacgcccagctcatcctttacactgtaaatttagatttggagctgattttgtcggtcgctagacatttgataagcatctgccgtggcctgtttggtttcctagtgcaaa

SEQ ID NO: 118741 - DNA, 557 bp, Zea Mays
ccgggagttccgcgacgcacgcgcgcccgtctcctcatcgttcgagcctcttctccgccgccgcgggcctctagagccagaccatcgcgcggtcgtccttcttaacaaggcagacctagcggacccgtccgaaaccgagttaactaggtccctcctcctcagccctgcgttgtctgtgcgctgcgcactgggtggggagagttgatggctgcttctggatctcggtgcccgagggtgctcgtgctgctgcaggggtgggtggcgtacatcaagaagcagaggagctgcccttgcgtcgcggtaaactcgcacagcagggaaagcatcaaggaggtgctgaaagtcgtgcaagcaagaataagggagatcaagcatggcgacaacaattgcacgggaactgccctcctagtcggaatcccaaacgttgggaaatcggccattgttaatgcgatgcatcaaattgggaggattgcggcagcagagaaggggaagctcaagcatgcgattgtgagcagccatcctggagaaaccagagacatacatggatacttgttttc

SEQ ID NO: 118742 - DNA, 407 bp, Zea Mays
gatccaatagatgccaggaatcaagattactatgaaagtggtgcagtaacttcaccagcagaagaaaatcttgaggccgtgctaggaactaacatggagaatgttgatgcaccttctatttcacaagctaatgagctcagtcaggacgtacttgatccttctatacttaaatatgatgagccgtcagtttcaagtcatgcttattcgaacatgaacactccacaacctagcacaatagaggacccacaaggaaacaaccaagcacatactctttcccatttgtctaacatgatggtatgctgtcttttctttctgtatttttttctacacatccttggtaactgatcttttgttgccatcgacatttgtgtctagctggtgtaattcctctttaatcattgttcact

SEQ ID NO: 118743 - DNA, 1776 bp, Zea Mays
atatttcttactttagttgtcattttagataaaatcaaatcattttaaatatttaggtactattaagtcatccacgtacagaaaacattaattatgttatttgagcccattttaacactgttgagtcattcatgctcgatttgtttcccttttgtcgaacttcgagattgttccgattcaccgtcgaaccatccagaagcagccgcctcctgcttctggtcctggactcgtctccggtccggtccggtccggtcatccattccccaatccccagtccccaccctcacaacaagtccacaactcacagcacgaaaccacgcgcagatccaaacgaatgcgagcccgtccaaacacttgaggcctcgagcccgcctctccctcctcttcctctcaacaccaccggcatacccatggcgaagtacggcgagggcgacaagcggtggatcgtggaggagcgcgccgatggcaccaacgtccacaactggcactgggcggagcgcgactgcatcgagtggtcccgcgcgcggctctcctcgctgctcgcgggcctcaccgtcctcgacggcgaggacggcctcacgctccgcaccgtcgcgctcgacaatctcgacggcgaggcctacgtcaacatccgcaagggcaaggtcatcccagggtacgagctctcgctcaccctctcttgggaggccgaggccgcttcggagtccggagctgtgaaggtcgccggcaccgccgaggtcccctaccttgccgacgagaacgctgacgaggaccccgacctccacatcaccgtgcgcggtgacgagacgcccctcgcgctccgcgccaaagatgccttcctctcccgcggcaaacccatggtgctcgaaaagatccgggagttcgttgctgccatggccaagggtggaccggcgaaggacgagctggattccaagaaaactcctgcgaaggtcgccgctgcagcgcctggcgccgctccggcgaagaaagaggaggtggtggctcctgcgccggctgcggggaagaaaaaggccaaggggaaggacaaggaggggttcaagaccattaagatgacggagacgttctactgccgctcaaaggacatatatgagatcttgatggatgagaacagatggaaagggtttacacagagcaatgcgaagatcagtagagaggttggaggggaatttagcctctttgatgggtgcatcactggcgtcaacgaggatctgcaggaaggaaaactgattgcgcagaaatggcggtttggaagctggcctgacggcttgtactcctcggtccggttgatgttggatgagcccgagtctggagttacagtcataaaactcaaacaaactggtgtgccagaggaagacaagtatgggaattcaactgtggttgagaacacggagagaggctggagagatctcatattccagcggatacgtgggatgtttggttttgggatctaaagagtctatagagaggcgatttaatttggcatgatgtcctaattcaaatttttacggggtcaggccatgaatgctatagcaatccatgtttctcacccagttttttttcttcatgtcggcaaaacgcaaaactctgcatatgatggggatttgaaaacatctgttattcatcaggctaaaacgctgcagtattccttgcccccagaccccagttttggtgttggcacaaactgaaggcaacgttgatctttgctgatgcagaaggggttggtacccttgttgcgtgattgaaaatgggacgttg

SEQ ID NO: 118744 - DNA, 1281 bp, Zea Mays
cagaaggaacaaatgttagccaaccaatcttttcaagaatcctcaccggcacataccgccggcgtctcgtggccgtctcagcctgctgctgctgctccccatcccctcctcccccgttagccccgttcaccggggtccacttaaacaggagaagattattcccgcgggatcctccgccagatcccatccccgtggaggacgtcgtgccaccgttggcgctggtgttggcgttggcggcggcggcggcggcggcggcgaccactggtacccactccttgcgccacttcctgacatggcccgtgaacgtcgtcgccggcccgtagcgcgccgaagtgcgccctagccgcgcgcccacaccctccatgaaaaggaatttacgtgattacggctgtagcgttaatctccggcgagccaagggcgagggtgcgggcgcggttagggccggggtttctggtacacgaattctaagcgagatctacacggaagagaagagaggcgtcatgtgtttgcctcgttgccgttcgctgacagctgggaccgaggtgcagccactgctgggccgtctggcgcgggaccattactagcctatgcaatcggtttttcggttcggttttttcggtatcgtagaagttcggtttacagatagagcagactgatctccgtgtctcacaaaagaaaaccgagctattcggttcggtgttcggtttaaactaaacatccgaaatccatcttagttagctttgtttggctgctcctgtgctatgactgtattcaaaattgaataaacagcagcaaatagccactaaccagcagcacacatgcactgataaccagcagcacaacactcaacaatgaatataagtccacaataactagtagcaagtcacaaattcaataacaaacattacaacaaatttaaatggtccagagtccagacttcaactcttcaagtcatacattacataacttcccattaatgatagtttgagattacagatcacatatttgagcttaaactttgatagcctcatattctccattcaccattcatcattcatcaaattttcatgctcaagaattggtaggggtggttgttgcctccttagaaacagtgaggtcacaaaactttgcagtaatagtaaggagtaaacaaattagtaaaatctgaaatcaataagaacatagtagaaacaattatgaaataaaaactacaaactaatttaccttcctcaagcttggacagttcttctaggttctcttcaacactaatgaaatcatatc

SEQ ID NO: 118745 - DNA, 588 bp, Zea Mays
atggatttgggcgcgtatggtcgcttgaggtgtaaagacagggctgagaccttcgcctggtgccggtggcatgttcattgtgtcaccgagaggaatagctggagggatggcggggaatttctcgccgttgtaccagctccatcgcggatgcacgcaccatcgcgggtaggccatctgcagggttgccgggacctggattgtgggtctggtgattcacctggactcaaggagcatgtctatggaccagcaaacccgaaggaacaggcggtgatcgagcaattgctcgtcgtcgttcgaaccgtcgagggacccgcctcatcgcgtggacggaccttttgtccctctaatccaaggtaagaatgcctcattggacctcgttatgtacggtggcccttgattcagcgatgtgtggcccagattaggtcataggcgtaccctttcgtctagtcgaatcgtgtccgttcatctttgatgtacgcaccagattagctcgcctcactttaaaatttgaaccttcggatcgtgatcggtcgaccacatgtaacaccctgattttggggtataaaatttctttctaattgtcaccca

SEQ ID NO: 118746 - DNA, 863 bp, Zea Mays
gacaaccttctcatccccaaccccgtcagcccgtgcggccgtgccctctgcctcctctgccactcctcgcccaaagcgccagaggcgcagcccgagcccacaggttgcctcctctccctctcctcgtggcctcgtccttctcgttcaagacgaaaccgtacgcgagcgagctggtgagggaggaagagcagggaggtgggatcaggccggctccatggacgccacgctcctcctcctccccgccaactgcacggccgccgccagcgggcggatgcggcctcgactgcctgcaggcccacatgtggcttcccctggtccctccgcgcggccaaggacctccatccgggcctcagccgtgtccgcagccctcgccgttcgtggcctcccgcaacacgcttccgtggccgggggaaccggatatagcatgtctatcacattgaaataagacaacttgcaagtagagggacatcacaacggaagaagagcgcgatgatgagtggaaggtcattttagaacttatggaaggatgggaaggacacggagcgggtgatccacgtttgcacgtgattgtagtgctcattgacaccacatagaaggttgaagacgactagacgagcgtacgattagatacaggctctctactgcttgcttatgactgagctgaccctcatgatgatgctgtgatatttgttgtagaatggagaagtactgattgcttttatgttgttctagaatggagtaaataatgatgatgttgaaaaatatttaactagaaagtaagggttcagtttccttttatgtttcaaagttcttgttctatcgttcactacaaaagaaaacgacttcaatgtttggtggttatt

SEQ ID NO: 118747 - DNA, 1369 bp, Zea Mays
gacaaccttctcatccccaaccccgtcagcccgtgcggccgtgccctctgcctcctctgccactcctcgcccaaagcgccagaggcgcagcccgagcccacaggttgcctcctctccctctcctcgtggcctcgtccttctcgttcaagacgaaaccgtacgcgagcgagctggtgagggaggaagagcagggaggtgggatcaggccggctccatggacgccacgctcctcctcctccccgccaactgcacggccgccgccagcgggcggatgcggcctcgactgcctgcaggcccacatgtggcttcccctggtccctccgcgcggccaaggacctccatccgggcctcagccgtgtccgcagccctcgccgttcgtggcctcccgcaacacgcttccgtggccgggcaaagcactggaagttatagggttggtgatgttatgaccaaaagggaagagctccatgttgtgaaaccaacaacttcagttgatgacggtgccttgtttctcatatgctgcacttgtctgccttactttcgatcagtagaacgtgatcattcaattttacttttttttgcagcccttgagatgctggtgaagcataggatctctggctttcctgttattgatgatgactggaatttggttggcgttgtgtcagattatgatttattggcactggatacaatatcaggagctggaccggctgaagcagacatatttcctgaggtggatagcacttggaagacatttcatgagatacagaagcttttgagcaaaaccaacgggaaggttattgctgatgttatgaccccagcgcctctcgtggtgcgtgaaacaactaaccttgaagatgctgcaaggttactccttgtgactaagtaccgcaggcttccagtggtcgatagctcaggcaaactggttgggatcattacaagagggaacgtcgtccaagccgccctcgaaatcaagaaaaaggttgaagggacactctgagatgactacctccaggtatcctttttgctgccacatggggggcttaggacttggacacatctctagttggcaactgatcaatcaaagcgactgtcagagtgagcgatgaaagtcgctatgtttatgaagatttgcccggagaagcacaggtgtatgtgtagtgtttgttatatatgctgatgcagtccttgctggccaaaacacaggttaccgattgttctggtttcctgggcttctttggacaccaaattcttaacctaggtcttgtttgggtgcacacgtatctagttcaacttacttgtattgaggttcattgaagtggaaaatcaactagttttcgcacttcaaaacacatgcactgtagtaaccgag

SEQ ID NO: 118748 - DNA, 1285 bp, Zea Mays
gacaaccttctcatccccaaccccgtcagcccgtgcggccgtgccctctgcctcctctgccactcctcgcccaaagcgccagaggcgcagcccgagcccacaggttgcctcctctccctctcctcgtggcctcgtccttctcgttcaagacgaaaccgtacgcgagcgagctggtgagggaggaagagcagggaggtgggatcaggccggctccatggacgccacgctcctcctcctccccgccaactgcacggccgccgccagcgggcggatgcggcctcgactgcctgcaggcccacatgtggcttcccctggtccctccgcgcggccaaggacctccatccgggcctcagccgtgtccgcagccctcgccgttcgtggcctcccgcaacacgcttccgtggccgggcaaagcactggaagttatagggttggtgatgttatgaccaaaagggaagagctccatgttgtgaaaccaacaacttcagttgatgacgcccttgagatgctggtgaagcataggatctctggctttcctgttattgatgatgactggaatttggttggcgttgtgtcagattatgatttattggcactggatacaatatcaggagctggaccggctgaagcagacatatttcctgaggtggatagcacttggaagacatttcatgagatacagaagcttttgagcaaaaccaacgggaaggttattgctgatgttatgaccccagcgcctctcgtggtgcgtgaaacaactaaccttgaagatgctgcaaggttactccttgtgactaagtaccgcaggcttccagtggtcgatagctcaggcaaactggttgggatcattacaagagggaacgtcgtccaagccgccctcgaaatcaagaaaaaggttgaagggacactctgagatgactacctccaggtatcctttttgctgccacatggggggcttaggacttggacacatctctagttggcaactgatcaatcaaagcgactgtcagagtgagcgatgaaagtcgctatgtttatgaagatttgcccggagaagcacaggtgtatgtgtagtgtttgttatatatgctgatgcagtccttgctggccaaaacacaggttaccgattgttctggtttcctgggcttctttggacaccaaattcttaacctaggtcttgtttgggtgcacacgtatctagttcaacttacttgtattgaggttcattgaagtggaaaatcaactagttttcgcacttcaaaacacatgcactgtagtaaccgag

SEQ ID NO: 118749 - DNA, 1344 bp, Zea Mays
gacaaccttctcatccccaaccccgtcagcccgtgcggccgtgccctctgcctcctctgccactcctcgcccaaagcgccagaggcgcagcccgagcccacaggttgcctcctctccctctcctcgtggcctcgtccttctcgttcaagacgaaaccgtacgcgagcgagctggtgagggaggaagagcagggaggtgggatcaggccggctccatggacgccacgctcctcctcctccccgccaactgcacggccgccgccagcgggcggatgcggcctcgactgcctgcaggcccacatgtggcttcccctggtccctccgcgcggccaaggacctccatccgggcctcagccgtgtccgcagccctcgccgttcgtggcctcccgcaacacgcttccgtggccgggatggaaatattttaaattgtactaaatgtctgttgcaatctgaatttctggttgttcagcaaagcactggaagttatagggttggtgatgttatgaccaaaagggaagagctccatgttgtgaaaccaacaacttcagttgatgacgcccttgagatgctggtgaagcataggatctctggctttcctgttattgatgatgactggaatttggttggcgttgtgtcagattatgatttattggcactggatacaatatcaggagctggaccggctgaagcagacatatttcctgaggtggatagcacttggaagacatttcatgagatacagaagcttttgagcaaaaccaacgggaaggttattgctgatgttatgaccccagcgcctctcgtggtgcgtgaaacaactaaccttgaagatgctgcaaggttactccttgtgactaagtaccgcaggcttccagtggtcgatagctcaggcaaactggttgggatcattacaagagggaacgtcgtccaagccgccctcgaaatcaagaaaaaggttgaagggacactctgagatgactacctccaggtatcctttttgctgccacatggggggcttaggacttggacacatctctagttggcaactgatcaatcaaagcgactgtcagagtgagcgatgaaagtcgctatgtttatgaagatttgcccggagaagcacaggtgtatgtgtagtgtttgttatatatgctgatgcagtccttgctggccaaaacacaggttaccgattgttctggtttcctgggcttctttggacaccaaattcttaacctaggtcttgtttgggtgcacacgtatctagttcaacttacttgtattgaggttcattgaagtggaaaatcaactagttttcgcacttcaaaacacatgcactgtagtaaccgag

SEQ ID NO: 118750 - DNA, 755 bp, Zea Mays
ttcttgcatgaccataaatccaacgcaacatacatatttctgtaacacttatctattgaatatatcatctttttataagccaacatcatgcaccatacaacataaacagatctcatcaccatcctataaaatttgtcttttagcttctatggtaccttttttcacatagaatgccagatgtttgacgtcatttcattcacctgttttgattttattgctaacgtctttatcaatatctccttgtttctctatagcactaaacttgaataccgaaaagtatcatttctcatgtgtagtcatgaagtcacatctcatattttgaatttagttctactaagtctaaaacctttggactctagagtttctcaccacaacactagttttctatttactcctgcacgatttttattaactaacactacatcatcgtccgcaaaaacatataccaagcccttgtatgtctcttgtaatctcatccatcactaaggcaaacagataagagtttaaaactgacccttgaagtagtgctattctaattagaaagtcatttgtgtccgcattacgtgaacactagtcacaatattatggtttatattcttaatgagtccaactccaacatattttcttagagctttatatttgtctaaagtcaaccatataatatttcttggtattttaccataaaccttctcctagttattagtcgaaaaataagcaggtatttttggatcccggctaatagtgtataaatctct

SEQ ID NO: 118751 - DNA, 2162 bp, Zea Mays
cttccattctctcattatttctgaagtgcgtcgtcggtcaaccagcatggaagggctgctcacgcttgatgactggaaagaacggagatcagatgtggacaactcagaggacgagcgaaggcggctatccatagggtcactgaagaaaaaggcattgaatgcatcaaacaagctcacacattcactcaagaagaggggaaaaagaaaggtggagcatcgggcatcgtccttcacaatcgaagatgttagggatgagcaagaggagcgagccgtcttcaccttccagcaaaaacttctggacatgaacttgctgcctgacaaacacaacgattatcactcgttgctgaggtttttgaaggctagaaaatttgacacagagaaagcgatccatatgtgggctgagatgctccagtggaggaaagaatctggagcagatacaatactagaggacttcagttttgaagagctagatgatgtgctatgctattatcctcagggctaccatggagttgacaggcagggaagaccagtatacattgagagattagggaaagtggaaccaaataaattgatgcacattactacagttgatcgctacatgaagtatcacgtgcaagagtttgagagagccttcagggacaggtttcctgcatgctctgttgcagcaaaaaggcatattgattctacaactactatactagatgtcgatggcgtgggtctcaagaacttcagcaaaacagcaagagatatgttaagtagaatgcagaagattgacagtgactattatccagagacgctgcatcagatgtttgttgtgaatgctggtagtggtttcaagctactatggagttctgtgaaaggctttcttgaccctaaaactgcctcgaagatacatgttttgggaacaaagtttcagaacaagcttcttgaagtaatagatgcaagtcaacttcctgaatttttgggggggacatgcacttgtgctgctgtgggaggatgtatgaggtctaacaaaggtccatggaatgatccagatattatgaagcttgcacataataaggaagcaaagtttacaagacataccagacgtttatccgagattgagcaagggcggagttcatttgctaggttacatcttttgaagggtagaaacagtgacacgtcaactgtggagtcaggatctgaaattgatgatcttggtgctccgatcatgagaagcacagtggggtgtagtcgattggccccagttcgcgaagagatgcagatgagagcacgagactctgcagcttattacagctgtgacgatcactttgttgtggtggacaaaacagttgactatggtcgaggaggatcaccgtcagataaaagcagtgcttcagaagtaagaactcatgttcggccactggatgctagcacagcagcccacgtggcaggtccctcaagtaacaggcgagctacagttgtgcctgaagaggtttcagatgaaggagtgttccgtcgctttgtcagactacttctggccttcattgtcaaagtctttgccttctttcacatagtacgtagtcagcaggaaacgagggtcaacaacctactacctcctgccgaaccagaactgatttctgacgatcatccggcagtagagactttcaatgtagaccacatcagtcctgtcatagagcgccttcagagacttgaagggaaggtcgatgagcttggcagcaagcctccagcgattcctgtggagaaagaacgatccctcttggagtcatgggataggataaaatgcatcgaatctgacctggagcgaacaaagaaggtaagtttccatcaagtatgtcagtttatctccatttgtacctggtgattccattagtactaagaatccatacaaaaattagagaatatttacaaattaaaattcctaattaaatgtaaaacggtgctatagcatcaattttactagattgttagacatggcagaagcggaaataaaggcatttgaaatgttgaaacgcaagtgttgaaacatttctgtacacaacgcaactaaaaccatcttgttttaaataaaagataaaatgaagtggcgggaatatatcattctcatgcatccgtgagaacagatgattgaagactgttcagagaaatcgctatctaaactt

SEQ ID NO: 118752 - DNA, 2461 bp, Zea Mays
cttccattctctcattatttctgaagtgcgtcgtcggtcaaccagcatggaagggctgctcacgcttgatgactggaaagaacggagatcagatgtggacaactcagaggacgagcgaaggcggctatccatagggtcactgaagaaaaaggcattgaatgcatcaaacaagctcacacattcactcaagaagaggggaaaaagaaaggtggagcatcgggcatcgtccttcacaatcgaagatgttagggatgagcaagaggagcgagccgtcttcaccttccagcaaaaacttctggacatgaacttgctgcctgacaaacacaacgattatcactcgttgctgaggtttttgaaggctagaaaatttgacacagagaaagcgatccatatgtgggctgagatgctccagtggaggaaagaatctggagcagatacaatactagaggacttcagttttgaagagctagatgatgtgctatgctattatcctcagggctaccatggagttgacaggcagggaagaccagtatacattgagagattagggaaagtggaaccaaataaattgatgcacattactacagttgatcgctacatgaagtatcacgtgcaagagtttgagagagccttcagggacaggtttcctgcatgctctgttgcagcaaaaaggcatattgattctacaactactatactagatgtcgatggcgtgggtctcaagaacttcagcaaaacagcaagagatatgttaagtagaatgcagaagattgacagtgactattatccagagacgctgcatcagatgtttgttgtgaatgctggtagtggtttcaagctactatggagttctgtgaaaggctttcttgaccctaaaactgcctcgaagatacatgttttgggaacaaagtttcagaacaagcttcttgaagtaatagatgcaagtcaacttcctgaatttttgggggggacatgcacttgtgctgctgtgggaggatgtatgaggtctaacaaaggtccatggaatgatccagatattatgaagcttgcacataataaggaagcaaagtttacaagacataccagacgtttatccgagattgagcaagggcggagttcatttgctaggttacatcttttgaagggtagaaacagtgacacgtcaactgtggagtcaggatctgaaattgatgatcttggtgctccgatcatgagaagcacagtggggtgtagtcgattggccccagttcgcgaagagatgcagatgagagcacgagactctgcagcttattacagctgtgacgatcactttgttgtggtggacaaaacagttgactatggtcgaggaggatcaccgtcagataaaagcagtgcttcagaagtaagaactcatgttcggccactggatgctagcacagcagcccacgtggcaggtccctcaagtaacaggcgagctacagttgtgcctgaagaggtttcagatgaaggagtgttccgtcgctttgtcagactacttctggccttcattgtcaaagtctttgccttctttcacatagtacgtagtcagcaggaaacgagggtcaacaacctactacctcctgccgaaccagaactgatttctgacgatcatccggcagtagagactttcaatgtagaccacatcagtcctgtcatagagcgccttcagagacttgaagggaaggtcgatgagcttggcagcaagcctccagcgattcctgtggagaaagaacgatccctcttggagtcatgggataggataaaatgcatcgaatctgacctggagcgaacaaagaaggtgctgcaagccactgtgaggaagcaactggaaagcgctgagtccctagaggaagtgattagatcaagcctacctagacgaagattttgtttataacaaggaaccagtactgctgaaatcaagatacatcctgtcgcggagaaaaatatgcacaggaattcgattggtgatgtgatgaaggccgtgcattcagttgtccacattactggcagaaaagatggtgaccacggatagtgaaaaacacggtccacttatttatttttttcttgtgaccctaagaggcctgtgcatttttcatgttaacagaggatgttaggatggatggcattgcaagggctagaaaaataggagatagaaatgtggaaagtggggtggtacccgaacaactgaacaagtgcgcatattgtgatatacaggtccgcgtctatgttatctttgcaaagaattgtgcgatattactaatgttagggaaggggataaaatagacacaaatatttacgtgaaataatctcctccaatattaagaagcaaacaaccacgaggaaacagatttactatttatcgtcgagtacaagttacagggaggtcctatatttataggcgtatagaaaaaaatatttcaaaacatattctaaatatataaaa

SEQ ID NO: 118753 - DNA, 867 bp, Zea Mays
atggacaagtctggcaaagtgattgcaaagtgggatagtagagcaacaaaaatttacacagaaatttgtgtagaagaggtcaatgcacggaacaggccacaacaatttctaaacgccgaagggtatgctaacctcataaggaagtttaaggaacgcactggtcgcacttacaccagggatcaaatgaagaataggtgggactccttaaagagaatgttcacccagtggaaaactcttaatgaaagggctacaggtcttggtcgagaccctcatactggttcaatcagtgcgccagatgagtggtgggctaagcaaaatgaagcaatgccagggtgtattatgttcaaaacagcccccctagagaatgaggacgagctaaaggttatgtttggacctattgtctgcacaaatgaaagaacccttgttcctggcgtcgaggatgctaattcatcatctgatgatcatgtggaagccactttaggtgggggtggaaacagcacacctgacccatgctcaaatgcgactgggaagcgtaaggtgcgtcatgattctccaaaaccaaagaagaaaaaagatacgagggaagagtacatgaaacacctagtggaggcttttgagtcgcgttcaatgaccactaacaagtccattacctctgctgagaccgaccctgttcgtgttgaggttattgcgcagttgcaacaagtgatcgatgatggttcaccagaaggcagcgacctacatttgtttgtcactcatctgttgattgagaaaaagtatagagatgtttttgcatcactgaagacaaaagaaggaaggaacgcttggctgcgccgtgctttcgagatagatctaaaaaagtccacttag

SEQ ID NO: 118754 - DNA, 399 bp, Zea Mays
atggttgaagtcattcataattgtagcatccttgctactgtcggcctgaggatggcaagtacacctggagtcagcgcgaccctttttgatgcactagctaaggcaaatattaatgtaagggcgatagctcaaggttgcagtgagtacaacattactattgtactgaagcaagaagactgcgtgcgggctctgagagctgcccactcaaggttcttcctctccaaaaccacactggctgttggcatcattggacctgggttgattggtcgcacactacttaatcagctgaaggatcagcatggctgcataccaactactccccttgatgtcaacaatcaacacacagtcacacaggaacaacagcaggtggggtgtgtgggcgtccaacatagggactaa

SEQ ID NO: 118755 - DNA, 1759 bp, Zea Mays
cacgggtccattctgatcctgccgctacccctccgcttccgccctctcgctttcgttgtcatgaggagcctcaccgtggcaagccgccacccgggcgccgctttctctacccgccgccgcccccttcttcaccccgccgcagccggaagggactcgaccttccagcggtgctggcgatgggaaaaaactcaggacagctccttcgggagctcactaaggaccagccgccttccaagaactgtgcacggagatattttgaagaatttgctcgcaccaactgctggtgctgtttcagttgagcaagctgaagctattgctgacctcccaaaaggtgaaatgtggtcggtgcacaagtttggtggcacatgcatggggacctctgagagaattcacaatgttgctgatatagtccttcgtgatccttctgagaggaaactggtagttgtatctgcaatgtctaaggttaccgacatgatgtataatcttgtaaacaaggctcaatcaagggatgattcttacattgctgtactggatgaagtttttgataagcatatgacaacagcaaaggatttgcttgctggagaagaccttgcaagattcctgtctcagttacatgcagacatcagtaacctaaaagcaatgcttcgggccatatatatagctgggcatgcaacagagtctttctctgattttgttgttggtcatggagagttatggtctgctcaaatgttatcatatgcaatacagaagtctggaacaccatgcagttggatggatacaagggaagttctagttgtgaatccgtcaggagccaaccaggtagatcctgactatttggaatctgaaaaacgacttgaaaaatggttttctcgatgtccggctgagacaataattgctactgggtttattgcgagtacacctgaaaacatcccaacaaccttaaaaagagatggaagtgatttctctgcagccataattggttcccttgttaaggctcgccaggtgaccatctggactgatgttgatggggtatttagtgcagatcccagaaaagttagtgaggctgtaatcttaagcacattgtcgtatcaggaggcctgggaaatgtcatattttggggcaaatgtcttgcatccacgtactattatacctgtgatgaaatataatatccctattgttataaggaacatattcaatacttctgcccctggaactatgatctgtcaacagcctgctaatgaaaacggtgatttggaggcttgtgtcaaagcttttgcaactatagataaattggctttggttaatgtcgaagggactggaatggctggtgtcccaggtacagcaaatgccatatttggtgctgtgaaggatgttggagcaaatgttatcatgatatcacagcaagcgacatgggaagtggcagttggaagtggtcgtcccagggcgcttgcaggagatggagcagcagcactgccaggcgtggtggcaggactgcttggaccatctggggcggtcgagtgctgcactggtgggcgacacgtgaagacctggccgaaccgttgtggcacagacggggcgccgagcggtgctgatgcaggagtgccggggacaccaggagagtcattgggagaccctggtgaggtcggcgcgactggggtagaggaaccaggcaacactaggggcgtacgaacgtcgggtactgcaggcgcgtcgagagcagcgtttggagctgttggggcactgggggcagtggcgcctg

SEQ ID NO: 118756 - DNA, 258 bp, Zea Mays
atgagcgtcgtcgctggggatgtcattagtggcatcctgagcagtgagggcgcgagcacaggtcgcgcgtgcgagagcagcgcgaacgtgttcgacagccacgtcgcgctcctgggcagcggtggccgcctcctgctccgcctggagagcctgggcgagggcgacatcgcgccgggcggcggcctagaggcgagcttcgtggtcagctgcggtcagcgcagcggtgtcatcgacggcaagtggcgatggcagatctga

SEQ ID NO: 118757 - DNA, 1470 bp, Zea Mays
atggcgataagcatgggcccctccatcgcctctgccttgctgcgattgcctaggcaaccttcatatactactggatttgggactgctttaaatatagagacacttgttgctgccgtggaacaaagagatacaccaattgagacacctccacctaaagttcaggacaagattctttttatgatcaacaatatatccatctcaaatatggaagctaaggcaaaggaatttaatgaggtcatacaggaacaatattatccttggtttgcacaatacatggtcatgaaaagggcaagcattgaaccaaatttccatgatctgtatatgaatttctttgataaagtaaactcaaaatccttgaacaaggaaatattgaaagccacatatgagaactgcaaggtcttgttaagatcagaccttatcaaatctagttccgaggagcgctccttgctaaaaaacctaggcagttggttgggaaagttcaccattggtaggaatcaggcactaagggctaaaaagattgatccaaaatctcttatcgtggaggcatgtgagaaaggattgatgattgcggtcataccattcacttcaaagatccttgaaccttgccagtcaagtattgcaaatcgacctccaaatccctggaccatgggaattctaagtctacttgctgaaatttataatcttccaaacctcaagatgaatctgaaatttgatattgaggtgctatttaagaaccttactgttgacataaaggatgtgaaaccaacttccctgctcaaagatcatctgcgcgaagtcgagggaaatctagatttttcaaataaagatgttactgcatctcaaacccctgtggttgcagaagtcccttcagggaccatcccttcactaactcatatggaacaacaacctgagatcaatatcacatcccgagctatgatccttccaaatatacttaatcagtatgctgctcctgtccgtctacctacaaacagcacggtagaagatgacaaagttgctctgatgatgcctgagcaagtgccctcgttgacccaggtttcgccagcacaaacacaatcaacatcaccatctccattttctgttaaccagcttatggtggctattccacgtgaagagatacgtttcaaaataaatccaaagctcggctcccttggtccacaactgcaatatagcaaaattatggatttggctttggataaggctaacagggagataatactccctgttattcaaagaagtgtgaccatagcaagccgaactacaaaagaacttattctgaaggattatgcactggagtctgataacaatacgataactcgatccgcacatttgatggttggaacattagccggaagtctggcacatgttacttgcaaggaacctcttcgtgttgcactatattctaatcttcggaatctcattcagaaccttatgagcgatttaaaagcttaa

SEQ ID NO: 118758 - DNA, 517 bp, Zea Mays
ggtgggctccgccgttcccctttacctgcgtcatgcactcacggcaacgctggccagaggcccagagcttcgtcaaagacacgccgaaaagagggggaggcgactcggccgaggtccggttccgaactccggtcctccgatttgcgcgtccggatctaccagccatggcatcatcttcggacccgtggatgaaggagtacaatgaagcatccagacttgctgatgacatcagttccatgattgctgatagagggtcccttccacaatcaggcccagaaattatgcggcatacttcagccatccggagaaaaataactattcttgggactagactggatagcttggagtcgttgcttggcagaattcctccaaagtcaatgtatgtcctattgcaactacttctgtaattctgtgatagtaatgatgtggagtgcttgcaaagaccccatatttgtttttgtcaagtctgatgcttagcaatgaaacaaatatctgttgaatcttggagaacttgttt

SEQ ID NO: 118759 - DNA, 1159 bp, Zea Mays
ggtgggctccgccgttcccctttacctgcgtcatgcactcacggcaacgctggccagaggcccagagcttcgtcaaagacacgccgaaaagagggggaggcgactcggccgaggtccggttccgaactccggtcctccgatttgcgcgtccggatctaccagccatggcatcatcttcggacccgtggatgaaggagtacaatgaagcatccagacttgctgatgacatcagttccatgattgctgatagagggtcccttccacaatcaggcccagaaattatgcggcatacttcagccatccggagaaaaataactattcttgggactagactggatagcttggagtcgttgcttggcagaattcctccaaagtcaatcactgacaaggagatgcataagcgccaagacatgttttccagtttgaagtctaaagcaaagcagatggcgacaagtttcaacatgtcaaactttgctaacagggaggatctgcttggtcagagtaaaaaggcagatgacatgagcagagttgctgggttagataaccaagggattgttgtccttcagaggcaaattatgaaagagcaagatgagggtcttgagaaactggaagagacagtgctgagcacaaagcatattgcattagcagtcaatgaagaacttaccctgcacacaagattgatagatgaccttgaagatcatgttgatgttacaaattcacgtcttcagcgcgtgcaaaagaggcttgcaattctgagcaagcgcaccaaaggtggctgctcatgtatgtgcctgcttctatctgttgtcgccatcgtgattcttgcagtcatagtttggcttctcgtcaagtatctgtaaaggaaagaaagaagcagccggcctaccctgcagacctcactcgaaatgacccttatgtgtgtgcagccttcgcttaaaaagtcccttctgtgttactaccattgaaatgtgcatccctttgaaaataatatatatacggtggtttcatcttccctttcgtgagtggaatggttatggagtaatgtacattacatcgaatttgacacatacatgatcatcatctgcatcttgtgtatggtgtttgtcagtttgccgtgacaagtgttggatttattctgtgccgtaagcactttatctct

SEQ ID NO: 118760 - DNA, 1449 bp, Zea Mays
ggtgggctccgccgttcccctttacctgcgtcatgcactcacggcaacgctggccagaggcccagagcttcgtcaaagacacgccgaaaagagggggaggcgactcggccgaggtccggttccgaactccggtcctccgatttgcgcgtccggatctaccagccatggcatcatcttcggacccgtggatgaaggagtacaatgaagcatccagacttgctgatgacatcagttccatgattgctgatagagggtcccttccacaatcaggcccagaaattatgcggcatacttcagccatccggagaaaaataactattcttgggactagactggatagcttggagtcgttgcttggcagaattcctccaaagtcaatcactgacaaggagatgcataagcgccaagacatgttttccagtttgaagtctaaagcaaagcagatggcgacaagtttcaacatgtcaaactttgctaacagggaggatctgcttggtcagagtaaaaaggcagatgacatgagcagagttgctgggttagataaccaagggattgttgtccttcagaggcaaattatgaaaggtattgtttttttgtggtttgttcagtagtgttttcttgatgaaccttactaaaagggtgctgtttgcatgagatcatgtagcactgtttcttcacaccatttgcatttcatatttggttggtacagatctaggtttcttggaaatggcagttgtgggagcaagaaccatttcatggcgctttatttatttgagttgtgtatcaatattttgcagagcaagatgagggtcttgagaaactggaagagacagtgctgagcacaaagcatattgcattagcagtcaatgaagaacttaccctgcacacaagattgatagttagtgccatataacaaaaaccagtagtatatgtgtcttttacacttgatgataacttgttatcttgtttgcaggatgaccttgaagatcatgttgatgttacaaattcacgtcttcagcgcgtgcaaaagaggcttgcaattctgagcaagcgcaccaaaggtggctgctcatgtatgtgcctgcttctatctgttgtcgccatcgtgattcttgcagtcatagtttggcttctcgtcaagtatctgtaaaggaaagaaagaagcagccggcctaccctgcagacctcactcgaaatgacccttatgtgtgtgcagccttcgcttaaaaagtcccttctgtgttactaccattgaaatgtgcatccctttgaaaataatatatatacggtggtttcatcttccctttcgtgagtggaatggttatggagtaatgtacattacatcgaatttgacacatacatgatcatcatctgcatcttgtgtatggtgtttgtcagtttgccgtgacaagtgttggatttattctgtgccgtaagcactttatctct

SEQ ID NO: 118761 - DNA, 1212 bp, Zea Mays
atgcactcacggcaacgcgtccgtcttttatatttctcacaaacaattgaacaaattaaaagaaaaggtctaattactcgcctctcttgctcgccaacgccagtggccagaggcccagagcttcgtcaaagacacgccgaaaagagggggaggcgactcggccgaggtccggttccgaactccggtcctccgatttgcgcgtccggatctaccagccatggcatcatcttcggacccgtggatgaaggagtacaatgaagcatccagacttgctgatgacatcagttccatgattgctgatagagggtcccttccacaatcaggcccagaaattatgcggcatacttcagccatccggagaaaaataactattcttgggactagactggatagcttggagtcgttgcttggcagaattcctccaaagtcaatcactgacaaggagatgcataagcgccaagacatgttttccagtttgaagtctaaagcaaagcagatggcgacaagtttcaacatgtcaaactttgctaacagggaggatctgcttggtcagagtaaaaaggcagatgacatgagcagagttgctgggttagataaccaagggattgttgtccttcagaggcaaattatgaaagagcaagatgagggtcttgagaaactggaagagacagtgctgagcacaaagcatattgcattagcagtcaatgaagaacttaccctgcacacaagattgatagatgaccttgaagatcatgttgatgttacaaattcacgtcttcagcgcgtgcaaaagaggcttgcaattctgagcaagcgcaccaaaggtggctgctcatgtatgtgcctgcttctatctgttgtcgccatcgtgattcttgcagtcatagtttggcttctcgtcaagtatctgtaaaggaaagaaagaagcagccggcctaccctgcagacctcactcgaaatgacccttatgtgtgtgcagccttcgcttaaaaagtcccttctgtgttactaccattgaaatgtgcatccctttgaaaataatatatatacggtggtttcatcttccctttcgtgagtggaatggttatggagtaatgtacattacatcgaatttgacacatacatgatcatcatctgcatcttgtgtatggtgtttgtcagtttgccgtgacaagtgttggatttattctgtgccgtaagcactttatctct

SEQ ID NO: 118762 - DNA, 928 bp, Zea Mays
tcacaaacaattgaacaaattaaaagaaaaggtctaattactcgcctctcttgctcgccaacgccagtggccagaggcccagagcttcgtcaaagacacgccgaaaagagggggaggcgactcggccgaggtccggttccgaactccggtcctccgatttgcgcgtccggatctaccagccatggcatcatcttcggacccgtggatgaaggagtacaatgaagcatccagacttgctgatgacatcagttccatgattgctgatagagggtcccttccacaatcaggcccagaaattatgcggcatacttcagccatccggagaaaaataactattcttgggactagactggatagcttggagtcgttgcttggcagaattcctccaaagtcaatcactgacaaggagatgcataagcgccaagacatgttttccagtttgaagtctaaagcaaagcagatggcgacaagtttcaacatgtcaaactttgctaacagggaggatctgcttggtcagagtaaaaaggcagatgacatgagcagagttgctgggttagataaccaagggattgttgtccttcagaggcaaattatgaaagagcaagatgagggtcttgagaaactggaagagacagtgctgagcacaaagcatattgcattagcagtcaatgaagaacttaccctgcacacaagattgatagatgaccttgaagatcatgttgatgttacaaattcacgtcttcagattgtaagttctggatacactatgtgactatgtctagatacatagcaacagttatatagcatgtacttcaaaaacccagaacgacatacaatttggaacagagtactatgtagaattttttactgcaacatgctatttaaacttctcaagtttgcaatggaacactgatacataattctcttt

SEQ ID NO: 118763 - DNA, 1230 bp, Zea Mays
aaaagaaaaggtctaattactcgcctctcttgctcgccaacgccagtggccagaggcccagagcttcgtcaaagacacgccgaaaagagggggaggcgactcggccgaggtccggttccgaactccggtcctccgatttgcgcgtccggatctaccagccatggcatcatcttcggacccgtggatgaaggagtacaatgaagcatccagacttgctgatgacatcagttccatgattgctgatagagggtcccttccacaatcaggcccagaaattatgcggcatacttcagccatccggagaaaaataactattcttgggactagactggatagcttggagtcgttgcttggcagaattcctccaaagtcaatcactgacaaggagatgcataagcgccaagacatgttttccagtttgaagtctaaagcaaagcagatggcgacaagtttcaacatgtcaaactttgctaacagggaggatctgcttggtcagagtaaaaaggcagatgacatgagcagagttgctgggttagataaccaagggattgttgtccttcagaggcaaattatgaaagagcaagatgagggtcttgagaaactggaagagacagtgctgagcacaaagcatattgcattagcagtcaatgaagaacttaccctgcacacaagattgatagttagtgccatataacaaaaaccagtagtatatgtgtcttttacacttgatgataacttgttatcttgtttgcaggatgaccttgaagatcatgttgatgttacaaattcacgtcttcagcgcgtgcaaaagaggcttgcaattctgagcaagcgcaccaaaggtggctgctcatgtatgtgcctgcttctatctgttgtcgccatcgtgattcttgcagtcatagtttggcttctcgtcaagtatctgtaaaggaaagaaagaagcagccggcctaccctgcagacctcactcgaaatgacccttatgtgtgtgcagccttcgcttaaaaagtcccttctgtgttactaccattgaaatgtgcatccctttgaaaataatatatatacggtggtttcatcttccctttcgtgagtggaatggttatggagtaatgtacattacatcgaatttgacacatacatgatcatcatctgcatcttgtgtatggtgtttgtcagtttgccgtgacaagtgttggatttattctgtgccgtaagcactttatctct

SEQ ID NO: 118764 - DNA, 3120 bp, Zea Mays
gcctcctcgccccctttcccccggcctccccttcgtcactttccactatccaaagcttcttcgctcctgcttcccttttcacaccaagcaggacctgccggtgccaaacgcacgccgcatcacacagaagccaacaaggttgagaagagactgaggaggtcagccagccacttgcccacctccgagctgtcccccatgacaccaccgccaccagcaacccaagtaccaaacgactgggccgcagtcccgcaatagcgtcaagatctcccctttgacctcccccttcgccttccggccatggtctgctgccatggcggccggcgccgcagcgccgcgctcctattcttggccgtggccgtggtcgcctgcgctgctgctgcggcggcgcaggagcccaacaccgacgcctacttcgtctctgggtttttctccaagctgggccgcgccgcgccgtcctcgtccggcgccaacggggtgtgctcctggtccggcgtgtcttgcgacggcgcggggcgggtcgtggcgttcgtggccgccgggatggacctggccggcgccatcccggaggacaccatcggcaagctcgcgcgtctgcaggtcctcgacctcagcggcaaccgcctgaccgcgctgcccaacgacctgtgggagctcggcgcgtcgttaggcgcgctcaacctctccggcaacgccatccgcggtgcgctccccaacaacatcggcgacttcgcgcgcctcaaggtgctcgacatctcccacaacgccttcaccggcgcgctgccgcaagcgctcggctccatcgtcggcctgcaggtgctcaacgccagccacaaccagttccagggacaggtccccaacgccatcgtcttcggctgtgtgagcgtcgtggctatggatctctccggcaatgcactcgacgggggcttgccggacctgtcgccactccgctctctagcccgtctcaatctgtcgggcaacaggctccgcggctccatcatcggggcgttccaggagcagttgagggtgatagacctcagcaacaacggcttctctgggctgaatttcagcagtgggtatgccggctcggcgttggtgtacctcgacttgtcaggaaacgagcttacaggagaattcaccattgccggccggttccagaacctgaggcatgtgaatcttgcacacaaccagttgtccaatgctaatttgctggtgtccatgggtgggatatctgggctagagtatgttaacctttcaagcactgggctgcatgggcaaattcctgctgatttctcttcccgattggttggattgaaggttctcgatttgtcacggaacaatatcagtggggtagtcccagacatgagttctcttggcctacacttgctggacctgtcggtgaacaatctcacaggtgagatacctgtggcattggtgaagaagctgacatccatggatcggttcaacttctcatacaacaacctgactgtttgcgcatctgagctctctgcggaggcgtttgccactgcatttgctcagtccaggaatgactgcccaattgctgtgaatccagacagtatcgtgaaaagtagagggaaacataagggaatgaagttggttctggctgttgtgctctccttgttcttctctgttcttgggttgctttgcttggcagcggcatgtcgaagggggaggaagaggtgtgatgagctgcctgtggttaagcaggtgtcgtcgttcgatgagcctgctgtatcagggccattttctttccagaccgattcaactacatgggttgctgatgtgaaggttgcaacttcggtgccggttgtcatctttgagaagcccttgctgagcctcacatttgctgacctcttggcggcgacatcaaacttcgacaggggcaccttgttggcagaaggcaggtttgggccagtgtacaggggattccttcctggtggaattcaagttgctgtgaaggtgttggtccatggatcagcaatcggagaccaagatgctgcaagggagctcgagcggctgggacggatcaaacatccaaacttagttcccttgactggttactgtgtggcaggggttcagaggattgccatctacgagtacatggaaagcggcaatctgcacaacctactgcacgacttgccgcttggagttcaggcaaccgaagactggagtggcgacacatgggaggacaacaccggtggtgttgcaacaactgaaatcgtcacgccggaaggtactgcgacatggatgttccggcacaaaatcgccctaggtgccgcaagggcgctggcattcctccaccatggctgtatcccgcagattgtccaccgggacgtgaaggcaagcagcatctacttcgactgcgcaatggagcctaggctgtccgatttcgggctgtctatggtggcaggaaccagggccgatctgctacaccattccccgggctacgcgccgccggagttctccggctcggagaacgccgcggcgaccgccaagtccgacgtctacagcttcggcgtcgtgctgttcgagctggtcacgggcaagaaaccgctgggcgacgagtaccctggggtgcagaaggaggcgagcctggtgagctgggccagggcgatggtgaaggcgagcctcgcgccgagcatcatcgaccccaagatccgcgacacgggaccggagcggcagatggaggaggcgctcaggatcgcctacctgtgcaccgcggagctgccgtccaagaggcccgccatgcagcagatcgtcggccttctcaaggacatcgagccgaaggtggaagaggagggggactgaagatctggaggagtgtgatcggttgcaccttgcagcgtgtcggatggtggtgagatttgtgtagtgacagcgtcggcaggcaggcaggctgtgactgtgagtgagctcgtggttgttttaccatcgtcgagctcactatgccatgccttgctctgcatatatctttttcatccttctttcttccctttttcccgcttctatctcgctgattcctccagttgctgaagattattgcaatactgctctgttacattacacctgccccttactaaccatgccactgctcgagagata

SEQ ID NO: 118765 - DNA, 1604 bp, Zea Mays
cctttcccccggcctccccttcgtcactttccactatccaaagcttcttcgctcctgcttcccttttcacaccaagcaggacctgccggtgccaaacgcacgccgcatcacacagaagccaacaaggttgagaagagactgaggaggtcagccagccacttgcccacctccgagctgcctgtggttaagcaggtgtcgtcgttcgatgagcctgctgtatcagggccattttctttccagaccgattcaactacatgggttgctgatgtgaaggttgcaacttcggtgccggttgtcatctttgagaagcccttgctgagcctcacatttgctgacctcttggcggcgacatcaaacttcgacaggggcaccttgttggcagaaggcaggtttgggccagtgtacaggggattccttcctggtggaattcaagttgctgtgaaggtgttggtccatggatcagcaatcggagaccaagatgctgcaagggagctcgagcggctgggacggatcaaacatccaaacttagttcccttgactggttactgtgtggcaggggttcagaggattgccatctacgagtacatggaaagcggcaatctgcacaacctactgcacgacttgccgcttggagttcaggcaaccgaagactggagtggcgacacatgggaggacaacaccggtggtgttgcaacaactgaaatcgtcacgccggaaggtactgcgacatggatgttccggcacaaaatcgccctaggtgccgcaagggcgctggcattcctccaccatggctgtatcccgcagattgtccaccgggacgtgaaggcaagcagcatctacttcgactgcgcaatggagcctaggctgtccgatttcgggctgtctatggtggcaggaaccagggccgatctgctacaccattccccgggctacgcgccgccggagttctccggctcggagaacgccgcggcgaccgccaagtccgacgtctacagcttcggcgtcgtgctgttcgagctggtcacgggcaagaaaccgctgggcgacgagtaccctggggtgcagaaggaggcgagcctggtgagctgggccagggcgatggtgaaggcgagcctcgcgccgagcatcatcgaccccaagatccgcgacacgggaccggagcggcagatggaggaggcgctcaggatcgcctacctgtgcaccgcggagctgccgtccaagaggcccgccatgcagcagatcgtcggccttctcaaggacatcgagccgaaggtggaagaggagggggactgaagatctggaggagtgtgatcggttgcaccttgcagcgtgtcggatggtggtgagatttgtgtagtgacagcgtcggcaggcaggcaggctgtgactgtgagtgagctcgtggttgttttaccatcgtcgagctcactatgccatgccttgctctgcatatatctttttcatccttctttcttccctttttcccgcttctatctcgctgattcctccagttgctgaagattattgcaatactgctctgttacattacacctgccccttactaaccatgccactgctcgagagatactgaaagtccctgtcaa

SEQ ID NO: 118766 - DNA, 1565 bp, Zea Mays
agagcgaggaggaagacagagatcagcggcggaccggcggcgtggcaggagatcgaggcggccgacccatgtgcttatgccccgttacgacggcagcagcatcgtgcgcgcgtgactgatccgccgaagcagacaccgcgtaccatggaagcgcggccgcggctgctcctagtcgccgccgtggcggtcttcgtgtcagtgtccgccgccgccggggcggccgtcgtcataaacgtgaagaactacggggcccatgggaatggcgtcaacgatgataccaagccgctgatggcagcgtggaaggcagcgtgcggatcagctggcgcggtgacgatggtcgtcgcgccggggacgtactacatcgggccggtgcagttccacggcccctgcaaggcgtccaccttgaccttccagctgcaggggacgctcaaggccgccacggacctgaagcggttcggcaacgactggatcgagttcgggtgggtgaacgggctgaccgtcgccggcggcgtcatcgacggccagggcgccgcctcgtggcctttcaacaagtgccccatccgcaaggactgcaaagtgctgcccacgagcgtgctgttcgtgaacagccagaacacggtggtgcgcgacgtgacgtcggtgaaccccaagttcttccacatggcgctgctgtcggtgaagaacgtccggatgagcgggctgaggatccgagcgccgcccaacagccccaacacggacggcatccacatcgagcgcagcagcggggtgtccatcgtggacacgcacatcggcacgggcgacgactgcatctccgtcggccagggaaacgacaacgtggaggtctcccgcgtgcagtgcggcccgggccacggcatgagcgtcggcagcctgggccgatactccggcgagggcgacgtcacgcgggtgcacgtccgcgacatgaccttcacgggcaccaccaacggcgtccgcatcaagacctgggagaactcgccgtccaggagcaacgccgcgcacatggtcttcgagaacatggtcatgaaggacgtccagaaccctatcatcatcgaccagaagtactgcccctactacaactgcgagcacaagtacgtgtccggggtcactctcaaggacattcacttcaggaacatcaagggcacggcgactacgccggtggcggtgttgcttcgctgcggcgtgccgtgccagggtctggtgctgcaggacgtggaccttaggtacaaggggcagggtgccacatcggccaagtgcgagaacgccaaggccaagtacgttggctaccagttccccaagccctgcagcccctagcttagataggtgtcgtcgtgtggcgcgaggagatcctctccgtggccggccggccggccccgcttaccactctggtgtacctggctctagctagctagctccagtgtgcggtgaagtgggctttgattcttccatcgtgttgtctagacgtacgtttttcttttggcttttcatgtttgctttcttgattagctgatttttgtgttatgtgtaatcgcaatttctgtcatctgcta

SEQ ID NO: 118767 - DNA, 759 bp, Zea Mays
atgtcctcgtttgtcccatgccaaagcacaggtctaaggcccagctccggccgtggtcgttctcacatggactacggtgccgctgtgtacgcgtggggcttatggcgtagctttagcgtcgctaaagcgataaggcgagcgtggaggcataaggcgtcttgtcgccttgcctgcgagagtaagggcggcagcgcgtgtcgcatatctcccgccggcggcgcgcagggaggagagctatggagagggagaagctgctgctatcggctaagggacaatctgctgctagcagctgagaaggtaaccctaaaattgttggactgggttgactggttatgggcttcttcttttgttctttttctttttcctgattctctcgtctactaggccgaaataggcctattaaggccttacagttgtgctatcttttttattacttccaaattagtgatatataaataaaacgagggtggagggctagcgcagaggccgagtgaggatggaggcgggggaggcgtgcacgtgcgctgagggggagtcgggggcatgggtgtgcgcactctagcagcgcggaaggggaggtggccgtagccatattagcgccaggcgcccacactacgttcttaatagaatagtatagatgtgatctaatttttaataattatatatataattgaggtgtcgcctcgcctctcttaaaagttaaaaagggggcgctcgcctttacttgccttaccgccttaataactatgggtggggcag

SEQ ID NO: 118768 - DNA, 461 bp, Zea Mays
gtttttgcttaaactataggtgctagagatgttgacaaagaagatgatatgtttgtcctcattgctccacaaaatgctgttggaaactgcataattgatgatatgagagctatgactgatgctgctggtgatagacctgtgattcttgtaaatcctcgcctaaaggatatgcctgcatcaagtggtgttatgcaagatggcttatccaaataaatatgagatttatcgaagggttgacactctcaatggaaaagagaactatattcttatagctgaattcacgaacaagccaactcctgatgagatcaccagtgctttcaaaggacaaaaaagggaagaaaaggcatcttctggattctggtaacttatgctcctggtttttgtttctccattccaatactaacttcctaccaacatgaatatgggttactaaacatttcaatccttgtgtaggggtttct

SEQ ID NO: 118769 - DNA, 1146 bp, Zea Mays
gtttttgcttaaactataggtgctagagatgttgacaaagaagatgatatgtttgtcctcattgctccacaaaatgctgttggaaactgcataattgatgatatgagagctatgactgatgctgctggtgatagacctgtgattcttgtaaatcctcgcctaaaggatatgcctgcatcaagtggtgttatgcaaacaatgggaagggatattaggctgaagtatgctgcatcatttgagacatgctattcattccgtcttctctactacgctggttcattctatcctattatgggagctttaaggatggcttatccaaataaatatgagatttatcgaagggttgacactctcaatggaaaagagaactatattcttatagctgaattcacgaacaagccaactcctgatgagatcaccagtgctttcaaaggacaaaaaagggaagaaaaggcatcttctggattctggggtttcttaagtggtttattttaagtcaagcgatctgctgtacggcgatgcaatcctccttgtatatttttatctgataatggatgtaatatggttcggaaaatatccgttcggatcaggattcgaagatggtgaacactggttcagatggaattttcggatatccggacttttttcggataacggatacgaatacgaatattttgttcggatatcgaattcgaatacaatatgtctgatattcgtcggatatcgaatatctggatattttctcggataaatcttctcggatatccggatatcttatctggatagctgtgtgcattttgttgattgtttgtagaaagaaattaataatacacaaatagcctcaaaaattcatgaaaatttatggaggcataccatatgtccacatataatcctccaaaatatttggaccataaaatccacaatattgtagtgtttctttcatttcactttcacttgtgtgaattacatgagaaatcactctaattatccaagttcactttatcattttcatatggagacttgaggttatattcttatagaatgtttattagttttggtaacttatttgcattttaatgattttatacaaaataaattaataacacgcatataggctaaaaattcatgttttttacaaaaaaaaaa

SEQ ID NO: 118770 - DNA, 1036 bp, Zea Mays
gtttttgcttaaactataggtgctagagatgttgacaaagaagatgatatgtttgtcctcattgctccacaaaatgctgttggaaactgcataattgatgatatgagagctatgactgatgctgctggtgatagacctgtgattcttgtaaatcctcgcctaaaggatatgcctgcatcaagtggtgttatgcaagatggcttatccaaataaatatgagatttatcgaagggttgacactctcaatggaaaagagaactatattcttatagctgaattcacgaacaagccaactcctgatgagatcaccagtgctttcaaaggacaaaaaagggaagaaaaggcatcttctggattctggggtttcttaagtggtttattttaagtcaagcgatctgctgtacggcgatgcaatcctccttgtatatttttatctgataatggatgtaatatggttcggaaaatatccgttcggatcaggattcgaagatggtgaacactggttcagatggaattttcggatatccggacttttttcggataacggatacgaatacgaatattttgttcggatatcgaattcgaatacaatatgtctgatattcgtcggatatcgaatatctggatattttctcggataaatcttctcggatatccggatatcttatctggatagctgtgtgcattttgttgattgtttgtagaaagaaattaataatacacaaatagcctcaaaaattcatgaaaatttatggaggcataccatatgtccacatataatcctccaaaatatttggaccataaaatccacaatattgtagtgtttctttcatttcactttcacttgtgtgaattacatgagaaatcactctaattatccaagttcactttatcattttcatatggagacttgaggttatattcttatagaatgtttattagttttggtaacttatttgcattttaatgattttatacaaaataaattaataacacgcatataggctaaaaattcatgttttttacaaaaaaaaaa

SEQ ID NO: 118771 - DNA, 1851 bp, Zea Mays
atgcagccgggaggcgcggcttccagtaccgccaccggtggacggaggcgcgtgtcggtgcagtccaccaggagcgccggcgccacaccggcgtcgtcggtgtgggaggcgcggatgaagatggacgaggtcaggggcggcgtcaaggtcttcagcgccggcgccgccgacgagccggcggacgaggagggcgtgcgggtctaccgccgcctgcgccgcaaccagagcgagggcggcggcgccggtgccgcggacaccgccgccaagaagaggcgcagctggaaggcttccaagccggtcaccgcgatcggggacctccgcaagtcgcgctccgacgccgccgccgccgtgacgacggccaccaccaccgccactgcggtggttgctaggcgggccgtggcgcgggtatccatgcccgagaagaaggtggcgccggcgccagcggccgccgccggcgaggtcaaggaggtggtggtcgtggaagtgcacaaggctgcggcggcagacgcgaagaacgtggcgcgaggaccagatgaggagttggacgacgacgacgacgaccacgacgacggcgcggaggtggacgacgacgacgagcaagatcttgagccaccgacaaaagcagggattaagcccacgctgtcggtggaagaagagagagcgaccaacccagagccggtgaagccgccgcctccagggaagaaactagcctcggtggtcgatctccgagcggtcaatccggaacccatgacccctgctcctccgccagtcgagaagaaggcgacaccgatagtggttcaccgcatgaccaacttcgagctggcacaatcttttccagagaagaaagctttgccggcggtgggtccccggattccgaagacagagcctgccagcagtcctcctggtggtgaggagtatgaggagatccaaggaagaccatctcaaccgagcagaagtcaagcgagaatgcagaacattgtgaatctggtgatgtggaccgacgtgtcaaaatccgcgctggtgttcggactagggactttcttgctcgtctcctcctcctacgccaaagacctaaacttcaacacgatcacggcggcgtcgtatgcaggcctgatctacctcggtctacgcttcctgcgcaagtccatactgagcaggggtgaaagtgtggagtgcgacgatgatggaggcgtcggcggcgataggtgctgctacctggtcggggaggaggatgccgtgtggctgctgaggctggtgctgccgtacgtcaacgaggtgctgctaaacctgaggtctctcttctccggcgagcctgcgaccaccatgaagctggcgctgatactgttcgcgatggcccggtgcggcaactttgtcaccctctggacgctggccaaactggtgttctttggggtcttcatcatccccaaggtgtgctcctcttactccacgcagctggcacgatacggcaggttctggctggagaggctgagggacgcctgggagtcgtgcacccacaagaaggccgtggtggcggccgccttcacgctggtctggaacgtctcgtccacggcgtcgcgcgtctgggcggtgttcatgctggcggtggccgtcaagtgctaccaccagcgcgtcggggagttcggctggagcagcagcagcgcgggggcgcaggaacagccagcggacgacgacgacgagccgccgccgccgccgccgaagcacagggcccaggacgagtcgtcgtcgccgcggcaggagttcggggcgccgccgcggcacaggcgggcgccggtctccggcgagttcgcccgcgagaggctcagggctcggggcggcatccagcctcggtga

SEQ ID NO: 118772 - DNA, 1557 bp, Zea Mays
ctgcaccgcgttcgcatccagaaacaagtcaagcagggacgccggacgacaccgctagctcgtccctgaacagggcgacggtgtcgcggacgatgtcgtcggggcgcgccgtcgcgtcggcctcggcgaccccctccgcggggtcgacccgcagcaggtcgagctggctccgcagcaggctcgccggcatgaagtgctccccttccaccgacctccgcagcaccctctccgcgagcacctccgccggcgccctcaggcacacgaacctcaccctgcaggcggcgtagcgccccggctcgtaggcgcggtcggccgcgcggagcacatcccggtacccgagccgcagcgccgagcagctgacggccacgtcctcgccgccgtccagccgcccccggatggcgtcccgcaccgactccagccacggcgcgcggtcggcgtcggagagcggcacgcccgcgctcatcttggctgggtttgcgcacgagttgagagcggatgcctatcggctcagcacgagttgagagatggcaaaaatggcacaaggccagagctttcggagacgtgatggtgtgagttgtgtggtgccgtggcgtgtacctttgtttgcctcggaatggtagtcgtctgcttcgatgaagctgcagcccagggcttcggcgagcattgccgcgacggttctgcaagttcagtgtgtgtcagtgtgtgagagagagatccagttcgtaagcactgtcaccggcagaacgccgacgaacgaatcctgccgatctgtgctcatccttaagcaaccctgaccggatccttgaagcttgaggatacaagagcgagggggacgaaggtatcttacgatttgccgcagccgctgactcccatgaccacgatcgccagccctgcaaccaaaattccccccaaagagaagctcggttagcattagcagccgcccaatcccaacgtatcccggctctccttggctgttcatcgcagcaagggactctcagctcaggattcagatcgcgagcttgttggtacgcacgacacgaacagccgctacgcgagcgaccagcaaattaaatcccgaatcggaatctcttgcgagaaggctgctattttgacttggaccacgcgtggaggaggaggatgcagctgccgggcaggcagtggaggcaggtgctgctactgacctggatgcgcgagggaatcggagacggccatggcgggcgctgcgggttctctggtggagggaggactagggaatggccagcccaacacgacgacgccgacgccgacggcagcaacgttttcgtgaggtccatccattcctttctcatttccaggtccaggatgccaaacttgctgacgtcagctacagcgcatttatttattttttagattttaaagacgaagcaaggcgcacagtacaaacatgcagttttttttgtgtgtgtttcatttgaaagagatcacgagcttttcgtcatttagtttaacgaacattgtttgttttggttaaaaaaataaaccttgaaaattgtctcaaaccatatcacacgataagca

SEQ ID NO: 118773 - DNA, 116 bp, Zea Mays
gtggcctaaaactaaaacaaagaaaattttaatcaacaaaaggctgagtgatgtatcgagttgtgacagtcctcaggataattgattcgtcttaaaatcagtaactaccgccaaga

SEQ ID NO: 118774 - DNA, 529 bp, Zea Mays
cttagataatccattctcacaaaagctgttctgacagccctacataggatatgttcgcctttccaaaggaaaaacagagatagaatcctacctatctagcatggcgaccggcgacgagtcggagacggcggtgcgggcgtctgaggagttgcgggactggtccgacatgacgccagtgtgtcttgccgaagcgttctcgcggctggcgctggaggacctgtggcgcggcgccatgccgtgctgtcgctcctggcgggacgccgcgcgctcgcgcccgggactcttcgcggtgcttgacctcgagcccgggtttgctgagtccacacctggcgccgaggcggcagcgtggtggacgccctccttccagcgccgtgtcgacgccatggtgcgctccgccgccacgttcgccgtgggggagctgtgtgagatccatgtccgccactgttccgacgacgcgctcgccttcgccgccgagaggcagtggcttgctaggactaatgaattgacagacatgtttatggtaatttga

SEQ ID NO: 118775 - DNA, 2399 bp, Zea Mays
cttagataatccattctcacaaaagctgttctgacagccctacataggatatgttcgcctttccaaaggaaaaacagagatagaatcctacctatctagcatggcgaccggcgacgagtcggagacggcggtgcgggcgtctgaggagttgcgggactggtccgacatgacgccagtgtgtcttgccgaagcgttctcgcggctggcgctggaggacctgtggcgcggcgccatgccgtgctgtcgctcctggcgggacgccgcgcgctcgcgcccgggactcttcgcggtgcttgacctcgagcccgggtttgctgagtccacacctggcgccgaggcggcagcgtggtggacgccctccttccagcgccgtgtcgacgccatggtgcgctccgccgccacgttcgccgtgggggagctgtgtgagatccatgtccgccactgttccgacgacgcgctcgccttcgccgccgagaggcagtggcttgctaggactaatgaattgacagacatgtttatggtaatttgaactgagctaaagcaaagagggatatctttgaaatggaacacttcaaagatggtgagtttatggctggattttattctctaaggatggtgctactaatgtttgtatgttattctgaacatattataaacgataaacgagcactgaagattctagtattattcctcccgtgcagaaagggggtcatcttgtccaaaatctaaaaatccaaaccattttgggtgttgagttgctatcatttcaaggaactcaattgttgggttttgttttggctctttttttttaaaaataaaggaacttaaacaagaacaaacaggcataaatttttaagtaatgcattttcaggtataaactcggaaccagcacatatattctatttttacacaagctggtaggaacatgtttataggaaacaatatcttctgaactagacatcccgaatgtataacagcttttaggatttgttgtgttctgggcatcaatttcgggactgtattagacaattattagccttatcacgacaaaatagtcccattcccatatgttcttgatttaagcttgccagtgtattgctcttttgttttgatcttttcttgttttccatgattgagtcatgacattttgatctggtagagtcggatttggtagattgaatcatagtttgatctattaaccttggattcatgcaaggcaacccaaatacccaatagtctccattattgaaggttttgatagattgtggtttgcaaagtctcttttcgggccttcttttagtacaacaaattcaagacgtgtataccaggcaacagaggatttagtgctttgtgtgtgtgtttgtgttctagaaaaggcactttgcctctttcatttgaatttcttttttaatgatggcacacaattctcttgtgtagtttttgaaaaaaggacttgtgtcaactatctagttaacagagtcaaattgtagcagtgtgcacatgtgcagttgacatttatggatactgaacgtctacaactctacgcaagtcttaagtcttaaccatggtttttaaagcggtaaggtgagccaaggcgttggaccaccgtctggacgcctaggcgaggtaggcgggcaaggctcctacgcgttggacctccgcctggatgcctaggcgtcgcctaggggctaggcgacgccttaagaacaggggtcttaacgcatacatgtttgtggactgaaagaattgaaacacagtgttaaagaatttgctttgtttgttatggaccaaattacagattaggcccactgtttttaaggcaccacctaggttaatgacactcaatgggggcaaggcatggcccatgtctagagggaagagtggtctccgtccatggagaagaaggaatagaaggcgtactactaggtgactatttgggggtggagtggggctccatttgtgtggatgcaagtcactcaagatgcttggggacgggcctaggtgataagaggctggtagatcaccacgcctcaccttaatgcttaagaacattgctcaggtcacttgtataggtggttcaagtagtatgtgcagattccagaaacttgaaaagtagatattaacctggactaccaaacaagtgtacatgcctgagatacaacaacaacaacaacaacaacaaagcctttttatcccaagcacgttggggtaggctagagatgaaaccccgtatgaaaacctcagagctcaaccccaaagaaaaaaaggggaaacaaaggcaaaggagaaccgaaaaacgatgaaacggggaaacacataaaagagataaaacccacaagaaccagcaagatctaaatgggcacaagaaaaggtcaaacgattaaagaggagaagcgaaa

SEQ ID NO: 118776 - DNA, 1616 bp, Zea Mays
gttttattatttttttgaatttagggctctaatgtgaatttcgggccaaaaactgaattttgggccaaaaactgaatttcgggccctaatgtgaatttcgggccaaaaattgaatttcgggcttttataatttcgggccgcccgaaataagcccggcacgtttaagcaattacgggccgggccgtgggccgagggcgaggcccatgggccggcccggcacggcccgaaattcaaacaatacgggccttttcgggcttgggccggaccgggccgggcggcccgaatgtacacctataggcttgggcgccaaccaaccaaccaagtcgccgccctccttcactgcgagctgcagaggcctaccgttccttcttctacctgctctgctctgcttcggctttcggcttctcgcttcatcacccatcaatccaccgctcttctcccatctcttggctcttgcttgcgcactcgtccaaacggtaaaacagcaagcgctaactgatccaaaacatcaaaagcgccgcgcaggcagaagcagcagcaggtaaagaaccggaagccaaccaggagcgcattcccactcatcaaccagcagagctcagatataagctcaccagcactaccccttcccatcctctcccactccctcctccctccccctcgtccagtccacacccattgggcgagaagccgagaaggacagggagggagcggaagctagccaggccgtcccgtccagagccgctatgtccggcggcgcgcccctcctggccctgctgctgctggcggcggcggccatgatcgccccgtcgccggccaatgccgccgtgtcgtacgaccacagggccgtggtcatcaacgggcagcgccgcatcctcatctcggggtccatccactacccgcgcagcacgccggagatgtggccgggcctgctgcagaaggccaaggacggcgggctggacgtggtccagacgtacgtgttctggaacgggcacgagccggtgcgtgggcagtactacttcggcgaccgctacgacctcgtccgcttcgtcaagctcgccaagcaggccggcctctacgtccacctccgcatcgggccctacgtctgcgccgagtggaacttcgggtgggtcttcctcctcagtttctctcctctctcttgctgaattggggatgaaccatatgatggatatgatcatgccatgcatggttcctcgatcccgtcccgcagcggcttccccgtgtggctcaagtacgtccccggcatcagcttccgcaccgacaacggccccttcaaggcggcgatgcaggcgttcgtggagaagatcgtgtccatgatgaagtcggaggggctcttcgagtggcagggcgggcccatcatcctggcgcaggtggagaacgagtacgggcccatggagtccgtcatgggcgccggcgccaagccctacgccaactgggcagccaagatggccgtcgccaccggcgccggcgtgccctgggtcatgtgcaagcaggacgacgccccggaccccgtggtaatttctgtttttattttttttaaaactttacgactccagcaatagtccgttcccgccgtggttcggttcatatactattac

SEQ ID NO: 118777 - DNA, 719 bp, Zea Mays
agtttttataaacgggctttagctagaggaggctagcttcttggtttttaagaaactgagaatccagtttctacaaactaataaactagtatgtttggaaccacctcagtttttataaaccagtttcttaaaaactggatgcttccaaacaggcccttagtttatttgttttgtttgtttactgtcggttgagttctagtcaagagcatacttaaattccattccgatccatttctgtaccagctagaatgcctcgttccgttgcttagcccagtacacaacaccaaatcttgtaccagccaaaattccagccaatactgtgcatatcaggctatccaggctacctcagccaaaatgtaatgtctcatggattctggtaccaaagctcttctggcgagttaggcttgaaatttaataaaagcttcctttatcaaaaaatggctctcccttcctgcttggctgccccagctgcctggtgcatctccttcggtagcagctccgaagtcaataatcactcacatcgtaggccatgtcattgtcctttctccctcgctaattccgtcatggggcctgctacctgcagtcctgcatggatgcagcacttgcatgcctgcagcagtgctgggtttttgttttgttgatgaagctttactagtcttgttcctcactaccattttgctggtcctaaatctgtcagttatcacctccatggctccatt

SEQ ID NO: 118778 - DNA, 1197 bp, Zea Mays
ccctcatccctgtcgagtactccacgccaccgagacgtttcgtcgtcgcctagacattccacgccgccaccgagtactccatcttccctctcagttacgagttcccatctttcgagtactcgccgccgccgctgttttgcccttttccacgccgtcgctgctgcggcagaaaaggatgcaccgccagaaatggagtccccccagaactggatgaccaagctcttgattggccctcgccggaaatggagtccccgccaggcgcaaccaaccttatccctctcaacgagatagttgtcgacatcaatggaacatttgtgccttcactgagtgctcccgcgccaaccaacacaggcttctccctcaccattgatgaggtagacaacacctggttggaggcaccaccagcagctgaagcacccccttctctcgttactccccaggaacacggtcacttggtgataaaacgcagtttagattgtctgtctcatctcacgaaaaatgatttcgagggtatttcaccggatctccgatgagaggaagaaggacctcaacatgtaccaagtgagaaagtgatgtacctcaaacttggattagctgctaaggatgaacgcgaaaacaaagtagagaggatgcttgcaattatacaggtcatgcaaatattcgaaatgagttggaagatgatggttcagccgccttagattgtgttgattttctgccccacgagactagagtgttttatgactctaaccatccagtgatggaggttggcagcctatacgcatcgatgactgaattcaggcttgcaatgtggcaatatgccatagaaaaagaatttgagttaggcattgaggccagtactccgaagaaatacagagggtattgtcgaggtggcgactgtccatggagcatacatgcaagaattgagagggatggttcaccaaccataatcgtatgtttttatttgttcaccaaccatggagcatacatgcaagaattgagagcttgtatgaaaaaactaactccgaagaaaaagaagtaagggatgtttgtaatctgtccccgcctactactatggatcaggtgtaatgtgtttctgtgtaatgtgtaaatggaactcagtctatggaattcaaaatgtgtctgtgtaattggaacttgttttcagttcagtttgaatttcacaatgtgtctgtgtgt

SEQ ID NO: 118779 - DNA, 1193 bp, Zea Mays
agtccaccccagatggccctcaaagccgccgtctccgtcaccccgttgctgccgtcgcctcccctccgccgtctcctgctctccccctctcctagctccgcggcggctcgtaggatcgcgagggtttccgcggcgatggcgacgacagaggtgcacccagccgtggtggtgggcggcggccgcgtaggccaggcgctcgtgtccatgggcccgccgggaggtgacgtcctcgtgggccgcggagagaaggtacccgacgatgcgcctggaccgatactggtgtgcacgcgcaacgacgacctcgacgccgtgctcgaggccacccccaagtcgcgctggcgcgatttggtgttcttccagaatggaatgctggatccatggtttaagatcaagggcctagtgggtgcaaaccaggtgttggcctacttcgctgtatcaaaggttggagagccaccagtcgatgggattactgataccaacccagaggggttgactgctgcatttggcagctgggctcctgcagtggctgcccgcctgcaaaatggtggacttacctgcaaggtgcttgaaaaggaagcctttcagaagcagatgctagagaagttgatatggatttcagctttcatgcttgttggtgctcggcatccaggggctactgttggtgtggtggaaaagaattaccgatctgaggttgcgagcctgatagctgaattagcatcggctgcggctgcagaggagcagctcacattcgccgaaggcatggaggatcggctctgtgcttactccagggctgtggcacacttccctacagctgtgaaagagttcaagtggaggaatggctggttttactccctcaccgagaaggcgcttgcagcaggaaagccagatccttgcccactacacacagcttggctcaaggagattagggtcatataaattgttttcatgtacatgagcttcgttagaagcatgaaacagttgcatgttgcctatatagagaaaattgcttttgccacgttaaccttttggtatcgtgtgtcaaaacaaaatgcctgaaaggtttgctgccatccgtgtcgaaaggtcgaatcaaactgggactacacatgtattaaaccacatcatagaggccatgtaagagtatctccatgtaacacctcgttcaatctcggaccggcgatatttacttctgg

SEQ ID NO: 118780 - DNA, 2961 bp, Zea Mays
cgggctcgaagagacggaggcgagggtagacgacggaggcgaggaggacgacgaggcggaggaggggaagcccatgccggccgccggttcccgccgattcactcgcgtcttcatgcccaaggcccccaagccgccgcaatcccaggaccaggccgaccgcgccacccgggtccttcgctccggtaagcgcctagccgccgacaggatccgctgggacgccaaggaggccgcagcctttcacgtcgacatcaaccacggccacgtccagaagcgccaaaaagaggattttcccaaaccgggattgccacctctgacgaagtccttcggtatcgtgtacagaagaaaacggcgccgccggaggcaccccaccgctgaggttgtccccgaggacgaggacggcatcaggaggtttgggatagtatacaccaggaagaagggcaagcgatccaaggtcagccctctcctgctcccgcaagagccagaggccccctgtgacctcgccgctgcgattccatgctcctcctcccgggagtttgcttcacgaactggcttcttggatgcccatttctcggccctggtagatggtgtctccactcactctggggttcagacgctcgttgtccttgttgatacgtcttgctctgggagctctcaccggctccttggatttcttctacccgtgctgtggtggatgcgccacagtaggcagcggggaaagttccagaaccttgccactttcattttgtctgctggtgtggcggttgcgtttgcatcccacggggtgcactttgtcaagctccagagtgcctctgcattgttacataggcctcttgcgcattgtgggtggtgtgcgcttcatggttccacgaaatctgaaccacttttgtcagtcgatttctcagcacttccttcatacttttggagcttgcattatgccgtagctcttgattcgatgtatctgccacctatgattcggcacagctggctgctggttgggggatctgaagaaatctatcctcacactcctttgtatgtggattctggggctcagagcagtggttttgccactacgaacatggacagcaatgaaccttgcagagtggttccaaactacatgccccttgaacagggtgctggtctagtggttcatggtctgaggctaaagaagcatcaaaggcggaggagaactatgaggcatccccaaaattggcggtgtcttatagcaagattaccttacaatggaattgggatgaagcagagcacgtctgccatgcaaacaggagtaaagctgcggtcaagcaggcaagaatctcctgtggagcctgtccaacctaaagcagcattaggaatttctcttgatttgcttgaaaacatggacgaaagtgatgtttcaactcccatgggatcaactaggagaaagagatctttgaagagccctgttgagagaatgaatgaaaagctggccttggctgaggtgagacaggacatagattctgttcacagcaaagcaaaccttttagtttttcaagctgataggtgctggagggaggaaggtgccgaagttatgctagaactatcagaaaccaataagtggtgtatagttgtgaagatacaaggtgttactaggtacttgcttaaaccttcagatatgaggtcatatgtcattaatcgtcatactcaagcctacatgtggacagttgatgatgcatggaagcttgagttcactgataggtgggactggctgttattcaaagagttgcatgttgtgggctgtgagcgtaattctcagggaaaggcaatcccaattcctggggtacatgaagtttctggtgagatggaagggattgttacagatcctttcttacgccctgtgccagactatatcaggatggtggatgatgaagttgggcgagctctctcaagggattctatttatgacatggactcagaagatgaacaatggctcattcagttgaaccattcagattctgatccaaacagctctcaaaggaatcatatctcttacgaagactttgaagtgttaataagcatatttgaaaaggatgcctacaacaatccccaagggaaaaatgatttgagcgagcttctttccagatatcctgctttactaaaggatgataacgtgcatgctgtgtatgggtattggacgagtaagaggtccaagagagctgcaccattgctaagggtatttcagggcgcacccataaggcgaggacatctaccacaaaagtctgccatgaagcgaaagagatctttcaagagacaaaaaagccgagctggccgtggaaagcatgaagctttattgcaagacaatgctgaagatgaggcagctttgcagagagttgcccaagctgatcgtgcagcaaaacgggctctagaaacagctattcaactgcgcaacagagcccagtctctcatgacaaacgcagagctcgcagcatacaaatccatcatggctctcaggatcgctgaggctgctaggatatctgactcttcccgagatattgtttgtacaatcctcgactaaagatggatatgggctgatcgatttgtgtggagggcatggggaatactctttttttttctttggttgcatcattgcccatgatgttggcttttcgacaagctgtggggctattttttcgccctcccctcgggttgtcaactttgtcaagccaattttgaggtggaatgcttgaactgaaaactgtaattccttgtataaattaaagtagctagctaggttctgtatcttatgggatctgatatgtagaaatgatgaaaggaaaaggtaaaaaaaatgcatgagatgaagcgaaatcaagcatctgtttgcatcctttttgtgtgtgtgtgtgtgtctatatatatatatatatatatatatatatatatatatatatatataagcaaaataaagcttatatttgtattggataa

SEQ ID NO: 118781 - DNA, 1709 bp, Zea Mays
tgcagttcggatttccgtccatttcccaggttctcaccggttcctcaaaccctaaaacctccaaaccccagcaatggcggattccccttcgttccgtcgctacccgctcgcctcctccgtcgacctcgtccgctggctcccttcctcctccatctccccttccggtcgcctcctcgccgccgccgtccacgatcccacctccggctccttcgcctccagcatccgccttctccccctctccgaccctgtctcccggctcgcctccgtcccgctcccgtcccgcgccacggcactccgctgctccaatgctgcgctcgccgctgccacctcctcgggctcgctccacttcgttccctcctcattcgactcggacgccgcagtgtccgtccccggcggcgcgggcttccatgtcggtcctgtccggggcctcgactgcggcggggaggagtgggtcacagcgggagaagacggaagagtgcatgtggtcggcggtgtagctgacgggagagtggtaacgaggagggtgtgggacgggaaaggaatgtcagggtatgaagctgccagatgggcttcgccggtggagtttgccacgggtggagccggatgtggtgttcagtggtgggatcggaggaaaggggacgccatcgtggcgcagtgtaacggcatctggggccgtggcatagttactggcatggtgcattccattgacattcatccatcaagaaagcatatctgcgtggtgggaggttcatcggggaccgtatttgcctgggatctgcggcagccacaggagccgataccaatctctgttctaggtcttaatgaaacagctgagcctgtgtgtgaaagtgaggtttgggaggttcttttcgacacttacactaagtcttccgatatcatctcatctgcatctgcaagaatattgccagtgatgatgtgttcagaggatgggatccttgcagtcgtcgaacaagataagagaccccttgaattgcttgctgaatcttgtgccatcaactccttcgacatagatcctcagaacccctctgatgttgtttgcgcattagaatgggaatcggtcggtgtcctaactcgtggtagagatgcaatgtcagaagaatgaaaattttcatcacccagggatctcaatcagatttttttccaaggtggatgaaactgctatcagaaagaatcttctgaattctgagggcttccatattcagtcaccattctaatgcccgtgaccatgggcaacggtagaaggaataaagcgtgcatgacgaatgccttttcctgtctttgcatactaaccaacactgtcttgtaccgttggaagttttactctgttgtcatgggtagttgcagattgcagaaaccttttctgggctagcttcaagatgtgtaattgctcttggatgccaactgctgacagtttgaaggagtggtcacaaacaattcaatccttttagctgggggctgatgaactgaagctataattagtttcataatgtttgcttgtggtattaaattggctcctgaacaatatggactccgatacatattttatttatctggcttaccatttagattccattagatttttaactctagagtctagactaccttaacttgtttgagacaagttgggataaaaggttttgttattaatatgtttttttataacctcagataaagatggtttttatatg

SEQ ID NO: 118782 - DNA, 1660 bp, Zea Mays
gttcggatttccgtccatttcccaggttctcaccggttcctcaaaccctaaaacctccaaaccccagcaatggcggattccccttcgttccgtcgctacccgctcgcctcctccgtcgacctcgtccgctggctcccttcctcctccatctccccttccggtcgcctcctcgccgccgccgtccacgatcccacctccggctccttcgcctccagcatccgccttctccccctctccgaccctgtctcccggctcgcctccgtcccgctcccgtcccgcgccacggcactccgctgctccaatgctgcgctcgccgctgccacctcctcgggctcgctccacttcgttccctcctcattcgactcggacgccgcagtgtccgtccccggcggcgcgggcttccatgtcggtcctgtccggggcctcgactgcggcggggaggagtgggtcacagcgggagaagacggaagagtgcatgtggtcggcggtgtagctgacgggagagtggtaacgaggagggtgtgggacgggaaaggaatgtcagggtatgaagctgccagatgggcttcgccggtggagtttgccacgggtggagccggatgtggtgttcagtggtgggatcggaggaaaggggacgccatcgtggcgcagtgtaacggcatctggtgggaggttcatcggggaccgtatttgcctgggatctgcggcagccacaggagccgataccaatctctgttctaggtcttaatgaaacagctgagcctgtgtgtgaaagtgaggtttgggaggttcttttcgacacttacactaagtcttccgatatcatctcatctgcatctgcaagaatattgccagtgatgatgtgttcagaggatgggatccttgcagtcgtcgaacaagataagagaccccttgaattgcttgctgaatcttgtgccatcaactccttcgacatagatcctcagaacccctctgatgttgtttgcgcattagaatgggaatcggtcggtgtcctaactcgtggtagagatgcaatgtcagaagaatgaaaattttcatcacccagggatctcaatcagatttttttccaaggtggatgaaactgctatcagaaagaatcttctgaattctgagggcttccatattcagtcaccattctaatgcccgtgaccatgggcaacggtagaaggaataaagcgtgcatgacgaatgccttttcctgtctttgcatactaaccaacactgtcttgtaccgttggaagttttactctgttgtcatgggtagttgcagattgcagaaaccttttctgggctagcttcaagatgtgtaattgctcttggatgccaactgctgacagtttgaaggagtggtcacaaacaattcaatccttttagctgggggctgatgaactgaagctataattagtttcataatgtttgcttgtggtattaaattggctcctgaacaatatggactccgatacatattttatttatctggcttaccatttagattccattagatttttaactctagagtctagactaccttaacttgtttgagacaagttgggataaaaggttttgttattaatatgtttttttataacctcagataaagatggtttttatatgaaaattgtaacctttgatgagattt

SEQ ID NO: 118783 - DNA, 1497 bp, Zea Mays
ctattcataagctctggtgcagagttcggtttattgtgcatctctatcaattttggtttggattgtgcactaccaaagatgctttcagtactgtttggtgcatgcctgttaatatcaaaaatactttctggatggtttgatgcatgtctgttactgtctttgttctgaactgattaatgggactgtcatttaattttattgtcgttgtgcaatagtagtcgctgcttggttcattccactctcaccgactatgcttttatgtgagtttgttagatattgatgacatctgtaaattatgattaaaagaaaatctggtgtatgaaaaacatgcttattctccgaaactcatgtcatgcgttagaggtttccggtccatacacagaaagtttgtttacattgatccattgaggcgaaatttatagatttgaatttgttttcaactggtggctgaaccatgtattctacaagatcgaagtagttcggtattttggttgaaaatcccagctctggtggcctcctgtaactgcgctctttaaagtaagctggcaattatgctgctaacagatgagataaaatacaaaataatgaacttcaaacattcttgttgccatatgtttttcattgtatatgttatgtcaatcgctgttatcttgctgacaatgggtgaacttacaagtacaggggccgtggcatagttactggcatggtgcattccattgacattcatccatcaagaaagcatatctgcgtggtgggaggttcatcggggaccgtatttgcctgggatctgcggcagccacaggagccgataccaatctctgttctaggtcttaatgaaacagctgagcctgtgtgtgaaagtgaggtttgggaggttcttttcgacacttacactaagtcttccgatatcatctcatctgcatctgcaagaatattgccagtgatgatgtgttcagaggatgggatccttgcagtcgtcgaacaagataagagaccccttgaattgcttgctgaatcttgtgccatcaactccttcgacatagatcctcagaacccctctgatgttgtttgcgcattagaatgggaatcggtcggtgtcctaactcgtggtagagatgcaatgtcagaagaatgaaaattttcatcacccagggatctcaatcagatttttttccaaggtggatgaaactgctatcagaaagaatcttctgaattctgagggcttccatattcagtcaccattctaatgcccgtgaccatgggcaacggtagaaggaataaagcgtgcatgacgaatgccttttcctgtctttgcatactaaccaacactgtcttgtaccgttggaagttttactctgttgtcatgggtagttgcagattgcagaaaccttttctgggctagcttcaagatgtgtaattgctcttggatgccaactgctgacagtttgaaggagtggtcacaaacaattcaatccttttagctgggggctgatgaac

SEQ ID NO: 118784 - DNA, 1496 bp, Zea Mays
ctcacattctcttgtctcttgcacatcccccgcttccttcttggtcgtttctccccttctgatccgtgctagccagcttgcgttgtggctgcttgtcgccagatctacctatccaccgtaccacagtcgtccacagcgcgcgcttacgatggcggtcgccgccgctcgccttcttcttcgcgtcgtcgtcctcgcgctcctcgcagccgcgcagcaggtcgtcgggaagagcgccgtgctgtctctgcgggagttggatggacgacgacggagtgccgcgacgacggatacccggagcagccgctactacgtcgacgcaatgcttgctgaaacgctaggtactgtgcagttcatgacgtacgtacgtgctggtgctaggtttcctcagctccgatccgtgtgacagaaacttttgcatgcatttggaattcgcaatcgatgtgttcatgtttcacaggcacagtatattgcccacgatagtgaagctcacatgcagttgttgtcatatgcatgctcacttccccatgtctgccatcttcttcaggggagcacaagaaagctggggcagcaacaagcgtgctagagctcaagcgccactccctcactgccatccctgaagaccccgtcgcccgcgaccgctacctccgccgtctcctcgcagccgacgagtcgcgcgccaactcattccagccccgccgtaacaaggacagggcatcagcgtccacgcagtccgcctcggcagaggtcccgctgacctcgggcatccggctccagacgctcaactacgtcaccaccatctctctcggcggcagctccggctcgcccgccgcgaacctcaccgtcatcgtggacacggggagcgacctcacctgggtgcagtgcaagccctgcagcgcgtgctacgctcagcgcgaccctctcttcgaccccgcgggctccgccacctacgccgcggtccggtgcaacgcctccgcgtgcgcggactccctcagggccgccaccggcacgccgggatcctgcggttcgacgggggcaggcagcgagaagtgctactacgcgttagcctacggcgacgggtcgttcagccgcggcgtgctggccacggacacggtcgcgctcggcggcgccagcctgggcgggttcgtgttcgggtgcgggctcagcaaccgcggcctgttcggcggcacggcggggctcatggggctcggccgcaccgagctctcgctggtgtcccagaccgcgtcccggtacggcggcgtgttctcctactgcctgccggcggccacctccggcgacgcctcaggctcgctctccctcggcggcggggacgacgcggcgtcgtcctaccgcaacacgacgcccgtggcgtacacccgcatgatcgccgacccggcgcagccgcccttctacttcctcaacgtcaccggcgcggccgtcggcggcaccgccctcgcggcacaggggctgggcgccagcaacgtgctcatcgactccgg

SEQ ID NO: 118785 - DNA, 1801 bp, Zea Mays
ctcacattctcttgtctcttgcacatcccccgcttccttcttggtcgtttctccccttctgatccgtgctagccagcttgcgttgtggctgcttgtcgccagatctacctatccaccgtaccacagtcgtccacagcgcgcgcttacgatggcggtcgccgccgctcgccttcttcttcgcgtcgtcgtcctcgcgctcctcgcagccgcgcagcaggtcgtcgggaagagcgccgtgctgtctctgcgggagttggatggacgacgacggagtgccgcgacgacggatacccggagcagccgctactacgtcgacgcaatgcttgctgaaacgctaggggagcacaagaaagctggggcagcaacaagcgtgctagagctcaagcgccactccctcactgccatccctgaagaccccgtcgcccgcgaccgctacctccgccgtctcctcgcagccgacgagtcgcgcgccaactcattccagccccgccgtaacaaggacagggcatcagcgtccacgcagtccgcctcggcagaggtcccgctgacctcgggcatccggctccagacgctcaactacgtcaccaccatctctctcggcggcagctccggctcgcccgccgcgaacctcaccgtcatcgtggacacggggagcgacctcacctgggtgcagtgcaagccctgcagcgcgtgctacgctcagcgcgaccctctcttcgaccccgcgggctccgccacctacgccgcggtccggtgcaacgcctccgcgtgcgcggactccctcagggccgccaccggcacgccgggatcctgcggttcgacgggggcaggcagcgagaagtgctactacgcgttagcctacggcgacgggtcgttcagccgcggcgtgctggccacggacacggtcgcgctcggcggcgccagcctgggcgggttcgtgttcgggtgcgggctcagcaaccgcggcctgttcggcggcacggcggggctcatggggctcggccgcaccgagctctcgctggtgtcccagaccgcgtcccggtacggcggcgtgttctcctactgcctgccggcggccacctccggcgacgcctcaggctcgctctccctcggcggcggggacgacgcggcgtcgtcctaccgcaacacgacgcccgtggcgtacacccgcatgatcgccgacccggcgcagccgcccttctacttcctcaacgtcaccggcgcggccgtcggcggcaccgccctcgcggcacaggggctgggcgccagcaacgtgctcatcgactccggcacggtgatcacgcgcctggcgccgtccgtgtaccgcgccgtgcgcgccgagttcatgcgccagttcggcgccgcgggctacccggccgccccggggttctcgatcctggacacgtgctacgacctgacggggcacgacgaggtgaaggtgccgctgctgacgctgcggctggagggcggggcggacgtcaccgtggacgcggctgggatgctgttcgtcgtgaggaaggacggctcgcaggtgtgcctggccatggcgagtctgtcgtacgaggacgagacgcctatcattggcaactaccagcagaagaacaagagggtggtgtatgacacgctggggtccaggctaggcttcgctgacgaggactgcaactatgtatagagacttgacagggaagaggatgtggaatatcggatttctagttatatgttgcatgaactatgcccgcctaactactgaatgtagtttgatgatcaaatcccatagttttaatatgactaaaatctttac

SEQ ID NO: 118786 - DNA, 312 bp, Zea Mays
gctgcggcgcgaggccagaagatgcgcgagcagagggtcgtgagagtcgcgcggggtatgcagccgcggcggcgcgccgggaggaagaggaggagcctgctgctggcggcgggcggcggcggcaggtgcgccgcaatggcggcggccaggaggatggtgagggcgaggctgcgggtgctgaggagcctcgtgccgggagcggaggccatgcgtggcctctccctgctctccgagacgctggactacgtcgcgtgcctcaagacgcaggtggagctcatgcaatgcctgtgcaaaggaccctgttccctgctg

SEQ ID NO: 118787 - DNA, 1474 bp, Zea Mays
ccggagcagggagagcattcgccatttggcagagacgagacggacacctctgcggcgccgcctcgggcctcggcagacgacagcaatcacagcagcggctctacaagaaagaagagaaactgcagaaaccgcgagggcaggcgcggcagcgggcaggcagtccatccccatgtgtttgtgactttgtgctcgtcctcatacccccctccagctcccgtctcctcgtgctctccactgctgcatgcgcctcttgtcctgtccccctccccaccttgttcctcccatcccgcgccgtctctgcacgaagcagagcgccggtccaccgacaaggacagctacaactacgacgcgcaggcagagccatcgctcatctggggctgccctcggttactcctcccctccgccgctgcccctgccttgtccacagctgttgttaattccttcatgagttggcgtcggcgccagcggggcggaggggaaggaggcggggcttcagcttccccggcgccggccgccgcctgaagatcccttcttctcctgtagtcctgtcgtcgggcgggcgaggtccaagcatcatggggctcttaggtatgatgggcgactcttttggttgctcggcgactggggagcgacttgtgtctgctgcaagagatggagacatccaggaggccagggctctcttagaactcaatccccgccttgctcggtactccacgttcgggatccggaattcgcctctccattactcggcagcaaagggccaccatgagattgtctccctcctaatcgagtccggtgttaatattaaccttagaaattgcagagggcagactgctctgatgcaagcttgtctatatggtcactggaaagttgtacagattctagttctttttaaagctaatattcacaggagagattgttttagcggcgcgaccgctattcattttgccgcgctaaaaggtcatactcgctgcattcggcttcttgtggctgattatgtgcctagcttgtcagagttttggaccattatgcgtggaaagtccacagatgaaatgaaaaagggtgcctttgatgccgcgtctctccagagactagttaatggaaagtctgatggtggtgtcacccccgcttcacttggcagcccttcatggacatgctgagagtgtacagttgctgctagaccttggagcctctgtctctgaggtgactgtcaatgatggttcaacaattgacctcattggttcggggagcacacccctccattacgcggcgtgtggtggaagtgctgtttgctgccaacttctcattgcagcaggagcaaacatgggagctcaaaatgttaacgggttgactcctttattggtggctcgttcgtggcacaagactagcatcgaaggtattctaagcaagcaaccagaaaaccgaatgcgtattcttccttcaccatacctttgcttaccactgatgagcattg

SEQ ID NO: 118788 - DNA, 2071 bp, Zea Mays
cagcgggcaggcagtccatccccatgtgtttgtgactttgtgctcgtcctcatacccccctccagctcccgtctcctcgtgctctccactgctgcatgcgcctcttgtcctgtccccctccccaccttgttcctcccatcccgcgccgtctctgcacgaagcagagcgccggtccaccgacaaggacagctacaactacgacgcgcaggcagagccatcgctcatctggggctgccctcggttactcctcccctccgccgctgcccctgccttgtccacagctgttgttaattccttcatgagttggcgtcggcgccagcggggcggaggggaaggaggcggggcttcagcttccccggcgccggccgccgcctgaagatcccttcttctcctgtagtcctgtcgtcgggcgggcgaggtatgatgggcgactcttttggttgctcggcgactggggagcgacttgtgtctgctgcaagagatggagacatccaggaggccagggctctcttagaactcaatccccgccttgctcggtactccacgttcgggatccggaattcgcctctccattactcggcagcaaagggccaccatgagattgtctccctcctaatcgagtccggtgttaatattaaccttagaaattgcagagggcagactgctctgatgcaagcttgtctatatggtcactggaaagttgtacagattctagttctttttaaagctaatattcacaggagagattgttttagcggcgcgaccgctattcattttgccgcgctaaaaggtcatactcgctgcattcggcttcttgtggctgattatgtgcctagcttgtcagagttttggaccattatgcgtggaaagtccacagatgaaatgaaaaagggtgcctttgatgccgcgtctctccagagactagttaatggaaagtctgatggtggtgtcacccccgcttcacttggcagcccttcatggacatgctgagagtgtacagttgctgctagaccttggagcctctgtctctgaggtgactgtcaatgatggttcaacaattgacctcattggttcggggagcacacccctccattacgcggcgtgtggtggaagtgctgtttgctgccaacttctcattgcagcaggagcaaacatgggagctcaaaatgttaacgggttgactcctttattggtggctcgttcgtggcacaagactagcatcgaaggtattctaagcaagcaaccagaaaaccgaatgcgtattcttccttcaccatacctttgcttaccactgatgagcattgtcaaaattgccagggaatgtggatggaggaaaacttccgcctcatccacttgtcaggatccatgtgtcatatgtttggaggtggaatgcactgtagctgcagaaggttgcggccatgagttctgcaccaaatgtgcactctacttgtgctccaccactagcagctcaacatccacccgtggagttcctggctccatatcatgccctctgtgtcgccatgccatcgtctccttcatgaggctcaccagcactaccccgataaaggagcttccatggacaagcgcgtcactagctctatgtgcagcgggctcaaacactggccgccctgaacatggcgggtccttgcatcgaaggcctgacctgcgtcgactgcgctccatctcagttcagctgggatgctcttcttttagatccattggctctgggaagctgtcgtccatgaagctgaactgcacaggagctgaagaggcggtgccttgcctcgtcagctgcctcaggcccgatgtgcagcgttcatcgtcgtacaggggaagaattaggagatattcagagttttgaaaggatggttttgtggcgtccttcctgcgagtttttagggtttgggaatttaaacctgtgtcgtcatgttcctcttcgtttgtttccctgttgtttaatatgcatgcagtcctcgttgtgaagatctatttgtgtacatggcccgtttgtcttcattacttttacttatatgtgaattatataccatctctgttttgcaattaccgacaa

SEQ ID NO: 118789 - DNA, 1223 bp, Zea Mays
gcggcttaccatttcttggatcagttaggggaggatagactcttcatttggattcatgtccttcccggtcaatttgggtcagtttgtttaccatagaaaggtggcatcttttggcttctgctctttggtctatgtggatccagtgccaaattggaccgaccgaagctgattcttgctggcagaaagtgcccaactgtgctaccatttatttccaatgaatccttggctatctactcaaataaacaccgagtccgtgaggccatttcgtctctgcttatgtaggattcttatgttcatgtggacatgtggcgcattgcctggcctttcgcaaatcagtttcttctggagtgcccaagtggttcttctcttcccatatcgatataaggctaacaccgtgtgatgcctgcctcaatacatcttggccccaagaacactctgattctgtgcagttccatacggtgctcaacaagtgatatccagtatttggagggtctttgcaagaagcgttgctctgttgctcttgctcatattttgtgttctgataggtccaagcatcatggggctcttaggtatgatgggcgactcttttggttgctcggcgactggggagcgacttgtgtctgctgcaagagatggagacatccaggaggccagggctctcttagaactcaatccccgccttgctcggtactccacgttcgggatccggaattcgcctctccattactcggcagcaaagggccaccatgagattgtctccctcctaatcgagtccggtgttaatattaaccttagaaattgcagagggcagactgctctgatgcaagcttgtctatatggtcactggaaagttgtacagattctagttctttttaaagctaatattcacaggagagattgttttagcggcgcgaccgctattcattttgccgcgctaaaaggtcatactcgctgcattcggcttcttgtggctgattatgtgcctagcttgtcagagttttggaccattatgcgtggaaagtccacagatgaaatgaaaaagggtgcctttgatgccgcgtctctccagagactagttaatggaaagtctgatggtggtgtcacccccgcttcacttggcagcccttcatggacatgctgagagtgtacagttgctgctagaccttggagcctctgtctctgaggtgactgtcaatgatggttcaacaattgacctcattggt

SEQ ID NO: 118790 - DNA, 1668 bp, Zea Mays
ccgagtccgtgaggccatttcgtctctgcttatgtaggattcttatgttcatgtggacatgtggcgcattgcctggcctttcgcaaatcagtttcttctggagtgcccaagtggttcttctcttcccatatcgatataaggctaacaccgtgtgatgcctgcctcaatacatcttggccccaagaacactctgattctgtgcagttccatacggtccaagcatcatggggctcttaggtatgatgggcgactcttttggttgctcggcgactggggagcgacttgtgtctgctgcaagagatggagacatccaggaggccagggctctcttagaactcaatccccgccttgctcggtactccacgttcgggatccggaattcgcctctccattactcggcagcaaagggccaccatgagattgtctccctcctaatcgagtccggtgttaatattaaccttagaaattgcagagggcagactgctctgatgcaagcttgtctatatggtcactggaaagttgtacagattctagttctttttaaagctaatattcacaggagagattgttttagcggcgcgaccgctattcattttgccgcgctaaaaggtcatactcgctgcattcggcttcttgtggctgattatgtgcctagcttgtcagagttttggaccattatgcgtggaaagtccacagatgaaatgaaaaagggtgcctttgatgccgcgtctctccagagactagttaatggaaagtctgatggtggtgtcacccccgcttcacttggcagcccttcatggacatgctgagagtgtacagttgctgctagaccttggagcctctgtctctgaggtgactgtcaatgatggttcaacaattgacctcattgaatttaagcaatttgccaacccccatctactgatatctgctaaacagcttctcattgcagcaggagcaaacatgggagctcaaaatgttaacgggttgactcctttattggtggctcgttcgtggcacaagactagcatcgaaggtattctaagcaagcaaccagaaaaccgaatgcgtattcttccttcaccatacctttgcttaccactgatgagcattgtcaaaattgccagggaatgtggatggaggaaaacttccgcctcatccacttgtcaggatccatgtgtcatatgtttggaggtggaatgcactgtagctgcagaaggttgcggccatgagttctgcaccaaatgtgcactctacttgtgctccaccactagcagctcaacatccacccgtggagttcctggctccatatcatgccctctgtgtcgccatgccatcgtctccttcatgaggctcaccagcactaccccgataaaggagcttccatggacaagcgcgtcactagctctatgtgcagcgggctcaaacactggccgccctgaacatggcgggtccttgcatcgaaggcctgacctgcgtcgactgcgctccatctcagttcagctgggatgctcttcttttagatccattggctctgggaagctgtcgtccatgaagctgaactgcacaggagctgaagaggcggtgccttgcctcgtcagctgcctcaggcccgatgtgcagcgttcatcgtcgtacaggggaagaattaggagatattcagagttttga

SEQ ID NO: 118791 - DNA, 1465 bp, Zea Mays
ccaagcatcatggggctcttaggtatgatgggcgactcttttggttgctcggcgactggggagcgacttgtgtctgctgcaagagatggagacatccaggaggccagggctctcttagaactcaatccccgccttgctcggtactccacgttcgggatccggaattcgcctctccattactcggcagcaaagggccaccatgagattgtctccctcctaatcgagtccggtgttaatattaaccttagaaattgcagagggcagactgctctgatgcaagcttgtctatatggtcactggaaagttgtacagattctagttctttttaaagctaatattcacaggagagattgttttagcggcgcgaccgctattcattttgccgcgctaaaaggtcatactcgctgcattcggcttcttgtggctgattatgtgcctagcttgtcagagttttggaccattatgcgtggaaagtccacagatgaaatgaaaaagggtgcctttgatgccgcgtctctccagagactagttaatggaaagtctgatggtggtgtcacccccgcttcacttggcagcccttcatggacatgctgagagtgtacagttgctgctagaccttggagcctctgtctctgaggtgactgtcaatgatggttcaacaattgacctcattggttcggggagcacacccctccattacgcggcgtgtggtggaagtgctgtttgctgccaacttctcattgcagcaggagcaaacatgggagctcaaaatgttaacgggttgactcctttattggtggctcgttcgtggcacaagactagcatcgaaggtattctaagcaagcaaccagaaaaccgaatgcgtattcttccttcaccatacctttgcttaccactgatgagcattgtcaaaattgccagggaatgtggatggaggaaaacttccgcctcatccacttgtcaggatccatgtgtcatatgtttggaggtggaatgcactgtagctgcagaaggttgcggccatgagttctgcaccaaatgtgcactctacttgtgctccaccactagcagctcaacatccacccgtggagttcctggctccatatcatgccctctgtgtcgccatgccatcgtctccttcatgaggctcaccagcactaccccgataaaggagcttccatggacaagcgcgtcactagctctatgtgcagcgggctcaaacactggccgccctgaacatggcgggtccttgcatcgaaggcctgacctgcgtcgactgcgctccatctcagttcagctgggatgctcttcttttagatccattggctctgggaagctgtcgtccatgaagctgaactgcacaggagctgaagaggcggtgccttgcctcgtcagctgcctcaggcccgatgtgcagcgttcatcgtcgtacaggggaagaattaggagatattcagagttttga

SEQ ID NO: 118792 - DNA, 1107 bp, Zea Mays
agtcctataaatactgggcgcggcgccgcgcagaccaccccacgaccaaattaaaccaataagctgcaaccgccagcgcacacgggggagatggggagagcaccctgctgcgacaaggcgacggtgaagaaggggccatggtcgccggaggaggacgcgatgctcaagagctacatcgaggagcatggcaccgggggcaactggattgcgctgccacacaagatagggctgaagaggtgcggcaagagctgccggctgaggtggctcaactacctgaggcccaacataaagcacggcgacttcaccccggaggaggacggcgtcatctgcagcctctacattagcatagggagcaggtggtccatcatcgccgcgcagctgccggggaggacggacaacgacgtgaagaactactggaacaccaagctgaagaagaggctcctggggcggcgcaaggaccaccgccaccaccaccacagcgcggccgatgcggcggccaccggcgagagcacgaacgacggtgagccggcggcggcgctgagcgcgtcggccatggagaggatccagctctgcatgcagctgcagtcgacccaccaccagcaccaccccttgcccctcatgtggcctggatgcaacgtcgtcagtgggagcggcgttgccagtactcagagcaacaacagcttcaacagcaacggcagcagcagcagcgtgacagtagccgaacaagggcagctgatgaacgaccagcagcacctcatgactgcgcagctggaggcgggtgctgctgctgctgccgccatagacaacggcctcgccgcctcgccgtcgagcgcggagaactccaacatcatcgtcagcatggaggccgagctccaagagctgctctacggcggtgctgctgatgacggcagccgaggagggaaggccgtggacggcggcggcggcgtagtgcagcaggtggatgttgcggagtggtggagctatgacgaccagcaggggaagtcgtcgtcgtcgccggtggcggtgggttgctgggacttcacccctgaacccaacacggcgttcctggactacgcgtcggtctacgacatctgatagcttggtcgg

SEQ ID NO: 118793 - DNA, 427 bp, Zea Mays
agctcgatccccacttcgccagctcgctccagacacaatctcgtcgccgttccgtgcgtcgtcaagtaatcccaagaatcaggtgaagacgaagctagcagcgcgatattccccaagccctcgacaattgtctggatctgaaaatcactaccgatctcacggattcgagttggctattgaaacggtacgttaattaatcgcgcgatgcggaagacaagccaagtcgaccccaagcgcgggctaacccgcaggatgatgcagatggataacccgatcaagtaccaagacaaaggctgcccgtcaggcgaacgtcgtctaacaacactaacctagtgttactcaggcaaaccccggtgcatttgccacctccttgtgtttttaaaatctttctcacttgcttgatgcattaggtgataggagttgattg

SEQ ID NO: 118794 - DNA, 1839 bp, Zea Mays
gttttggacggatttgttgaaacgattttcaacaggtaccccttggaaatggggtacttgactattctacaaggattatagtggatttggaacaaactatgttggagttttatcaataattttattctaaaaaaaagggttgggagtcgaatttatactgcagagtatcaaaattatactactgcctgcccaacaaaaaataaaaagcatatcctacatacctaactcctccaggttcatcgacctgctggccgggccgtccagcaccgtatgaaactacccaacccaagagtatacacccatccctagttggtaccaaccccgcttactcgaacacgcctcctgttcctattgctcagaccaaacggtcgtcgacctgctggccgggccgtccagcacagtacccgtccgggtcggagctgtcgatacctacagcagctggcacgttcgttacatgaacgaactatctatcgtagcacgctagcacgcatctgttcccgtctcctcagcctccgtctcaaactcgcccggtcatcccatctccaccaccacatccgtcctcttccgccgccgccgatggcccgcctcctcacacaaaccctcaccctagcccgtcccgccgcctcctcctcccccaccgccgcattcgcctccctccgttgcctcgctaccaaggtcgagatcgtcgagatcgacctcaccgaggaagacgctggctcctcggcccacggctcctccccctcgtccccatcgatcgaggtggttgggatccggcgcctggaggaggccatccacggcgtcatggtgcgccgcgccgctcccgattggctgcccttcgtgcctggagggtcctactgggtgcccccgctgcgcctcccgcacgaggtcaccgcgtttgtcggccggatcgcggcctcaggaggcgcctccggggtcgccaagttcatggacggtgtcgcggcccctgggggcgccggggccgttggcggcgcgttcgaagtcgtggaactcgacgacgacgagctcatggaggaggaggaggaggaggcgctttgcttctccaccacgcgcggctggccctcggcctctttcttcgtccaagggaaatctccggatacaaggaggaaatctaggaaaggtgcaattcaaactaatgatgaagaaagctgattcgtttgtgctatgttgcaagggaagggcgggcctagtacagcgatagagcctaccgtctataatcggaaggtcccgggttcgagccccagcctctgcatattatgcgggtaaggcttgacgcttaaagatacccttccccagaccccgcacagtgcgggaagcctacggcactgggctcctaaaaggaaacgcagtgcagagtttaatgactgccatgatcaatgtacatttggatgggaatgagccatttgctggtaaaccatggcacctgctactgttgatgttgcctcatccgacctggaagatatatctgtaaattcaggctgaagctcaggtggttattgtatcaacaagccctggcacaaaaggcttcgtttgtaacaaactaacaataaagcatcgattgacctgtttgctgaatgtgtgatacggtacttccaatactaggtcagcatcagtccagaagctgtaccctgaacaaagattctggatggcttcttgtgccagctaggaacaatgtaaaattgatgtaagcgtctgtgcgcactcctgatccatgtacaactaagttaaaattttaaactgttatagattgttgtatggatagctctcaattgctactgttctcccctcatgttttatgtttgattgtaaaaaaaacttaaa

SEQ ID NO: 118795 - DNA, 1686 bp, Zea Mays
gttttggacggatttgttgaaacgattttcaacaggtaccccttggaaatggggtacttgactattctacaaggattatagtggatttggaacaaactatgttggagttttatcaataattttattctaaaaaaaagggttgggagtcgaatttatactgcagagtatcaaaattatactactgcctgcccaacaaaaaataaaaagcatatcctacatacctaactcctccaggttcatcgacctgctggccgggccgtccagcaccgtatgaaactacccaacccaagagtatacacccatccctagttggtaccaaccccgcttactcgaacacgcctcctgttcctattgctcagaccaaacggtcgtcgacctgctggccgggccgtccagcacagtacccgtccgggtcggagctgtcgatacctacagcagctggcacgttcgttacatgaacgaactatctatcgtagcacgctagcacgcatctgttcccgtctcctcagcctccgtctcaaactcgcccggtcatcccatctccaccaccacatccgtcctcttccgccgccgccgatggcccgcctcctcacacaaaccctcaccctagcccgtcccgccgcctcctcctcccccaccgccgcattcgcctccctccgttgcctcgctaccaaggtcgagatcgtcgagatcgacctcaccgaggaagacgctggctcctcggcccacggctcctccccctcgtccccatcgatcgaggtggttgggatccggcgcctggaggaggccatccacggcgtcatggtgcgccgcgccgctcccgattggctgcccttcgtgcctggagggtcctactgggtgcccccgctgcgcctcccgcacgaggtcaccgcgtttgtcggccggatcgcggcctcaggaggcgcctccggggtcgccaagttcatggacggtgtcgcggcccctgggggcgccggggccgttggcggcgcgttcgaagtcgtggaactcgacgacgacgagctcatggaggaggaggaggaggaggcgctttgcttctccaccacgcgcggctggccctcggcctctttcttcgtccaagggaaatctccggatacaaggaggaaatctaggaaaggtgcaattcaaactaatgatgaagaaagctgattcgtttgtgctatgttgcaaggggctcctaaaaggaaacgcagtgcagagtttaatgactgccatgatcaatgtacatttggatgggaatgagccatttgctggtaaaccatggcacctgctactgttgatgttgcctcatccgacctggaagatatatctgtaaattcaggctgaagctcaggtggttattgtatcaacaagccctggcacaaaaggcttcgtttgtaacaaactaacaataaagcatcgattgacctgtttgctgaatgtgtgatacggtacttccaatactaggtcagcatcagtccagaagctgtaccctgaacaaagattctggatggcttcttgtgccagctaggaacaatgtaaaattgatgtaagcgtctgtgcgcactcctgatccatgtacaactaagttaaaattttaaactgttatagattgttgtatggatagctctcaattgctactgttctcccctcatgttttatgtttgattgtaaaaaaaacttaaa

SEQ ID NO: 118796 - DNA, 867 bp, Zea Mays
ggacaaacatcttgtcacacttggaaaatcgaaattatgcaaacagtgagattgtggtggacaaggccatggattgcaaaggtgcagttgtacttactggtgaggttgaggtctaccaccaacataatcttgttattgctgtctgagatgggctttgtagatttctcttatagttctttcacatgattcctataatcttgatggcacaattattcgttataaattgtcatgcaaattaactgggtacaagataaagaaactctatacataccaaatgttgactgattctgcagttagttattacctatatgtacttaacatttgttatctgcacaagaagaatcgtatttgatatcatgatgccccttcggccaggctcctaaaaggaaacgcagtgcagagtttaatgactgccatgatcaatgtacatttggatgggaatgagccatttgctggtaaaccatggcacctgctactgttgatgttgcctcatccgacctggaagatatatctgtaaattcaggctgaagctcaggtggttattgtatcaacaagccctggcacaaaaggcttcgtttgtaacaaactaacaataaagcatcgattgacctgtttgctgaatgtgtgatacggtacttccaatactaggtcagcatcagtccagaagctgtaccctgaacaaagattctggatggcttcttgtgccagctaggaacaatgtaaaattgatgtaagcgtctgtgcgcactcctgatccatgtacaactaagttaaaattttaaactgttatagattgttgtatggatagctctcaattgctactgttctcccctcatgttttatgtttgattgtaaaaaaaacttaaa

SEQ ID NO: 118797 - DNA, 135 bp, Zea Mays
tttaattttatttactttctgtgatcataattactgtattttaagtaggctaatcactgttcatgctatgggaaaataggaagtttaatttaaaattccgttatgttatggattcacgtagttaattgtttaccc

SEQ ID NO: 118798 - DNA, 2256 bp, Zea Mays
cgtttggttctctcgtctgttgtctccatagcctacacacacggtcgctcactttctctcgcctcctgtcccccccgcgtgcgcgcagcgctctctctctctccctcactctcttttgaggagtgaggacgactggggcgaacgtcgccgccgccgccctacatcaggtgcccaggtcgttgttcggcccttcgccagctctttttcgggcacttcgccggcgacgaacacccaccagttgctgatgcaaggctttcaaaagattaacagtctcaattgatgcaaaagcaacacaatcacactaaaggtttggattagacatttcagagcatgggttcgcggtttccatcccaccagctaagcaatggcttgtatgtctcgggccgacctgagcaacctaaagagaagtctccagtcatttgctcctcggctatgccgtacactggtggggacataaagaaatctggggagcttggaaagatgtttgatctccatagaaaatctggtccattgggtaatcaaacttcaaggaatacttcctttggtggtgctgcctccaactctggaccagtttctaatgctgtcggtcgctccaactactctggttctatttcgtctgcaattcctaacactggaggatcttctaggacaaaaactaattctggacctctcaataagcatggagaaccaacaaagaggtcatctggcccccaatctggtggagtaaccccgatggcccgtcagaactctggccctctgcctcctgtacttcctacaactgggctaatcacatcaggtcctatcacctctggtcagttaaattcatctggtgctcaacgcaaagtatcagggcctcttgattctagtgtatcaatgaagatgcgtaccacatcttttgcacacaacccagctgtcacaaatctcaatgtgggagatggttactcgattaagggcagcattccgaccacaataatctggttggtcgcgttgctctttttggttgggtttgtagctggtggcttcattctcgctgctattcataatcctatcttgcttatagtcgtggtggtgatatttggctttgttgctgcacttgtgacctggaacatctgctggggaacaagaggtgtgattgattttatcggtcgctattctgatgtagaccttagaactgcaaaagatggagagtatgttaaggttactggggttgttacttgtggaaatttgccccttgagtcctcattccaacgggtgccacgatgtgtgtacacttcaacttgcttgtacgagtacaggggttgggactcgaaagccgcaaacgccacacaccgacggtttacttggggtctcaggtcaatggaacggcacgcggtggacttctacatctccgatttccagtccgggctgcgagcactggtcagggcaggatccggcgcgcgcgtgaccccatacgtggacgagtccgtcgctatcgacgtaaacccagacaacaaggacatgtcgcctgagttcctccggtggctccgcggaaggaatctgtcgagcgacgaccggactatgcgcctcaaagaaggatacatcaaggagggcagcaccgtgagcgtgatgggcgtcgttcagaggaacgagaacgtgctgatgatcgttcctccagccgagcccatctccactggctgccagtggggcaagtgtgtcctcccgaccagcctcgagggccttgtcctgagatgcgaggacacgtctggcctggacgtgataccggtctagctagagaggttggttctggcgaatcctctggcgcggaaagggagtagaaaaaaaaagatgccttgacgtttggtttggtctccgtgggttgttagggttggaaggatgtgcaaatgcagggtgtgattattgggctaagtaagtaagtacaatatgagtggtcggtcggttacctggagcttgatcgtgatagtatatggtatgtaatttcctcttctcttcttttggctgagccatggatggtgtgcttgtaacaaggatggcttgatgtcagtatactaccctaccataccatggagcatgtttggagattcagtgggttccagtccgtattatgctcctgtttttttttgttgtagggttccaacaatgccttgaagcctgcaatttccttgtgtacccagatctccatagaaatctatttgcctaaacatggactatagcaggtgtattttcgatggtgagaaatcgatgtgattgattcctcct

SEQ ID NO: 118799 - DNA, 1658 bp, Zea Mays
atggaccgcatagagcaatcgcaactagcctgctgcagccccttgtcccggccgggctcagctctgaccgacgtgaaccggggcggcgagacgggctcctcgtcgcagtcgcaatgctccgacgatgatcagtcgtcgagaatcaacttgcttctccaagacagcgagagcctcaccagggatcagatcaacgtggtcgaactctctatcgcggtgcttcaccaggacatcgtccgggcgaggaagttggcaaaaaagctggaaggcattgacatcgacgaactgtggcgagaggtagcacaaatcgaagcatctaagagccccgaggtcgaaatgcttgccggaccgcttcaccacgccgcgcagagtgcgtacaagcccatgtgcaagctccttatcacgcagtgcagatgtgacgtcaatgcttcaacgattgattcctgtcgacggccagacgcgatgcacggggaaggcgagggaagacggcgcggcagcggtcgcggccgcccagacggcttgcgcgcggggaaggtgagggaaggaggcacggcagtcggcagtggttgtgagacggcatgcgtggggaaggtgaggagaggaggcgcggcagcggtcgtggccgcgcgggccgctcgcgtgttcatcaaccgcatcacgtcgaaggtatgacacccctgatgtttgcattacatcatgagggaaacaaagccattgttaagtatcttatcaacaaccacgctgatccaaacaaaggagccaactctggaattgctccactccacattgcggcaactgaaggttactatgaaattgtagagtacttgttgtcaagaggagctgatgttgaccccttaagtcaagatggcgaatcaccgttgttctgtgctgttttccacggacatgaaagaatagtgacactccttttgaagcatggtgcagattataacagagtttcaaatctaatggtaacaccactcctcgtgtcccttcatggttcttcattagattgcttagagatactaattgaggctggtgctgatataaatggggctggctgttctgtacctccagtagcgctagctgcttataaaggcttagatggttgcatccagtgtttgttgagaaatggtgctaatcccaacgtgcctgatgaagacaataatatcccaatacaaattgctgcattcaaaggatgggagaaatgcgtggagattcttctccctcacgcaccccatttgccacaatatgaaggcctgagcatctctgaaataatccactgggaaagaaccgagcgcttccgcagaagcagtagtgcaattgaacagggagatgttgcgtactggaaaaaagaacatgatattgcgttgagattctacaatgaagctgctcaggttggtcacgaggtcgcaaccttgtatgcaaagaagagtctttgctatctgcatctgcgtgatccagcaaaatttatcgatgaagcaattaactacataaatatggtgcagccagatttatcgacacttaaccctgagtctgatgctaagaaattggtgctggaatttggtagaacctggaaagcaccggggtctagttcgaggcaggattctggaagtagcccgactaacaaaactggcgaaacatccagcagggagcatcagtga

SEQ ID NO: 118800 - DNA, 133 bp, Zea Mays
caccaagctcctgtaaaaatttcagattttttgaacaaccgagcgaaaagttatgcccggtttaaggaaggtacctcaagttatattttttgggaggcacgactagaaggcggcgcggttagggcaaaacttc

SEQ ID NO: 118801 - DNA, 590 bp, Zea Mays
cgacagcccgccaactgcagccgtcggatactcccacaggagcgttccgaagccctaatgctcgcccttcccataagtactctcctctgaccacgccgccgccatttccttcctcctcccacctcggcggccggcctcctcttctcttcacccacacgctggtcatagagatgtcggctgcagaggcgaaggcggcggcggtcccggagtctgtgctgcggaagcgcaagcgggaggagcaatgggcagcggacaagaaggagaaggcgctcgcggacaggaagaaggcgctcgagagccgcaagatcatcttcgcccgcgccaagcagtacgccgaggagtaccacgcccaggagaaggagcttgtgcagctcaagcgtgaggcccggttgaagggtgggttctatgtgagcccagaggccaagcttctgtttgtggttcgcatccgtgggtatggttctctcacattggttgctgattctattgctacgctcaactgttgattgttgtcaaatgtgtcatgtagtatcaatgccatgcaccccaagacccgcaagatcttgcagctcctgcgattgaggcagatcttc

SEQ ID NO: 118802 - DNA, 1259 bp, Zea Mays
cgacagcccgccaactgcagccgtcggatactcccacaggagcgttccgaagccctaatgctcgcccttcccataagtactctcctctgaccacgccgccgccatttccttcctcctcccacctcggcggccggcctcctcttctcttcacccacacgctggtcatagaggtacgctctgccgcgccaagctccgcctccatccgcgcggatctgagtttgtgctgtctggctctctgcgcagatgtcggctgcagaggcgaaggcggcggcggtcccggagtctgtgctgcggaagcgcaagcgggaggagcaatgggcagcggacaagaaggagaaggcgctcgcggacaggaagaaggcgctcgagagccgcaagatcatcttcgcccgcgccaagcagtacgccgaggagtaccacgcccaggagaaggagcttgtgcagctcaagcgtgaggcccggttgaagggtgggttctatgtgagcccagaggccaagcttctgtttgtggttcgcatccgtggtatcaatgccatgcaccccaagacccgcaagatcttgcagctcctgcgattgaggcagatcttcaacggtgtcttcctcaaggttaacaaggcaaccattaacatgctgcgcagggtggagccatatgttgcgtacggataccccaacctgaagagcgttagggagttaatctacaagagaggttacgggaagctgaacaagcagaggattccacttagcaacaacagtgtcatagaggagggcctcgggaagcacaatatcatctgcattgaggaccttgtccacgagatcatgacggtcggcccgcacttcaaggaggccaacaacttcctctggccgttcaagctgaaggcacccctcggcggcctcaagaagaagaggaaccactacgtggagggcggtgacgccggaaaccgtgagaactacatcaacgagctcatcaagaggatgaactaggctctctcttgtatcctgtgagaatgcttttctgtgtcagcgtggttgtttttgctctagtaagttgacggataatgatggatatgcaattatttttttggtgttccatggctctaatacagccagacttcactaggaactgtgtcgctgtttatgttggcagttgcttctggaggtttttgtctacttttgttatttttattttcttttgtatatgttgcgcggaccttgtcaattgcctgatgctgcctaccgagccaacatataagccggtcgtt

SEQ ID NO: 118803 - DNA, 1194 bp, Zea Mays
cgacagcccgccaactgcagccgtcggatactcccacaggagcgttccgaagccctaatgctcgcccttcccataagtactctcctctgaccacgccgccgccatttccttcctcctcccacctcggcggccggcctcctcttctcttcacccacacgctggtcatagagatgtcggctgcagaggcgaaggcggcggcggtcccggagtctgtgctgcggaagcgcaagcgggaggagcaatgggcagcggacaagaaggagaaggcgctcgcggacaggaagaaggcgctcgagagccgcaagatcatcttcgcccgcgccaagcagtacgccgaggagtaccacgcccaggagaaggagcttgtgcagctcaagcgtgaggcccggttgaagggtgggttctatgtgagcccagaggccaagcttctgtttgtggttcgcatccgtggtatcaatgccatgcaccccaagacccgcaagatcttgcagctcctgcgattgaggcagatcttcaacggtgtcttcctcaaggttaacaaggcaaccattaacatgctgcgcagggtggagccatatgttgcgtacggataccccaacctgaagagcgttagggagttaatctacaagagaggttacgggaagctgaacaagcagaggattccacttagcaacaacagtgtcatagaggagggcctcgggaagcacaatatcatctgcattgaggaccttgtccacgagatcatgacggtcggcccgcacttcaaggaggccaacaacttcctctggccgttcaagctgaaggcacccctcggcggcctcaagaagaagaggaaccactacgtggagggcggtgacgccggaaaccgtgagaactacatcaacgagctcatcaagaggatgaactaggctctctcttgtatcctgtgagaatgcttttctgtgtcagcgtggttgtttttgctctagtaagttgacggataatgatggatatgcaattatttttttggtgttccatggctctaatacagccagacttcactaggaactgtgtcgctgtttatgttggcagttgcttctggaggtttttgtctacttttgttatttttattttcttttgtatatgttgcgcggaccttgtcaattgcctgatgctgcctaccgagccaacatataagccggtcgtttcattgta

SEQ ID NO: 118804 - DNA, 86 bp, Zea Mays
atattagtgtgtgtataaatattaatgttgttttgtgtaatcctggtcagctttcacattatttgactactaaaataataagaatc

SEQ ID NO: 118805 - DNA, 417 bp, Zea Mays
accggagagtgagcctcgagccattccgtgaagtttttcttgtcgtctaagtagtctcccttcaagaaatcgggcacgacgacgaagtaccctgcctttgcaaccttgtctgctatctgtctgccgtgtggtacggaccgaagacgtcggaggcgaggacgacggcgcggctcgagctcgcggcgccgctgacgtaggccctgaggccaccagggaggtcgtggacgacctcgccggcctcggccagctggcggccgtggatggaccggtctggcgggttgtccaggcactgcgagtgcgcctcggcggtggtggccgccgccgccgcgagcacggcggcgaggcagagcagaacctgcgcggaagaaggcatggcgcttgccgcttggtgagttggacgacctgatgcagttgaac

SEQ ID NO: 118806 - DNA, 1096 bp, Zea Mays
gcagccacaacacatcccacaaccattattcttgttccactgcatcaggtcgtccaactctccaagcggcaagcgccatgccttcttccgcgcaggttctgctctgcctcgccgccgtgctcgcggcggcggcggccaccaccgccgaggcgcactcgcagtgcctggacaacccgccagaccggtccatccacggccgccagctggccgaggccggcgaggtcgtccacgacctccctggtggcctcagggcctacgtcagcggcgccgcgagctcgagccgcgccgtcgtcctcgcctccgacgtcttcgggtacgaggcgccattgctcagacagatagcagacaaggtcgccaaggcagggtacttcgtcgtcgtgcccgatttcttgaagggagactacttagacgacaagaaaaacttcacggaatggctcgaggctcactctccggtgaaagctgcggaagacgctaagccactgttcgccgctttgaagaaggaagggaagtccgtcgcggtgggaggctactgctggggagggaagctgagcgtggaggtggggaagaccagcgacgtcaaagctgtgtgcctttcgcacccgtacagcgtcactgccgacgacatgaaagaggtgaaatggccgatcgagatcctgggggcccagaacgacacgaccacgccgccgaaagaagtgtatcggttcgtgcatgtgctgcgtgaaagacacgaggttccctactacgccaagatcttccagggagtcgagcacgggttcgcctgcaggtacaacaccaccgaccctttcgccgtcaagaccgcagagacggccctcgcctacatggtcagctggttcaacaagcacctcaactgaatgaagcctgcactgcacccaccagactgaattcaataaaccactgcagtgctgtgatattttgtttcgattcatggctccccagattgatttgtcatggctaagacctctactactgtaatttccttcattttttgtctcttcaaactctctgtattcttttttttgctttttatgatcgcaataaagttcagtaggggtatacccctcctgtttgcttcaaa

SEQ ID NO: 118807 - DNA, 1235 bp, Zea Mays
gcagccacaacacatcccacaaccattattcttgttccactgcatcaggtcgtccaactctccaagcggcaagcgccatgccttcttccgcgcaggttctgctctgcctcgccgccgtgctcgcggcggcggcggccaccaccgccgaggcgcactcgcagtgcctggacaacccgccagaccggtccatccacggccgccagctggccgaggccggcgaggtcgtccacgacctccctggtggcctcagggcctacgtcagcggcgccgcgagctcgagccgcgccgtcgtcctcgcctccgacgtcttcgggtacgaggcgccattgctcaggtacatagctgcatccgttcgattcctgctcctcctccttctccggcgtaccccagttttaggagacttgtaacagacagagcatatgtattccatccttgatttagctgaaatctgtggttggtgttcaataacgcagacagatagcagacaaggtcgccaaggcagggtacttcgtcgtcgtgcccgatttcttgaagggagactacttagacgacaagaaaaacttcacggaatggctcgaggctcactctccggtgaaagctgcggaagacgctaagccactgttcgccgctttgaagaaggaagggaagtccgtcgcggtgggaggctactgctggggagggaagctgagcgtggaggtggggaagaccagcgacgtcaaagctgtgtgcctttcgcacccgtacagcgtcactgccgacgacatgaaagaggtgaaatggccgatcgagatcctgggggcccagaacgacacgaccacgccgccgaaagaagtgtatcggttcgtgcatgtgctgcgtgaaagacacgaggttccctactacgccaagatcttccagggagtcgagcacgggttcgcctgcaggtacaacaccaccgaccctttcgccgtcaagaccgcagagacggccctcgcctacatggtcagctggttcaacaagcacctcaactgaatgaagcctgcactgcacccaccagactgaattcaataaaccactgcagtgctgtgatattttgtttcgattcatggctccccagattgatttgtcatggctaagacctctactactgtaatttccttcattttttgtctcttcaaactctctgtattcttttttttgctttttatgatcgcaataaagttcagtaggggtatacccctcctgtttgcttcaaa

SEQ ID NO: 118808 - DNA, 677 bp, Zea Mays
acaaaacattgtaacaaactacatatactaaagtttagtacattgagagcttgtctagctagtccatggccactcaaagtccccatgttctcgttgtggatcattcccgtgttgattgccttgttgcatcgattgtcctcaatagtttcaacattcgagtaactgttgcgggaggtgccatggaagcattggaattcttagatgcgaacaacagtcatgtggaccttattttgactgactactgcatgcctgatatgactggctatgatttgcttagggaagtgaaggaatcgccaagactaaagcacattccagtggtgattacatgcactgatgtcataccagaaagaatcattgagtgctttgaaggaggagcagaggaatacatgataaagcctctcaaggtttctgacgtgcctcgtattcttagctacatgtgatgcacttgagggagaaaacgaataaaaaggaaatgcaagcataaacagtctttgggttatagttctctatcaatcatgcttaagtgtgaccatatatggtctttttattatgtcacctgttgttttgaataatttgtagccaatgcaagcctaatcagtatttggcttatagttctctatcaatcatgcttatgtgtggccatctatggtacttttaatgtcatccattattttttt

SEQ ID NO: 118809 - DNA, 1061 bp, Zea Mays
catcacttggatcaaacgaaagcgtcctcacacactacccactcagcaactcacagccatggggcaggctagtagggctcatcagctcctagcctccctggcggctatctacgtcaccctagccatcagtatcacccagcaccatgtcgccggcaacatgaccgacgacctcgagataatgtggggcaacgcgaaggtcgtcaccgacggcagcggccagcaggccatcgcgctggctcttgaccgctcgacgagctccgcgttccgctccaagaagacgtgccagttctgcagggttgacatcgagatcaagctcgtccctgggaactcggccggcaccgttaccacgttctatatgataaccgagaacccgtggcagttccacgacgagatcgacatcgagttcctgggcaacagcagtggccaaccctacaccatgcacaccaacatgtacgccagaggacagggcgccagagagaagcagtacaagttcgacttcgaccccactcaggattaccacaagtacaccatcatctggaacaaagattggatcttgttccttgtggacgacaagctgtaccggcagatcaagaacaaccagatagacggcgccccgtacccgtactactacccgatgagggtgtacgccaccatctggaacgccgacgagtgggctacgcagggcggccgggtcaagaccgactggtcgcaggcgcccttcacggcgtacttccggaactacagggccatctcgtgcaactcgttcatggcctcccctctgtgcctcccaggctccggctggttcgaccagcagctggacgagtcgcggaagcagcagctggcgcaggtggactccagtaacaagatatacgattactgcaccgactccaggaggtacaagaacggcctcccgagggagtgccaggtacattaattagctgcgaagtgtgtgcttcagcaactgaagaacgatcgagaggatgttagagttgtgttgggggtgattattgagtgattcggcaacattcttttaattatataaggaattttctacggtaccc

SEQ ID NO: 118810 - DNA, 324 bp, Zea Mays
tatttggctcacgggtatgtgctacacctgccgtacatttaaatatcttccttaggttctggtcactgtcagaaacaatgcacaactgtctgtggtagtttcaagggaaagcctccccatcgactatactgtcaaggaacttgattggatttctgagatttctatgccgaagatacataaatggtaatggattttcttctatacaaacatggcccaaaacaaagcatcttctataaactactaagctacttggtgaccagtctatcagtatagttgaggatttgtattctaggaatcctattggtataacatgaggactgtgta

SEQ ID NO: 118811 - DNA, 1361 bp, Zea Mays
attccagaacacagcctcagcaccttccttcttctccgtctcgtcgtccctttccatttcctctcccatttatgtccccgcttcaggtctgccaaataaacccccgaaaagcaggagagcgagacccggaagtggaagactagggttagggtcccagctccgccgttgtctgggcgagtcgagacatggccggccctgcccccgccgttgcagccagtgccgccgcctcacagtcgccgccgatgcagctgccgtcgccgttcgcggagctagtcaagggttcctccggcctcgagaagatcgtgcttcgcggcgctcgcaactgctgtgccgagatctatctttatggaggtcaagtaacatcatggaagaatgacaatggggaagagttgctttttctcagcagcaaggctattttcaaacctccaaaagctattcgtggtggtataccaatttgctttccccaatttggaacacatggaaatcttgagcaacatggatttgctaggaaccggttttggactatcgacaacaacccaccccctttaccagtaaaccctgctattaaggcttatgttgatctgattttgaagccttctgaagaggatttaaagatctggccccacagttttgaatttcgcttgagagtttctcttggaccttctggagatctgagtctcacatcccgaatcaggaataccaacacagatggaagacctttctcttatacatttgcatatcacacatacttctctgtctctgacataagcgaggtgcgtgtcgaagggctggaaacaatggactaccttgacaacttgaaggcaaaggagcgtttcacggagcaaggcgatgctattgtttttgaatcagaagttgataaagtttatcttgccgcaccctctaaaattgccatcattgatcatgagaagaaaagaacatttgtcgtgacaaaagaagggcttcctgatgctgttgtttggaacccttgggacaagaaggcaaaagcaatgcaagattttggggatgcagaatacaagagcatgctgtgtgtggagcctgcagctgttgagaggcctattactctgaaacctggggaagagtggaaaggaaggcttgtgctttcagctgttccttcgagttactgtagcggacagttagatccatcgaaggtccttcagggttgaaaatcctcactttctgcatcttgtacaggtgatactatattctgcttgtaataatttggatgcattgcatatgcttgaagccctacccttatcaaaaatttggatccataacctgctaggagggattttaattttggtcagacatgtttttggttataaaaaatctggttttagttg

SEQ ID NO: 118812 - DNA, 1536 bp, Zea Mays
attccagaacacagcctcagcaccttccttcttctccgtctcgtcgtccctttccatttcctctcccatttatgtccccgcttcaggtctgccaaataaacccccgaaaagcaggagagcgagacccggaagtggaagactagggttagggtcccagctccgccgttgtctgggcgagtcgagacatggccggccctgcccccgccgttgcagccagtgccgccgcctcacagtcgccgccgatgcagctgccgtcgccgttcgcggagctagtcaagggttcctccggcctcgagaagatcgtgcttcgcggcgctcgcaactgctgtgccgagatctatctttatggaggtcaagtaacatcatggaagaatgacaatggggaagagttgctttttctcagcagcaaggctattttcaaacctccaaaagctattcgtggtggtataccaatttgctttccccaatttggaacacatggaaatcttgagcaacatggatttgctaggaaccggttttggactatcgacaacaacccaccccctttaccagtaaaccctgctattaaggcttatgttgatctgattttgaagccttctgaagaggatttaaagatctggccccacagttttgaatttcgcttgagagtttctcttggaccttctggagatctgagtctcacatcccgaatcaggaataccaacacagatggaagacctttctcttatacatttgcatatcacacatacttctctgtctctgacataagcgaggtgcgtgtcgaagggctggaaacaatggactaccttgacaacttgaaggcaaaggagcgtttcacggagcaaggcgatgctattgtttttgaatcagaagttgataaagtttatcttgccgcaccctctaaaattgccatcattgatcatgagaagaaaagaacatttgtcgtgacaaaagaagggcttcctgatgctgttgtttggaacccttgggacaagaaggcaaaagcaatgcaagattttggggatgcagaatacaagagcatgctgtgtgtggagcctgcagctgttgagaggcctattactctgaaacctggggaagagtggaaaggaaggcttgtgctttcagctgttccttcgagttactgtagcggacagttagatccatcgaaggtccttcagggttgaaaatcctcactttctgcatcttgtacagaagttcattgcccttaatatttgatgctgggctggcgtcaacgccgcatgttccttttgccatttccaccccctatatttctggtcccttttgtatctagaatttgagtgataggttgattccgaataacagtctgtgatttgagcttaggattgggtcatctcatcgatgaatgataccgctggacaaaatgctggcgtacgtgtcagtttcataaatcattcttctcataaattctttagcatgtacttcgtagttgatcatgtttcgatcggtggacccttttgttactttcttgtctgataaggtttcgatcggtggtta

SEQ ID NO: 118813 - DNA, 1709 bp, Zea Mays
ataaatactccgtactgtcaaatctccagtccgtataagcttggcgtggcgctcatagatacgcacaacgttagcgcggcgccgctccacagtcgctcacaccgtcacacggcatggaggttgccggaaaccatgttcagagctgtcgcacggagctgccggagccgcagaagccgctggtggacgacgacgggcggccgctccgcacgggcacgctgtggacggccagcgcgcacatcatcacggcggtgatcggctccggcgtgctgtcgctcgcgtggggcgtggcccagcttgggtgggcgggcggccccgccgcgatggtgctcttcgccgccgtcatctactacacgtccacgctgctcgccgagtgctaccgctgcggcgaccccacgttcggcccgcgcaaccgcacctacatcgacgccgtccgcgccaccctcggcgactccaaggagaggctctgcggcgccatccagctctccaacctcttcggcatcggcatcggcgtctccattgccgcctccgtcagcatgcaggcgatccggagggccggctgcttccactaccgagggcacgaggacccgtgccacgcctccaccagcccatacatcgccgtcttcggcgtcatgcagatcgtcttctcgcagatccccgacctagacaaggtatggtggctgtccaccgtggccgccatcatgtccttctcctactccaccatcggcatcttgctcggtgttgttcagattgtagaacacggaggaccgagggggagcctcgccggcgtcatcggtgctggcgccagggtcaccatgatgcagaaggtgtggcgcagcctgcaggcttttgggaacatcgcgttcgcgtacggtttctctatcatcctgctcgagatacaggacacgataaagtccccgccgccgtcggaggctaaggtgatgaagaaggcgacggcagtgagcgtggcggtgaccacggtgatctacctgctgtgcggctgcgtcgggtacgcggcgttcgggggcgcggcgccggacaacctgctcacgggcttcggcttctacgagcccttctggctgctggacgtggccaacgcgtttgtggtggtgcacctggtgggcacctaccaggtcatgtcccagcccgtcttcgcctacgtcgagcgccgggcggccgccgcgtggcctggcagcgcgctggttcgcgacaggcacgtgagggtggggcgagccgtggccttctccgtcagcccggcgcggctcgcgtggcgcacggcgtacgtgtgcgtcaccacggcggtggcgatgctgctgcccttctttggctccgttgtcggtctcatcggcgccgcctccttctggccgctcaccgtctacttccccgtggagatgtacatcgcgcagcaccgagtggcgcggggcagcatgcggtggctgctcttgcaggggctcagcgccgggtgccttgttgtgtccgttgctgccgctgccgggtccatcgccggcgtcgtggaagacctcaaggcgcacaatcccttctgctggtcgtgctgaccgaaccaactctgatgtatgagggatgcttctctgcgccgcactacttcgtaaaagaacattattaagagcatctacaagagtgtgccttataatagtgccctataaattaaaaggggtctcttcaactaaagtgtttttgggcacaaaatattt

SEQ ID NO: 118814 - DNA, 2951 bp, Zea Mays
gtttcgtccctctccttccggcggcagctgcgtcggccgcggctgccaacggccggtatggcgggcctcgaggagatcaagaatgaggcaatcgatctggagaacatccccgtggaggaggtcttccagagtctcaaatgcagcaagctgggcctgtcctcggaggaggcggaggcgcgcctcgccgtctttgggcccaacaagctcgaggagaagaaggagagcaagttcctaaagttcctggggttcatgtggaacccgctgtcgtgggtcatggaggcggcggcgatcatggcgatcgcgctcgccaacgggggcggcaagccgccggactggcaggacttcgtggggatcgtgttcctgctgctcctcaactcgtccatctcctactgggaggagagcaacgccgggagcgcggcagaggcgctgatggccaacctggcgcccaaggccaaggtgctgcgcgacgggcgctggagcgagcaggacgcggcggtgctggccccgggggacatcatcagcgtcaagctgggcgacatcgtccccgccgacgcccgcctgctcgagggcgacccgctcaagatcgaccagtcggcgctcaccggcgagtcgctgcccgtgaccaagggccccggcgacagcatctactcgggctccacctgcaagcagggggagctcgaggccgtcgtcatcgccaccggcgtgcacaccttcttcggcaaggcggcgcacctcgtggacagcaccaaccagacgggtcacttccagaaggtgctcaaggccatcggcaacttctgcatcgccaccatcgccatcggcatcgccgtcgaggtcctcgtcatgtacgccatccagcaccgcgcgtaccgcgacggcatcgacaacctcctcgtgctcctcatcggcggcatccccatcgccatgcccaccgtgctctccgtcaccatggccatcggctcgcaccgcctcgccacgcagggcgccatcaccaagcgcatgacggccatcgaggagatggccggcatgaccgtgctctgcagcgacaagacgggcacgctcaccgtcaacaagctcagcgtcgacaggggcctcatcgagatcttcgccaagggggtcgacgccaacggggtcatcctcctcgcggccagggcctccagggtcgagaaccaggacgccatcgacgctgccatggtcggcatgctcggcgaccccaaggaagctagggaaggcatcaaggaggtgcatttcctccccttcaatcccgtcgacaagcgcacggccctcacctacgtcagcctcgccgacggtagctggcaccgtgtcagcaagggtgctcccgagcagatcatgaccctatgcaactgcaaggaggatgtcgtgaacaaggtgcacgccatcatccacaagtacgctgagcgcggcctaaggtctctcgccgtcgccacacaggaagtgccggagaagtctaaggacagccccggcggcccatggcagttcgtcgccctgctgccccttttcgacccgccgaggcacgacagtgcggaaaccatcaggaaggcgctcaacctgggcgtcaatgtcaagatgatcaccggtgaccagctcgccattgccaaggagacgggcaggaggctggggatgggcaccaacatgtacccctcctcggcgctgctcgggcagagcaaagatgaatccatcgcctccatccccgtggacgatctgatcgagaaggccgatggctttgccggcgtcttccccgagcacaagtacgagatcgtcaagaagctgcaggagaggaagcacatctgcgggatgaccggggacggcgtgaacgacgcgccggcgctgaagaaggcggacatcgggatcgccgtcgccgacgctacggacgcggccaggagcgcctccgacatcgtgctcaccgaacccgggctcagcgtcatcatcagcgccgtgctcacgagccgctccatcttccagaggatgaagaactacaccatctacgcagtgtcgatcacagtccgtattgtgctcgggttcatgctgatcgcgctgatctggaagttcgatttctcaccgttcatgatcctggtcattgccatcctcaacgacggcacgatcatgaccatctctaaggacagggtgaggccgtctccgcatccagacagctggaagctgaacgagatctttgtcaccggcgtcgtctacggcacctacctcgccgtcatgaccgtcatcttcttctgggccatgcgcagcaccgatttcttcacgaacacgttcggcgtgaggtcgctgcacggcagccgggacgagatgatgtcggcgctgtacctgcaggtgagcgtcatcagccaggcgctcatcttcgtcacgcgctcccgcggcttgtgcttcacggagcgccccggcttcctcctctgcgtcgccttcgtggtcgcccagatcattgccaccctcgtcgcggttatccccaccatcgggttcgcgcacatccgcggcgtcgggtgggggtgggcgggcgtcatctggctgtacagcgtcgtcaccttcctgccgctggacgcgttcaagctggccatccggtacgcgctgagcggaagggcgtgggacacgctgttcgagcacaagatcgccttcaccaccaagaaggactacgggcgggaggagcgggaggcgcagtgggccacggcgcagcgcaccctgcacggcctccagacgcccgaactggccggcgtcctcaacgatcgcaccagctaccgcgagctctccgagatcgccgagcaggccaagcgccgcgccgaggtggccaggctgcgggagctcggcacgctcaagggccagatggagtccgtcgtcaagctcaaggggctggacatggaaggcgtccagcagcactacaccctgtgagtgaatgcgtgtagtgtatttgtaattgttgctgtactcat

SEQ ID NO: 118815 - DNA, 710 bp, Zea Mays
aatatcccctagccttctccggatgtgttttctctctctctctctcttccctttttatcagatcaatgttttgaaaaaagtgattcgtgcatttgaccctgctgcggcaccacattcttcatgagtgctggattgctttctcgggggaatctagagagggagtgtcgcacagccggctccattgcccggggttgtgctcacgccataagttttggagtccggaggagggaggaaaagcagggtagctagaatctctgttggcgtctcttgtttcattgtgttcatgatgatcctttcagtaataggcctttttaggtagtaaaggaaacgtttgtgctctggtttctgcaagaggtttgcacataaacatttttttattacagtctaggctccaacctttggttgataaacactctcaccataagtaacatagaaataaatgatgggagatacaagaatctgaaaatgaataaatgatgtctgaagtaccgaagacagggctaacacagacctgttttgacaagagccgagcagcgatgcttccatttcggaccacgacctagctaaaggctaatggttccaaatgtttgaagtaccgaagacagggctagctcctcgttttttgtcatgtcaaaaaaatcgtgtatgattcaacaatattggcaaaatatcgttgtactttatattttgatatattgtgaacaaaacaa

SEQ ID NO: 118816 - DNA, 2616 bp, Zea Mays
cagctgttgtaattacgtggtacaggacagtgcccatttgccgttgccgcgtccagcattcattcattcattgccctggccttcttccttcgggccttcccgtgccgtcgcccaacgcctcacctaccaccaccgcccgccaccaaaccaaaccaacccctcggtcgccgacgccgagtgacgtaaacgatggactcggcgacgtcgggggcgatggagctggtggccgcgctgctgcgcggccgggtgccgcccgagctgggcggggacggcgccgagggccgggcgctcgtcgccacgctcgccgccgcggtgctcggcgccgcgctcttcgtgctctggaggcgcgccgccgccgggaagaagcggaagcgggaggccgccgtcgcggccgcggaggccacgcaggccaaggcgagaggcggtaaggccgccgaggaggagaagccggccgacgacggcaggaaaaaggtcaccgtcttcttcggcacgcagaccggcacctccgaggggtttgccaaggcccttgctgaggaggcgaagtccagatatgacaaggcaagcttcaaagtcgtggacttggatgattatgcagcagaggacgaggaatatgagaagttgaagaaggagaagctagcgttgttcttcgtggcaacgtatggagatggtgagccgactgacaatgctgctaggttctacaaatggttcactgagggaaatgagaggggtgtctggctaaatgactttgagtatgctgtgtttggtctgggcaaccgacagtatgagcatttcaacaaggttgccaaggtagtcgatgagatcctgacagaacaaggtggaaagcgccttgttccagttggtcttggggacgatgaccaatgcattgaggatgacttcaatgcatggaaagaagctctctggccagagttggatagattacttcgggatgaaaatgatgcctctccaggccctacatacacagctgcaattcctgaataccgggttgaattcatcaaacctgaggaggcagctcatttggagagaaacttcagccttgcaaatggccatgcagtccatgatgcccagcatccttgccaggctaatgtggtcgtgcggcaggaactccacacccctgcttctgatcgttcatgcactcatttggagttcgacattgctgcaactggtctcacgtatgaaactggcgaccatgttggtgtatacaccgagaactgccctgaggttgtagaggaggcagagaggttgttgggctactcgccagacacatttttcaccatccatgcagacaaagaggatgacacttcactaagtggcagttctcttgctcctccgttcccctccccaatcacagtgaggaatgcacttgctagatatgccgaccttctaaattcaccgaagaaggcttctctggttgcattagcttcttatgcttcagatcctgctgaggctgatcgtctgaggttcttggcctctgctgctggcaaggatgagtatgcccaatgggttgtggcaagtcagagaagcctgttggaagtcatggcagagttcccttcggcaaagcctccactaggagtcttctttgcagctgttgcccctcgacttcaaccaagatattattctatttcatcttcacctagtatggcaccaaccaggattcatgtcacatgtgcgctcgtgcgcgaaacaacacccgctggaagggtacataagggagtttgctcaacttggattaagaatgctgttccttcggaggagagcaaggaatgcagctgggctccgatatttgtgaggcaatcaaacttcaaactacccgctgatccttcagtaccgattatcatgattggccctgggaccggtcttgcacccttccgtggcttcttgcaggaaagacttgctcaaaaagaatctggagctgagcttggtcgatctgtgttcttctttggatgcagaaacagcaagatggacttcatctatgagggcgagctgaacaatttcgttgagcaaggagcactgtctgagctggttcttgccttctcgcgccagggccttgctaaggaatatgtgcagcacaaaatggcacagaaagcatctgaaatctgggacatgatctcccaaggtgcttacatctatgtctgtggtgacgccaaaggcatggccagagacgtacatagagttctccataccattgttcaggagcagggctccctcgacagttctaaggccgagagcttcgtgaagaatctccaaatggagggcagatatctgagggatgtgtggtaaagagcgattggatgaacattcgttcgtattacacacgtgtacaactactaccggaagagcactgacaatggactagatctgatatttttattgcttctatatttatttttattttcttttgcttcgttctcttcaagagctctttgctttctttgcggttctcccaagagttctttgtacctatgtattacaaattctttatatgtataagatgaggacaattttggcaataagcctgtcacgatgttattagtattgccaaataggctttcgtgtgattatgcataatgtataaatgaatccacaaagagtttagga

SEQ ID NO: 118817 - DNA, 3079 bp, Zea Mays
gaaaaaagtcggagggttcgggtcgaggtgcttcatccacacccagcgaatcctcgccgcgggagtcacgcaaccgccgtctcctcgccggcacgcttcgccgccgccgcctctctcctcctcgtctcaaccgccgcctgcacacgcagaaaaggagggagaataagaggatcagcaaaccccaagccctccactcgtcgccccctgctgcaatcgccccacccgcctccgcccgccgccgcttctcctcaccgttctcttccttcccaggccgttcatagcaagcgaccgcagacgttttgacttttgagcgttgttgatacggtcactctttccccagttcctctcccgcgacatctcagttcttcatcaccaaaagatggtcggcggcggcaacgagttccgtttcttcttgtcctgcgacatcagccacccgcttgccttccgtgttctccacgcagaacatatcttgttgaccgaccaaaaagtcccagagctctttgttgagtgcaagctatacatcgatgggatccaatttgggttgcctgtaaaaacaaggttggaaccttctggaccgaaatactgttggaatgagctcataacattaagtaccaaatacagggacctaacatccctctcgcagcttgcatttacggtgtgggatgtctcatctggtgagaaccctgaggttgtcggtggagccaccatatttctttttaacagcaaaaggcagcttaaaacaggaagacagaagctgcggctgtggcccacaaaggaggcagatggaggagtccccaccacaactcctggcaaggttcctaggaatgagaggggtgagatagaacgtttggaaaggcttgttaacaagtatgagagagggcagatacaacatgttgattggcttgatcgtcttgccttcagtgctatggacaaagctatggaaaaagagtgtgagaggaaggccaatttgtaccctagtctggttgttgaattgtgcagtttcgaacatagaattgtcttccaggaatctggagcaaatttttatacaccggccccagtatcattatcaaatgaactggttactgtatgggaccctgaacttggaagaaccaatccatctgagcacaagcagttaaagcttgctaggagcttgactcgtgggatagttgatagagatctaaaaccaagctcaaatgagagaaagttactacaaacaattattaagtttcctcctacacgcaccttggaagtggatgagaagcaattggtgtggaagtttcgtttctctttgatgtctgagaagaaagctctaacgaaatttgtccgctcagtggattggagtgataaccaagaagctaagcaagctgttgagttgattggaaagtgggaaatgattgatgtggctgatgcactagagcttctctcacctgattttgaaagcgacgaagttcgtggttatgctgtcagcgtacttgaaagggctgatgatgaagaattacagtgctatttactccagttagtgcaagctcttcggtttgaaagatctgacaagtcccgtctagcactctttcttgtaaaccgtgctttgtccaacatcgaaattgctagcttcctccggtggtatatattagttgagcttcacagtcctgcatatgcaagacgatattatggcacatatgacatgcttgaaaacagtatgatgaaattggttggtagggaggatggggatgaagatggatttcgactgtggcagagtttaacccggcagacagacctcactgctcaattgtgttctattatgaaggatgtaagaaatgtaagaggtagcgcacaaaagaaaattgaaaaattgaggcagctattatcaggagttttcagtgagcttacaaactttgatgagccaattcgttcaccattagcaccaactcttctcctaacaggagttgtgcctcaagaatcgtctatatttaagagtgccttgaaccctttgcgcctgacatttaaaacagcaaatggcggaacatccaagattatttacaaaaagggtgatgacctccggcaagatcagttggttattcaaacggtttctttgatggaccgactactcaaattagaaaatctagatttgcaccttactccataccgagttcttgcaactggacaagatgaagggatgcttgaatttattagttccagttctcttgcacagattctatcagaacatcgcagtattacaagttacctacagaagttccatcctgatgaggatggtccttttggtataacggctcaatgtttggagacattcataaaaagctgcgccggttactctgtcattacatacatattgggggttggagacaggcatctggataatcttcttctaactgatgatggacgcctttttcatgttgactttgcttttatccttgggcgagacccaaagccatttccgccaccgatgaagttgtgtaaggaaatggttgaggccatgggtggtgcagaaagccaatattacacaaggttcaagtcctactgctgcgaagcatacaacattctgaggaagtccagcagtctcattttgaatctattcaagctgatggagcgatcaggcattccggacatctctgccgatgaaagcggaggtctcaagctccaggagaaattccggttggatctggacgacgaggaggctatacatttcttccaggatcttatcaacgatagcgtgagtgctctgttccctcaaatggttgagaccatccatagatgggctcaatattggcggtaacacaagctaatgtcgtagaagcaagtgtgaatctgtacatgctgactgtcacaagccacggtaataagcgagaaacgacactgatggatggaagcctaggcgcctagcatttggggttcaagctgcgccgcatctgcgaattgattgggctgatgcagggcatgggcaatcttctcgtgccggtgacacccaggaattcgggttgtcagttgtcacttgtgatagtagaattccgtcacgcactgctgtagacctatgggcattcgtcagatgtatatatgcgttaat

SEQ ID NO: 118818 - DNA, 2019 bp, Zea Mays
aattttcaaaaggcttgtgcactggtaatagttttttaatcctggtgaaatgtttattagttaaggttagacaaatgattatcttgttatctcaattctaaaatagtattcgatatttagattctgactctggctatatgctttattatctcatgaattattctgtaaggtaacaattgtttttctgcaaaggttcgtggttatgctgtcagcgtacttgaaagggctgatgatgaagaattacagtgctatttactccagttagtgcaagctcttcggtttgaaagatctgacaagtcccgtctagcactctttcttgtaaaccgtgctttgtccaacatcgaaattgctagcttcctccggtggtatatattagttgagcttcacagtcctgcatatgcaagacgatattatggcacatatgacatgcttgaaaacagtatgatgaaattggttggtagggaggatggggatgaagatggatttcgactgtggcagagtttaacccggcagacagacctcactgctcaattgtgttctattatgaaggatgtaagaaatgtaagaggtagcgcacaaaagaaaattgaaaaattgaggcagctattatcaggagttttcagtgagcttacaaactttgatgagccaattcgttcaccattagcaccaactcttctcctaacaggagttgtgcctcaagaatcgtctatatttaagagtgccttgaaccctttgcgcctgacatttaaaacagcaaatggcggaacatccaagattatttacaaaaagggtgatgacctccggcaagatcagttggttattcaaacggtttctttgatggaccgactactcaaattagaaaatctagatttgcaccttactccataccgagttcttgcaactggacaagatgaagggatgcttgaatttattagttccagttctcttgcacagattctatcagaacatcgcagtattacaagttacctacagaagttccatcctgatgaggatggtccttttggtataacggctcaatgtttggagacattcataaaaagctgcgccggttactctgtcattacatacatattgggggttggagacaggcatctggataatcttcttctaactgatgatggacgcctttttcatgttgactttgcttttatccttgggcgagacccaaagccatttccgccaccgatgaagttgtgtaaggaaatggttgaggccatgggtggtgcagaaagccaatattacacaaggttcaagtcctactgctgcgaagcatacaacattctgaggaagtccagcagtctcattttgaatctattcaagctgatggagcgatcaggcattccggacatctctgccgatgaaagcggaggtctcaagctccaggagaaattccggttggatctggacgacgaggaggctatacatttcttccaggatcttatcaacgatagcgtgagtgctctgttccctcaaatggttgagaccatccatagatgggctcaatattggcggtaacacaagctaatgtcgtagaagcaagtgtgaatctgtacatgctgactgtcacaagccacggtaataagcgagaaacgacactgatggatggaagcctaggcgcctagcatttggggttcaagctgcgccgcatctgcgaattgattgggctgatgcagggcatgggcaatcttctcgtgccggtgacacccaggaattcgggttgtcagttgtcacttgtgatagtagaattccgtcacgcactgctgtagacctatgggcattcgtcagatgtatatatgcgttaatgtataaaatcaacttcagtagcaaatttgtgaataccggaatacgtgatggtttaagttctttagtagtttgtaatgataagactagcctgccaggtgccagcagtctcaggagcatgtgggctctacaaggagattagcagctgctggagcattattgtgaaactaccaagtcttatatgatagcaatatcttt

SEQ ID NO: 118819 - DNA, 654 bp, Zea Mays
acacacacctcaagctcacatacactccagatgagagagttggggtcctctctctccccgccgtctgtaaccgtgctcaccatcgcagcccacgagctccgctgccggtgcgctccatacgacggctacaatggagacgacgacttcgagctcacgcctctccttttcaggacccggcgcagcgcgcgcaccgagcgtccaagaatcgtcgccgtccaggtcgcggccattacggtcgcccagccgcagcctccccagcgccctcgccgcggagcgccaagcggcgtcgcggcggtggcggccacgccggcgccagcgccacaaaggaagaagcagcagcagcaggtgcggtggcacgacatggcgttcgggaccgtgcgcctgccggcggccacgagcatgggcgagatcaggaggcgcttgagggcgcggcaggctctgcaggctggcggcgccgcgaacgagccgtcctcctccgccgcggcgtgggcaccatggaggctcatacggtcgctgagctgcaggggcgtcgaggccgtgtcggctgccgcggcgccggtcaggctggtctagccgtctaggtacgtaattaacggagtgaggtggacgcacggaaggtgttggtgatctatcgaggtctggacctggtactgc

SEQ ID NO: 118820 - DNA, 142 bp, Zea Mays
ctttctcattccccctccctgcaaagctcattcacatttccattcccggctatcacgtgtctttctcattctccctcccacaaagcctattcccattcccacgtgcatcccacgcctagctaaaattaaattaaaaaaatag

SEQ ID NO: 118821 - DNA, 1426 bp, Zea Mays
agagctcagcgaccatttcctaacaacccaacaattcaagcagcaaccctcgacgaatatacattttacaaaccactcccttacaagcccagtcctctcctccgtcaaatttggcacatttaagcaactaatttgcaatttcccaccaaaatgctgcatcatcacctttgttgcgaagacgacaagtatagtaagctgtaagcaccggacactgcaaaaatcttgcacacgcaaaccgcagccaagcaagcgttcccctccctgtgatcgcgatggggtccaccgagaagcaggagccggaggcgtcgccggagatcatcttccggtcgaagctcccggacatcgccatcaccaacaccctcccgctgcaccgctactgcttcgagcggctccccgaggtgggcgagaggccctgcctcatcgacggcggcacgggcgccgtgctcacgtacgccgaggtggaccgcctgacccggcgcctggccgcggcgctccggcgcgcgccgctggggctcgggcgcggctcggtggccatgaacctcatgctgaactcggcggagttcgtgctctccttcttcgccgcgtcgcgcgtgggcgccgcggtcaccaccgccaacccgatgtcgacgccgcacgagatcgccgggcagatcgcggcctccggcgccaccgttgtgttcaccgagtccatggccgcggacaagctccccgccatgggcgacaagctcacggtcgtcctcatcgacgcgcgccgcgacgggtgcctccacttctgggatgacgtcatggccagcgtccccgacgaggaggccggcggcggcgagcaagacttggacttcgaccccgacgacgtggtggcgctgccctactcgtccggcacgacggggctgcccaagggcgtgatgctgacgcaccgcagtctgagcacgagcgtggcgcagcaggtggacggcgacaaccccaacatcggcctgaccgccgccgacgtggtcctgtgctcgctccccatgttccacatctactcgctcaacaccatcctgatgtgcgggctgcgcgtgggcgccgccatcgtggtggtgcgccgcttcgacctgcgcaggatgatggagctggtggagcgccaccggatcaccgtcgccccgctggtgccgcccatcgtggtcgccgtggccaagagcgacgaggcggcggcgcacgacctgtcgtccgtccggatggtgctctccggcgccgcgcccatggggaaggacatcgaggacgcgttcgtggccaagctccccggcgccgtgctcggacaggtacgttcgtgccagaccggccaccaaacggaaccaccggccgtttttcgtagcttgcttgtctcacttgggttgttttctctccggccaaacgcgttcatagttcggttgtctcatagttcggggag

SEQ ID NO: 118822 - DNA, 1620 bp, Zea Mays
agagctcagcgaccatttcctaacaacccaacaattcaagcagcaaccctcgacgaatatacattttacaaaccactcccttacaagcccagtcctctcctccgtcaaatttggcacatttaagcaactaatttgcaatttcccaccaaaatgctgcatcatcacctttgttgcgaagacgacaagtatagtaagctgtaagcaccggacactgcaaaaatcttgcacacgcaaaccgcagccaagcaagcgttcccctccctgtgatcgcgatggggtccaccgagaagcaggagccggaggcgtcgccggagatcatcttccggtcgaagctcccggacatcgccatcaccaacaccctcccgctgcaccgctactgcttcgagcggctccccgaggtgggcgagaggccctgcctcatcgacggcggcacgggcgccgtgctcacgtacgccgaggtggaccgcctgacccggcgcctggccgcggcgctccggcgcgcgccgctggggctcgggcgcggctcggtggccatgaacctcatgctgaactcggcggagttcgtgctctccttcttcgccgcgtcgcgcgtgggcgccgcggtcaccaccgccaacccgatgtcgacgccgcacgagatcgccgggcagatcgcggcctccggcgccaccgttgtgttcaccgagtccatggccgcggacaagctccccgccatgggcgacaagctcacggtcgtcctcatcgacgcgcgccgcgacgggtgcctccacttctgggatgacgtcatggccagcgtccccgacgaggaggccggcggcggcgagcaagacttggacttcgaccccgacgacgtggtggcgctgccctactcgtccggcacgacggggctgcccaagggcgtgatgctgacgcaccgcagtctgagcacgagcgtggcgcagcaggtggacggcgacaaccccaacatcggcctgaccgccgccgacgtggtcctgtgctcgctccccatgttccacatctactcgctcaacaccatcctgatgtgcgggctgcgcgtgggcgccgccatcgtggtggtgcgccgcttcgacctgcgcaggatgatggagctggtggagcgccaccggatcaccgtcgccccgctggtgccgcccatcgtggtcgccgtggccaagagcgacgaggcggcggcgcacgacctgtcgtccgtccggatggtgctctccggcgccgcgcccatggggaaggacatcgaggacgcgttcgtggccaagctccccggcgccgtgctcggacaggtcattttcagaggtacgtactggttcagattctggagacttctacagaaggaggaatcacatcaacaaatcctcgatgtctgtcaagcgttggaagtggtggcgatggaagtctttgcaaatcatggatggcgctcaaatgcaagaattgaggatgcctagagttacctacattctagtgattttgcttctttaagttagtttcattatctatgcaacgtttctcggatgtaataattgtcttgtgtgggctgtacgcattaccatgctaaagccggaactcttgtttccataatcaaaaaaaaaaaagttcggttgtctc

SEQ ID NO: 118823 - DNA, 1928 bp, Zea Mays
gctgtaagcaccggacactgcaaaaatcttgcacacgcaaaccgcagccaagcaagcgttcccctccctgtgatcgcgatggggtccaccgagaagcaggagccggaggcgtcgccggagatcatcttccggtcgaagctcccggacatcgccatcaccaacaccctcccgctgcaccgctactgcttcgagcggctccccgaggtgggcgagaggccctgcctcatcgacggcggcacgggcgccgtgctcacgtacgccgaggtggaccgcctgacccggcgcctggccgcggcgctccggcgcgcgccgctggggctcgggcgcggctcggtggccatgaacctcatgctgaactcggcggagttcgtgctctccttcttcgccgcgtcgcgcgtgggcgccgcggtcaccaccgccaacccgatgtcgacgccgcacgagatcgccgggcagatcgcggcctccggcgccaccgttgtgttcaccgagtccatggccgcggacaagctccccgccatgggcgacaagctcacggtcgtcctcatcgacgcgcgccgcgacgggtgcctccacttctgggatgacgtcatggccagcgtccccgacgaggaggccggcggcggcgagcaagacttggacttcgaccccgacgacgtggtggcgctgccctactcgtccggcacgacggggctgcccaagggcgtgatgctgacgcaccgcagtctgagcacgagcgtggcgcagcaggtggacggcgacaaccccaacatcggcctgaccgccgccgacgtggtcctgtgctcgctccccatgttccacatctactcgctcaacaccatcctgatgtgcgggctgcgcgtgggcgccgccatcgtggtggtgcgccgcttcgacctgcgcaggatgatggagctggtggagcgccaccggatcaccgtcgccccgctggtgccgcccatcgtggtcgccgtggccaagagcgacgaggcggcggcgcacgacctgtcgtccgtccggatggtgctctccggcgccgcgcccatggggaaggacatcgaggacgcgttcgtggccaagctccccggcgccgtgctcggacaggggtacggcatgacggaggccgggccggtgctgtccatgtgcctggcgttcgccaaggagccgttcagggtgaagtcgggcgcgtgcgggacggtggtgcgcaacgccgagctgaagatcgtggacccggacaccggcaggtccctcgcccgcaacctgcccggggagatctgcatcaggggccagcagatcatgaaaggttacctgaacaacccggaggcgacgaggaacagcatcgacgccggcgggtggctgcacacgggcgacgtcggcttcgtggacgacgacgacgagatcttcatcgtcgacaggctcaaggagatcatcaagtacaagggcctccaggtggcccccgccgagctggaggcgctgctcatcacccacccaggcatcgccgacgccgccgtcgtcgggaaacaagtggagccggagatcggggagatcccggtggccttcgtagccagggccaaagggaggagcgacgacgggctcaccgaggacgacgtgaagcagtttgtggccaaggaggtggtctactacaagaaggtccgcgaggtggtcttcgtcgacaggatccccaaggccccgtcgggcaagatactgcgcaaggagctcaggaagcggcttcagcagcaccagcaccagcaagccgtgtgatgtacatcatatttggggtgacgtactgtgctccgtgtttttggtctagtttggcggtgggtgatggtgattaattgtctacctcataatgttcattttgttttcagacgtaatttccatcagtgtgcgcattaaaaatctaatgcattttcattctgttcttcaca

SEQ ID NO: 118824 - DNA, 118 bp, Zea Mays
aaaatacaaaatatactaaaacctaggatgatgcaagatgtatatacttatattaactaatttactcgtttacacaaacgttgtacttatgcaaaacacatgtttgtttatttattta

SEQ ID NO: 118825 - DNA, 865 bp, Zea Mays
tgccttcttccccttctccacgcaagtctgtagcacgtaacaactggtatcagaggagtccgttcctccgcgatcgccgatctggaacccgccgccaaccacgactacttcacgaggctccagcgacgtaagggtaccatggatccctcgtccaagctcctgctcgaggagatcgataagaagctggtggcgatggacctcaagtgggagcagcggttcggagacttcaaccgcgctaaggaggatcgcctgacggccctggagaactcgtgcgccgagttcgacaattggcgtcccaaggtcgacgccgccatggaagatgtcaagctggagctccacaagatgaacaagcagtgggatcacgcagcgcggtatatggcgggggcggattctggcatcctcggcaagccggatccactgcttgatcctcgacagcaagctccgactcatgacggccccattgggcaccgcgatgaatcacgccaccgggagcaggggtatgggtcggtgaccttcacccctggcccggtcaagggtatgcatcatgtgccccatctaccgccttctcctcgttatcatggtcctgtgtttgatcatatgggtagtcgcacacgaaattctgatatgccaatgagctctctgggcaagttaccaaaattgccattccctatttttgacggggataatccacgtttgtggatctatcgctgtgagagttacttcgacatgtacgaagtcgaacccgaagcctgggtgaaggtggcttccatgtacctcgcgccacatgtagcatgctggttccagtctgttgagcgcaaacaaccccgattgtcttggccgctgctctgcagattactacacgagc

SEQ ID NO: 118826 - DNA, 1261 bp, Zea Mays
agattgtaattagcccccaacgcaccagggcccccgtgtcgccctccagcttgggcgactcgggctgccgcaccctctcctcctctctcctctctccagctgcaccgccaccggagtaggccgccgacaaggatgtgcggtcggccaggatggcggcggcggggctcgcggatggcccatgggggaacctcagctggacggatctgcgacggtcgaggaggttctcggcgctggcgcggctttccaggggcggcgaggttctcgtcgcaggggcgcgactggcggagttggcccttggcgtcggcacctcgaggtggttctgtcggagggcttggtggcccgccgcacgcggttttgcgggctaggtggcggatccggaccctcgccagagctagaccagcaacccgatttgggcgggcggtggccgcagtagtgcagtgctgggctcatggtggtgtggagtgtggggtgaccacggcgtgctcctcgtgctggtgtggccgcggcgttgtggggcactaagatattgggctgctgcacgcctacggcggtggcctggcttggtggcggcttggaggtgtttgctgtggtggcggctgtgtgtcctgcggcggcgatgtgccgggccgccgggcaggcttgccgggcgggcgagtggcagcgcatcgtggcatcagcaattcagaagaagggtggtgttgcggctagcggtggtcaccgctcgaggtcgtttctggtggtggcaacgacgatcatcatctgggcaggcagccacatgttcttgcgggtttgttgtgtagatgcacgcagtgaacctcggcggctggccctgcaaggcagtggccattgcggtgagggactgtgtcgaaagacggcgcctgcagcagcgacaacgcgtgataacaaggcttgcagcgaaatgtggcggctagctttgctttgcaggggctatcccggtgcagggcaacgtcggaagacggcgcaagcttcttttgtggcctaccagtgcgatggcggtggtcgtgtgcttgtgtcagagctttggtgatggcttctttgggttctggggtagttttgcataccttccaaaagtaaatcaagtaacgggtcggtggcaatgaatgaagtgttgcggcggatgtggtgaggcccccacgcgttacgctggtggcgagtaccaattgtggagtccaacggcaaatgtggcaaggcccatgcgcgttgtgttggaacaggagccaaaatccagtggatttcaccc

SEQ ID NO: 118827 - DNA, 2700 bp, Zea Mays
tcttcagctcatgaaatccagtacgacgattatcccacactattctcctagaagtacaagaatttttttcccaaaataaatgagagggaatgatgaagagaaatacattatcagttaatggacacttctctctcttttattttgaactaataactgttttagtgcggtagtgccatcctgtcagctcgcattcacacacactccccagtccccactcttgctatattggcctcgtctcgtctcgtctccgtttctggcaatccccatccccaaatctcccatggcttcttcccctccccagccactcacccgcaccgtcctcgccgctaccctgctcctcctcttgcacaatgccgccgccagagccgacggcgcgtcgccggcggtgaacccattcacggcgaaggcggcattcatccgatactggaaccgcaaggtgcccaacaaccgcccgcacccggccttcttcgtcgccaaactctccccgctcccggccgctgactccgcctccttcccatccgcgctgcccgacatccgcgccagcctacccgcgctctgcaccaaagccgcgctcctctgccccgggccggctactactgatgcggcgtcgctgacatcgggccgcaggggcgggggacctttcaagggctacaacaacgccaacttctccaactacggcaccggcggcgtagcggggaccgactcgttccagaagtactccccggacctcaacatcgccgccgacagcttccgccgctacggccgggactcgtcgggacgcgccgacagcttcacctcttacgaggccgacggcaacgtcgtgaccgccaacttcacctcctacgccggcggcgccacgggtggttcgggctccttcgccgcctacgccgccgagaccaacgtcccggactccaccttcaccaactacgacgccgccgccaacggccgcggccggagcttcgcgtcctactcccaggaggcgaaccatggggagaacggcttctccggctacggcaagaacggcaacggcgtgcgcgagacgttcaagtcctacggcaatgagtccaacgtgctggcctccggcttcgccaactacgggcagtccgccaacggcgccacggacaccttcacgggctacggcgtggaggggaacgtccctgagaacaggttccggagctacggcgccggcggcaacgctggcgtcgacaccttcaagaattaccgcgacgacggcaacgtcggcgacgacaggttcacctcctacgccaagggcgcaaacggcggcgcggcggagttccagagctacggcaactcggccaacccgggcagcaccatcttcaagggctacggcgagggcaccaaccccaaccaccacattgggttcaaggagtacgccggcgagaacaacaccttcaagggctatgccaagagcggtgtggacttcaaggggtaccacaacaccaccgtctccagctccaccgccgcggtgctgacggtgtcggcggaggcagcggcatcgatgcatcacgagcacctgaagtggtcgccggagcccgggaagttcttcagggagcgggagctcgtggccgggaaccgaatgccgatgccggacatcagggacaagatgccgcccagggcgttcctgcccagggccatcgccgcgaggataccgttcgagcccaacgccgtgtcggaggccttcgggctgcccctcgacacggcgctggggaaggccgtggcgtccacggtggcggagtgcgagcgcgcgccgagcaagggcgagacgaagcggtgcgcgacgtcggccgaggacgtggtggacttcgcggtggaggtgctgggcgacgacatcgtggtgcgcagcacggcgtccacggcgggcggcggcgggcgcgtccagctgggcgccgtggccggcgtggacggcggcagggtgacgcggtccgtgtcgtgccaccagagcctgttcccgtacctggtgtactactgccactccgtgcccaaggtgcgggtgtacgaggccgacatcctggccgccgatggctccggctccggcgagaagatcaaccgcggggtggccatctgccacctggacacgtccgactggagcccggcgcacggcgcgttcgtggcgctcggcggcaagcccggcgaggtggaggtgtgccactggatcttcgagggcgacatgacgtggacagtcgcggactgatggagtgagtgacgttcctctctgcctgcttgcaagagcacacgactaagaagaactactaagaagaattattttctccctctctctttctctctctcgcaaattattatttttgtccactcctttctcgatctaccttatatgacgaaggtggtaagaattggtccaggagaaaaaaaaaggtttggcgaacgatgagaatgttgtaaactgtaaatcttgggtaggggaatagctggcgatgtgattgccttggatcaaatcgctgctgttgttgtcatgatggtggtgcaaacaaagggagtttctgttattccaaaacaaaagcttggtgaaatttcatttcagcagtataaactgtaaagtgggtgtgcttcaagtacgccgtgtcattttcggtgtgtgtgtgtatgtatgtagcggatctcgcagaagcaaatagttccttccacggcctcatctcagaggaaaagcgagcagcttgttgt

SEQ ID NO: 118828 - DNA, 3058 bp, Zea Mays
ttcgtcaaattcatcttcttcgtcttcatcgcagcatcggcgctccatcttctgctccctcccccacttcgtgctcgggttccatcttccgctccttcccccactcgcggtcggcacgcaggctcggccggcgtcagcggctccccatcccgccagtacaggaagagggccgccgcttggagctcgcgggaggtagcgtcgccaccgccgcatggaggtcccgaatggctgaatcctgaccgctgcctggagagtctcgcgcctaaatcacatcatattgagcttctcgcctttggatccgtcttattatttgctcacactgaagaattagtttgcactttggaggaaaatgagtggtgctccaaagaggttgctcgaggaaggtagtcactccacaccaacaaaacgccctttggatgacagcagcttgtattcgagtcctgggaaatttattcagtccggtggcagtgatttccatggttcttctgaacatgatggtagatttgcgaaatttcaacgtgtggagtctcgtgatgataagaggccatctgtacatcggatgcctgttggctccactaactttgctgttcaccccatctcgtctgacagcagattagagtcaaagcaaaataaagatgcacgggacagtaaggcagatgaccgcgaaacaaaagtcgatgccagggacgttcatagtgattcaaggattgaatttcaggctaataaaattgagagtgatgtaaaggtagacaatagagcagatgaaagtgaaataagggctgacaggaggggccatcctgattacagaactgacataaaatttggtaaggatagtcattctactgttccagcaaacataaactggaaggacaacaaggagcacaggggtaaaagacattttgaaccgcccgctgatactgtggattggcgtttgccccgtcctagtttacaaagtatcgatgaagctcccaaaggtccaatttctgtggaaggacgtaattccaaggacacaaatgaatctgctggtgattacaaagctgaaccaaaaaacgaagataggttcagagacaaggacaggaaaaagaaggacgagaagcatagggacttcggtgcaagagaaggcgatagaaatgatcgtcggaccggtgtaccacttggcagtagtggtgttgagcgaagagaaatgcaaagggaagatagggatgctgagaaatgggacagggaaagaaaagattccctgcgagacaaggaaggcaatgatagggagaaggattctgctaggaaagattcatctgtagtaattgcaaaggataaccctatactagaaaaagcttcatctgatggagctgttaagagtgctgagcatgagaatacgacaacagaatccaaggcacctaaggatgatgtatggaaagctcacgatagggatcctaaggacaagaaaagagagaaggatgtggatgcaggagactggcttgagcaacgaaacaaatataatgataaggaattagatgacaatgccattgaaggagatatggagaaagataaggatgtttttggaagtgtccaacgaaggaggatggtgcgaccaaggggaggtagtcaagtatctcagcgtgaacctcgattccggtccagaatgcgtgatggtgaagggtctcaaggtaagtctgaggtgtctgccattgtttataaagctggggagtgcatgcaggagcttctgaaatcatggaaagagtttgatgtaactcaggatgctacaattgctgaaagcctacaacatggtcctactcttgaaatccgaatacctgcagaatttgttacttccactaaccgtcaggtaaaaggtgctcagctctggggaacagatatttatacaaatgattcagatcttgtggctgtgctaatgcatactggttactgctcccctacatcctcccctccaccatccgccattcaagagcttcgtgcaactgttcgagttctaccaccacaagagagttatacttcaacactgaggaacaatgtgcgttcacgtgcttggggtgctgggattggttgtagctttcggattgaacgttgctgcattttcaagaaaggtggtggcaccattggtcttgagccacgccttagccacgtgtcagctgtggagcctactctcgccccagttgcagttgagcgtacaatgacgacaagagctgcagcttctaatgcattgcggcaacaaagatttgtccgtgaagtgactatacagtacaatctgtgcaatgagccatggttgaaatatagtataaacattgtggcagataagggattgaaaaagtctctttatacttctgctagactgaagaaaggagaagtcatatatttagaaacacacattaataggtatgagctttgcttcagtggagacaagccttgcattattggatcaagctccaatgcatctgaatcagaaacggagaaacaccagagcgggagtcaccattctcagaatggtgacagaggctgtgtggagcatgaactccgggatgtgttccggtggtcccgctgtaagaaggccatgcctgaaagtgccatgcgctccatcggtatcccactaccagcagaccagttagaggtattgcaggataacctcgaatgggaggatgtgcagtggtcacagaccggtgtgtgggtatctgggaaggagtatcccctcgcccgagtgcacttcctctcggcgaactagaagcagatgatgttggctgtgttcgtggggggaaaaaagaaggtgatgttggagcaacaaaggaattaatatttcttgtggacaagacagagtcgggaacattgcgtttgcttgtacgggtcaccatgccatgtgtacaaaagaaggatcagttggttagtgttgatatggtagccttactgtgttgacaataacactattcattaggctggcctgctgcccatgcatgtgccaaagctatatttgctggttttaggtcctgtgtcggtacgcaaataacttgcaatatgcttgcttctcaagtaatctggccatccttattggaac

SEQ ID NO: 118829 - DNA, 3094 bp, Zea Mays
ttcgtcaaattcatcttcttcgtcttcatcgcagcatcggcgctccatcttctgctccctcccccacttcgtgctcgggttccatcttccgctccttcccccactcgcggtcggcacgcaggctcggccggcgtcagcggctccccatcccgccagtacaggaagagggccgccgcttggagctcgcgggaggtagcgtcgccaccgccgcatggaggtcccgaatggctgaatcctgaccgctgcctggagagtctcgcgcctaaatcacatcatattgagcttctcgcctttggatccgtcttattatttgctcacactgaagaattagtttgcactttggaggaaaatgagtggtgctccaaagaggttgctcgaggaaggtagtcactccacaccaacaaaacgccctttggatgacagcagcttgtattcgagtcctgggaaatttattcagtccggtggcagtgatttccatggttcttctgaacatgatggtagatttgcgaaatttcaacgtgtggagtctcgtgatgataagaggccatctgtacatcggatgcctgttggctccactaactttgctgttcaccccatctcgtctgacagcagattagagtcaaagcaaaataaagatgcacgggacagtaaggcagatgaccgcgaaacaaaagtcgatgccagggacgttcatagtgattcaaggattgaatttcaggctaataaaattgagagtgatgtaaaggtagacaatagagcagatgaaagtgaaataagggctgacaggaggggccatcctgattacagaactgacataaaatttggtaaggatagtcattctactgttccagcaaacataaactggaaggacaacaaggagcacaggggtaaaagacattttgaaccgcccgctgatactgtggattggcgtttgccccgtcctagtttacaaagtatcgatgaagctcccaaaggtccaatttctgtggaaggacgtaattccaaggacacaaatgaatctgctggtgattacaaagctgaaccaaaaaacgaagataggttcagagacaaggacaggaaaaagaaggacgagaagcatagggacttcggtgcaagagaaggcgatagaaatgatcgtcggaccggtgtaccacttggcagtagtggtgttgagcgaagagaaatgcaaagggaagatagggatgctgagaaatgggacagggaaagaaaagattccctgcgagacaaggaaggcaatgatagggagaaggattctgctaggaaagattcatctgtagtaattgcaaaggataaccctatactagaaaaagcttcatctgatggagctgttaagagtgctgagcatgagaatacgacaacagaatccaaggcacctaaggatgatgtatggaaagctcacgatagggatcctaaggacaagaaaagagagaaggatgtggatgcaggagactggcttgagcaacgaaacaaatataatgataaggaattagatgacaatgccattgaaggagatatggagaaagataaggatgtttttggaagtgtccaacgaaggaggatggtgcgaccaaggggaggtagtcaagtatctcagcgtgaacctcgattccggtccagaatgcgtgatggtgaagggtaagtctgaggtgtctgccattgtttataaagctggggagtgcatgcaggagcttctgaaatcatggaaagagtttgatgtaactcaggatgctacaattgctgaaagcctacaacatggtcctactcttgaaatccgaatacctgcagaatttgttacttccactaaccgtcaggtaaaaggtgctcagctctggggaacagatatttatacaaatgattcagatcttgtggctgtgctaatgcatactggttactgctcccctacatcctcccctccaccatccgccattcaagagcttcgtgcaactgttcgagttctaccaccacaagagagttatacttcaacactgaggaacaatgtgcgttcacgtgcttggggtgctgggattggttgtagctttcggattgaacgttgctgcattttcaagaaaggtggtggcaccattggtcttgagccacgccttagccacgtgtcagctgtggagcctactctcgccccagttgcagttgagcgtacaatgacgacaagagctgcagcttctaatgcattgcggcaacaaagatttgtccgtgaagtgactatacagtacaatctgtgcaatgagccatggttgaaatatagtataaacattgtggcagataagggattgaaaaagtctctttatacttctgctagactgaagaaaggagaagtcatatatttagaaacacacattaataggtatgagctttgcttcagtggagacaagccttgcattattggatcaagctccaatgcatctgaatcagaaacggagaaacaccagagcgggagtcaccattctcagaatggtgacagaggctgtgtggagcatgaactccgggatgtgttccggtggtcccgctgtaagaaggccatgcctgaaagtgccatgcgctccatcggtatcccactaccagcagaccagttagaggtattgcaggataacctcgaatgggaggatgtgcagtggtcacagaccggtgtgtgggtatctgggaaggagtatcccctcgcccgagtgcacttcctctcggcgaactagaagcagatgatgttggctgtgttcgtggggggaaaaaagaaggtgatgttggagcaacaaaggaattaatatttcttgtggacaagacagagtcgggaacattgcgtttgcttgtacgggtcaccatgccatgtgtacaaaagaaggatcagttggttagtgttgatatggtagccttactgtgttgacaataacactattcattaggctggcctgctgcccatgcatgtgccaaagctatatttgctggttttaggtcctgtgtcggtacgcaaataacttgcaatatgcttgcttctcaagtaatctggccatccttattggaacactgcttcctctgtccctgaataatagttttaacaagttcaaaa

SEQ ID NO: 118830 - DNA, 105 bp, Zea Mays
atgctttgtgaccgaccaacccaagtgctcaatgacaacggcaagccgccacgtgccttgttctgtcttacctctaaagacaagatcgaggtaatgagatggatg

SEQ ID NO: 118831 - DNA, 75 bp, Zea Mays
gagatggaggtgcaggggtcggaaccgggcgcggacagcggatggagacgatggttggtgttgcagatgagcggg

SEQ ID NO: 118832 - DNA, 764 bp, Zea Mays
gtccaagctatcaagcacagaagcaggaaagaaggtcacagagatacttctttctacaaatttttggaacttagtccaagattgtattcgtgcatcacaaccactcctcattgtgttgcgaattgttgatggtgatgaaaagccagccatgccagaggttgccgctgccatggatatggcaaaagcaaagatcacttcgggttttgaaggtagagagacaatgaagaggaagttgcttgtcattattaatcggaggtggcaagatcaaatggaggtgaagttgtatggggctgcattgctattaaatccaaataagttctttgaacttcaaaaaatgatccaacaaaaagggaggttggtaagctgagggtagcattcaatgaggtgctatggaagatggttgaagattatgaccttcaagttataatcagtaaacaagctgatgagtatatgaatatggctggccctgccttctcatcaccattagcaattagagaaatacaaaaaaagagccccagtaagttccattacctcattaatcatttaagttttgtatggttggcaacaataattcaacttctcttctctttttttagttcgttggtgggatgcatatggtggccttgcatttgagattcaatcctttgcaaagcgcatcgttagcctttgttgttccgcttccggatgtgagcgcaattggagcacttttgaatttgtaagtaaaaagttgtcatttcagtttatatctttttaattgattttag

SEQ ID NO: 118833 - DNA, 859 bp, Zea Mays
cgtttctttaccctaacgccgccgccgcttcttcgtctcccatcatctccctccctttatcgcgctcggcaccaggcaacacgaacgcatcgccggtgggatcccggattggccggtggacgagttcttccgcgacgttagtgacttcaatgggcgagagtgacaccaccaagcgggaagcctggggacaaggtgggtgactccgcgtactaccgctcgttggagaaggatctggatgccaacgagctgtttggccgagtacaggagatccgatctggacgccagcgctaccctctccagtccccacaaacggcctccggccttcactggcaacacggtagcctattatgtcccgccgtgagatcagttctcgcagaggttcttcaaggattcttcaaagttgctcgattttttttcaggtgctcgacctcggggagaacctgctctccggcgtgctccacccgacgctgttcgacaacctcaccagccttttgaagtggatttgtttggcttccaaatggtttgttggtcctaaaatagtcagaatcacatgacatctgtgctatagatatggacctcggtggttttctccacattaggaaagctagaagagccttttgaactcagtttttttgctaacagtggtgttatggtgaaacagagttttgtgtgtatgtaccaacaactaaaatgtaaacacgacattatcatagttgagtacaggaataattatctcttatatcttattgcaaaatctgaaacagttctcctgtagatggttagcttgcattttacgctacaattacctcagatcacttgttgtatcttacaccaatttacaaaatttcttgatgcgttt

SEQ ID NO: 118834 - DNA, 1627 bp, Zea Mays
cgtttctttaccctaacgccgccgccgcttcttcgtctcccatcatctccctccctttatcgcgctcggcaccaggcaacacgaacgcatcgccggtgggatcccggattggccggtggacgagttcttccgcgacgttagtgacttcaatgggcgagagtgacaccaccaagcgggaagcctggggacaaggtgggtgactccgcgtactaccgctcgttggagaaggatctggatgccaacgagctgtttggccgagtacaggagatccgatctggacgccagcgctaccctctccagtccccacaaacggcctccggccttcactggcaacacggtagcctattatgtcccgccgtgagatcagttctcgcagaggttcttcaaggattcttcaaagttgctcgattttttttcaggtgctcgacctcggggagaacctgctctccggcgtgctccacccgacgctgttcgacaacctcaccagccttttgaagtgtaagatttgttattctttagttatataatttctagtagagacaacttaagtattacagctatgtgttaggaagggttcatgaaaaagaatgaattttgtattcagcatatgtgcataatagggcttcgattctcaagtcatgtaatattggaagtatgcataagtgcataacaaagtttattaaagaaagaaaagtcctcacttgctggcagtttgtccattgtatttttgtaaattaaggttattaaagaaagaaatgtcctcacttctatgggttaatttatgatcttagcacttgctacgactataaagtttatataggttcacagcttcttactgtccactaggcttctccagctgcattgtttgtaaggaacagaaactagctaactgttgtgacttaattactcatcaactttcacctgccttaagccttttaggttcacttgtcttatatataccatggtaaaccacaccatgaatatgccataaataagtaacaagagtgactagcaactcagcacacacaggttgtcaggatccttcacgtacacctttcatgttcttgcaaccttgattctacatgcttcaggtagtctagaatatcagattgttgtatatatttaacaccttctgtaccatcaaattcaaaaatgcactcaagaaaaggcttttcaaaactcttagaatgtattccaagagcagtgcacatattcagaagctaattatgtaatttcttatatgttgctttgaggcaaattgaacagggatttgtttggcttccaaatggtttgttggtcctaaaatagtcagaatcacatgacatctgtgctatagatatggacctcggtggttttctccacattaggaaagctagaagagccttttgaactcagtttttttgctaacagtggtgttatggtgaaacagagttttgtgtgtatgtaccaacaactaaaatgtaaacacgacattatcatagttgagtacaggaataattatctcttatatcttattgcaaaatctgaaacagttctcctgtagatggttagcttgcattttacgctacaattacctcagatcacttgttgtatcttacaccaatttacaaaatttcttgatgcgttt

SEQ ID NO: 118835 - DNA, 1358 bp, Zea Mays
cgtttctttaccctaacgccgccgccgcttcttcgtctcccatcatctccctccctttatcgcgctcggcaccaggcaacacgaacgcatcgccggtgggatcccggattggccggtggacgagttcttccgcgacgttagtgacttcaatgggcgagagtgacaccaccaagtgcctgacagcgggaagcctggggacaaggtgggtgactccgcgtactaccgctcgttggagaaggatctggatgccaacgagctgtttggccgagtacaggagatccgatctggacgccagcgctaccctctccagtccccacaaacggcctccggccttcactggcaacacggtggctccgacaacaccaccttcatgccaaacatatgcagatcaagttgcttatgtcctcaatttttttcaggtagcctattatgtcccgccgtgagatcagttctcgcagaggttcttcaaggattcttcaaagttgctcgattttttttcaggttgcagagattaattcagcacgtgccaccaatattgagcttttatttcttgtttgtgtatttaaaaggctaaaatgtcattttcggaaggaataattcattcagtgatttaactggaatttcacgcttcacgtttagttatcaaaactaccaataaattttcattcagtgatttaaccgaaatttatttatgtgagaagtgatttagactagctttatgctgaaagaaaattcaagcatttgctgaaagttgatgtgcaacttgtccaaattttgtacaaagaatgttttttttgacatggttcctttgaaaatacacccttatagtacattctaaaaatcgtcacaaaattctatacaagaagttcatctagcatagtgcatattaaccagagttagaatttgttccacctccaggtgctcgacctcggggagaacctgctctccggcgtgctccacccgacgctgttcgacaacctcaccagccttttgaagtggatttgtttggcttccaaatggtttgttggtcctaaaatagtcagaatcacatgacatctgtgctatagatatggacctcggtggttttctccacattaggaaagctagaagagccttttgaactcagtttttttgctaacagtggtgttatggtgaaacagagttttgtgtgtatgtaccaacaactaaaatgtaaacacgacattatcatagttgagtacaggaataattatctcttatatcttattgcaaaatctgaaacagttctcctgtagatggttagcttgcattttacgctacaattacctcagatcacttgttgtatcttacaccaatttacaaaatttcttgatgcgttt

SEQ ID NO: 118836 - DNA, 1617 bp, Zea Mays
cgtttctttaccctaacgccgccgccgcttcttcgtctcccatcatctccctccctttatcgcgctcggcaccaggcaacacgaacgcatcgccggtgggatcccggattggccggtggacgagttcttccgcgacgttagtgacttcaatgggcgagagtgacaccaccaagcgggaagcctggggacaaggtgggtgactccgcgtactaccgctcgttggagaaggatctggatgccaacgagctgtttggccgagtacaggagatccgatctggacgccagcgctaccctctccagtccccacaaacggcctccggccttcactggcaacacggtggctccgacaacaccaccttcatgccaaacatatgcagatcaagttgcttatgtcctcaatttttttcaggtgctcgacctcggggagaacctgctctccggcgtgctccacccgacgctgttcgacaacctcaccagccttttgaagtgtaagatttgttattctttagttatataatttctagtagagacaacttaagtattacagctatgtgttaggaagggttcatgaaaaagaatgaattttgtattcagcatatgtgcataatagggcttcgattctcaagtcatgtaatattggaagtatgcataagtgcataacaaagtttattaaagaaagaaaagtcctcacttgctggcagtttgtccattgtatttttgtaaattaaggttattaaagaaagaaatgtcctcacttctatgggttaatttatgatcttagcacttgctacgactataaagtttatataggttcacagcttcttactgtccactaggcttctccagctgcattgtttgtaaggaacagaaactagctaactgttgtgacttaattactcatcaactttcacctgccttaagccttttaggttcacttgtcttatatataccatggtaaaccacaccatgaatatgccataaataagtaacaagagtgactagcaactcagcacacacaggttgtcaggatccttcacgtacacctttcatgttcttgcaaccttgattctacatgcttcaggtagtctagaatatcagattgttgtatatatttaacaccttctgtaccatcaaattcaaaaatgcactcaagaaaaggcttttcaaaactcttagaatgtattccaagagcagtgcacatattcagaagctaattatgtaatttcttatatgttgctttgaggcaaattgaacagggatttgtttggcttccaaatggtttgttggtcctaaaatagtcagaatcacatgacatctgtgctatagatatggacctcggtggttttctccacattaggaaagctagaagagccttttgaactcagtttttttgctaacagtggtgttatggtgaaacagagttttgtgtgtatgtaccaacaactaaaatgtaaacacgacattatcatagttgagtacaggaataattatctcttatatcttattgcaaaatctgaaacagttctcctgtagatggttagcttgcattttacgctacaattacctcagatcacttgttgtatcttacaccaatttacaaaatttcttgatgcgttt

SEQ ID NO: 118837 - DNA, 672 bp, Zea Mays
gggatgaacaggggcgcgctctccttcgtgacgcaggccagcacgtgccgcttctcgtactgcatctccgaccgggacgacgccggcgtgctgctgctcggcaacagcgacctccccttcctgccgctcaactacacgccgctgtaccagcccaccccgccgctcccctacttcgaccgcgtggcctactccgtccagctcctcggcattcgcgtcggcggcaagcccctgccgatcccgccgtcggttctcgcgccggaccacaccggcgcaggtcagacgatggtggactccggcacgcagttcaccttcctcctcggggacgcctactccgccgtcaaagccgagttcttgaaacaaacgaagcccctcctccccgcgctcgaggaccccagcttcgcattccaagaagcgttcgacacctgcttccgcgtgcctaaggggcgcccgccgccgtcggcgaggctcccgcccgtgaccctgctgttcaatggcgcgcagatgtcggtggcgggggacaggctgctgtacaaggtccccggcgagcgccggggagccgagggcgtgtggtgcctgacgttcgggaacgcggacatggtgcccctgaccgcgtacgtgatcgggcaccaccaccagatgaacctgtgggtcgagtacgacctgccgcactga

SEQ ID NO: 118838 - DNA, 423 bp, Zea Mays
atggaaaatggcacaggggcagcgcgagcagaagagcagggggagctcgcccttgaaacaagggaaggagagcagaggttgcgtggttcggcgaggccgcagccatggataaaactggagcagggagggaacggcgtccatgggaggagttggggtcgaccatgggagaggctggaaacggccatgggagggagctggggactgccggcgtccaaggtcaggggcagaagccgagggagtagggagcgttggagcgcagcgaggtctgagcatcggcgagggaacgacggccacggaggaagagaaaggaacggggcggcggcgtcggcgatgcgcgccgccgagcgccgggatggggtcgcggcgtcagcgaccgtcggaaccacacgagcagcaggcggcggcggctgcgtactggattga

SEQ ID NO: 118839 - DNA, 1516 bp, Zea Mays
gtctggatggcccaggaacggcgcaccgtggagtccctctctgatttttggcgagcagaacatacctgagacgacaggtagaagacgactgactgcctcgagcagcagagatcagggaggccgagggcgggatgacgatccggttcgtgctgttcgtcaacaagcagggccagacgcggctggcgcagtactacgagcacctctccctcgacgagcgacgggccctcgagggcgagatcgtccgcaagtgcctcgcccgcactgaccagcagtgttcgtttgtggagcaccggaactacaaggtcgtttacaggcgctacgcctcccttttcttcctcgtcggcgtcgacagcgatgaggtgcgaccctctggcataccattgctataccctcatgacaatttgactgtgattgcaaactgtgggtgaagtcgatcctctggcataccattgctataccgtggtttagctgctgcaatctatgtgtgctcaaccgtagttgtgataatagtggtttggcaggaaacattatcatgcagaacctgtgaacgacaaaggttacatagacctcaaataagtgatctgtttagcctacacctttcgactatggtactatacatagtgacaaggttcccggaacgttgggaacgaggaacgggaacgaggaacgcggtacgtctgttaaagcaacatggaacgttgaggggtatacagctgatcgacgttcattcgatgcgtggaacgtgttcccaacgatttcggaacgaagttagggaacgattgtaatggaacagggaacgatgcgtaattaaaacaagcaatgacacatacataatatataatatatgtatatataactgataatgatgggatcccgataatgataagtcatagtgtcttagcttatttatttatatatatatatatatataacggtaacaataattactttcttgcaaagcctagatagaagagtcttctggatcaatgtcccatttagcatgtgcgccatgtttgtagccatctgttgatcttgacaaaagtcgcaaattggatgtctcgtaccagtagccgcagccccatcttcgtcaccgctgtctgcgtctgcaccaccatcttggatatctacaggcacctcttggacgacttgcacatcatcatcttctaattcatctgcacactttcttttgcttgaagaaccgaaaaccatgtttgaagtttgagttgtgcttggctctgtggattatttaaataacagcggaccagccaccagctacgcgtggacggtgggccaccagccagtacgcggctccgccgcgccgctatcccttcctacgcgccgctatcccttcctcttctctaacccactgcaacgcgccgctattcatcttcctacgcggctccctgcgacccactgcaacgcggcggcgcgattcctcttccacgggcgacgcggcgctcgattcctcttccacgggcggactgcaacgacgcggcgcttgattcctcttccacgg

SEQ ID NO: 118840 - DNA, 917 bp, Zea Mays
gtctggatggcccaggaacggcgcaccgtggagtccctctctgatttttggcgagcagaacatacctgagacgacaggtagaagacgactgactgcctcgagcagcagagatcagggaggccgagggcgggatgacgatccggttcgtgctgttcgtcaacaagcagggccagacgcggctggcgcagtactacgagcacctctccctcgacgagcgacgggccctcgagggcgagatcgtccgcaagtgcctcgcccgcactgaccagcagtgttcgtttgtggagcaccggaactacaaggtcgtttacaggcgctacgcctcccttttcttcctcgtcggcgtcgacagcgatgagaatgagttagctatccttgaattcatacatcttctggtggaaactatggatcgccacttcggcaatgtgtgcgagctcgatatcatgttccatctggagaaagtgcacttcatgttggaagagatggtgatgaatggttgcattgtggagacaagtaaacagaacatcttggcaccaatacaacttatggagaaaacttcctaaaatagtgatatccatttgtgtagttttacatccacttcttagcacatttgcctgtctgcccctttccataaaatttccctctgtatgtgagagtgcaaaacaatctctgtaaccatggagtattgaattgacctgattgtgtgctttcagatattcctgtgatcctcttttcatgtatgcattcgatttgctcacatatgtataaaaggtgtattatcttaagaaaagctgatttatctaaaatgtaatttatcgacatatttatatgtattttgttgcagataatttgaatagtatgatcaaaggtgagtatttggggtcatgctgaatgatcattagaactgactatacaga

SEQ ID NO: 118841 - DNA, 333 bp, Zea Mays
atggcggcggtcaacctcctcggtgagtccgccgcggtgcgcttgcgggcgccggcgccaccgggcgcgggggaggagctcgcggcctggctcacggagtgcgggttccccgccacgacgtgccgagggggagcggccgcgggggctggggagagcgcgcgcaagtggagggagatggcggccaggaagcaggaactcctgctgcggagccgggaccgagtcgcgttcgcgttgccaaagagcgggcccgatatgctggagctggagaggtcgagggagctcacgcagccgtccgcgtcgcacccgactccctgtcaagggacgcagaaatga

SEQ ID NO: 118842 - DNA, 279 bp, Zea Mays
caccgcggacgctgaggctcctcctcctcgcgccccctccacgtccgccaatccgccggctggagagcgccgcggcggccggggctctcctgctcacgggcgtctgctcgcacgcccgagggaaccgtcgccgctgctaaaacctaatccctagcggtgtgggggtgtttatatagtgacggcgtgagactggataattgtgagcgcgtgggcaggatcgtgggcccgattcacgtaatatgcgcagactatatttgcataaactgatacacattagca

SEQ ID NO: 118843 - DNA, 144 bp, Zea Mays
atgttcacggatgaattgttccacggccgaaacatcacctgtcaaaccagcaccctccgcaacagccaccttgttctggcactggctgaagttgaatgcctctccagggaccccaagctggacttcatcagagatgtcggctga

SEQ ID NO: 118844 - DNA, 223 bp, Zea Mays
gtctcctaccacggataccaaaattagatctaatacgaggtacacgataagcagagggtggcggggagagcaagaggaggaggagggctacgtcgccgcgcggcagaagtatcctggctcccagtccctcgtccccgatggcgagagtggcgaactgcggcagtgggaaagtatagctgctagggagatggacggaccaggacaagaggccgtggcacgtgcg

SEQ ID NO: 118845 - DNA, 594 bp, Zea Mays
atggacgcgccggcccccacgaggggccccgcgagcttcctcactcaggccaacgccctcctccgcaagaacctctgcttccagaagcggaacctgaagaccaacatcggcatcacgctcttcccggtgctcctctgcgtcattctcgtcgtgctccagggcgtcatcgaccgcgagctcgacaagcccaagtaccgctgcggctgcgtatgcgtcgacccgggcccggccgcggtcggggacgcgtgccgccggacggagtgcggcgtccagcactccaccctcgaccaggtcgggagctgcccgatccccaacccgaccccgtggccggcgctggtgcaggtgccgcggcccgagtcacgcgccgtcaggaccgccggccagccgttcgacggcttgcctgacccgacctgccgggacaccggctcctgccccgctgccgtcctcgtcaccggcagcaaccgctcgctagctcaaagtctttcggttggactatttcctgcttcgacttcctccttgaatttgacggattatctggatgcactatccaagatcgttgctgtgagttcctgccaccctaaccgcaggccttga

SEQ ID NO: 118846 - DNA, 137 bp, Zea Mays
cccgcatggatctccaaatcctaacacatattttgcaggatccatgagccatcatcagaagaacacaaaccacgtgcagacaataaataaaatattaacacacccaaattatgttcagtccttagcacaacaaaaaa

SEQ ID NO: 118847 - DNA, 2259 bp, Zea Mays
atggcaaacacaagcggaactcggcctcacacgggagcacaacagtggttgtccttgcgtgagaccatgacacgtgcaaatgcgacatacatagactgcgttcagggattgccactatggcgtgaaagtgcatcagttgtaaatgatgaactctttaagggttacagacaaaatggtggaggtagtggaggtggaaagacaaatgaatttgttgcaggttatgattttctaaatacaaatacgaatggtcttgaaatgaatatttggtacaactctacctataacaacaacactgcatacgtacctatttcattactacgagttccacgcttggttaatgcggcatcaaatgagtacattaaatttctcaaaggaagtggagtggaaatgtttctgcaatatgttaaagagatgcccaaagtaggaacaaagttgaaatttgacctctcttctcttcttggtgcactgttcttcacatggatcgttgaactactgtttccagtcatattaacatatctcgtgtatgagaagcaacagaagctgaaaattatgatgaagatgcatggtctgaaggatggtccttattggcttatctcatatgcttacttttttgctctctccgctacctacatgatattgtttgtgatttttggctcactgattggtctagatttctttaggaaaaatgcctatagcattcaatttgtcttctacttcatctacataaacttgcagatttcacttgcatttttggtatcttccttcttttcttctgtcaaaatagccacagttgttggttacatctatgtatttggctctggcttgttaggggaatttctccttcgcttttttgttgaggatactggttttccaaagggttgggtggtcgtaatggagatcattcctggattttcattgtaccgaggattatacgagtttggtcaatacgcatctgctggaaactcaatggggaccactggtatgaaatggagtaatctagatgactctcttaatggaatgcgtgttgtcttgattattatggttgtggaatgggcaatagttctccccttggcattttatgtggatcaagtctcgccactggggggtggattcaggaaaaatccctttttcttcttgggctgctttaagaagagtcctctatcattgcggagatatagctttgggagacaaggatctaaagtagtcgttgaaatggacaatcctgatgctgttcaagaaagggaggtggttgaacaacttctgctggaacccattgcaaaccaagcgatcctctctgataacctcaaaaaggtttaccatggtaaagatggaaaccctgacaaacttgctgtccgagggttgtctcttgccataccaaaaggccagtgttttggaatgcttggtccgaatggagctgggaaaacatccttcatcagtatgatgattgggcttattccaccaacatctggcactgcctatgtacatggaatggatataaagaccaatatggatgcaatctatactaccatgggtgtatgcccacagcatgacttactttgggaaacattaacaggaagagagcatgtaatgttttatgggagactgaagaatcttaagggcactgaattactgaaggctgttgatgactctctgaagagtgttaatctgtttcatggtggcgttggtgataagcaagtgggaaagtacagtgggggcatgaaacgaaggcttagtgttgccatttcattaatcggggatcccaaagtagttttcatggacgagccaagcaccggactagatccagcatcaagaaacaatctgtggtgtgtcgtgaaggaggcaaagaaaaaccgtgccatcattcttacaacgcactcgatggaggaggcggaagtactatgtgatagacttggtattttcgtcgatggtggtttccaatgccttggtaacccaaaagagctgaaagctagatatggcggcacctacgtactaacaatgacaacaccttcggagaatgagcaggaggtcgaacagcttgttcaccgcctatcaccgaatgcgagcaggatataccatatttcaggaacccagaaattcgagctgccaaagcaggaggtgaaggttgcagacgtattccatgccgtcgagagtgcgaaacgccggttcagcatctatgcttggggcctggtcgacaccaccttggaggatgtctttattaaggtcgccaagggagcacaagcattcagtgttgttgcgtaa

SEQ ID NO: 118848 - DNA, 1456 bp, Zea Mays
atttttttttggttggatctaacgcgacggcaaagacggtgtatcgaagggtcgacaatggttacgacgatcggtagtccatagcagcggcgggcgcaacttcgacccggttttcttcccatatatctgtcaaatccttctccggttaccctccatcggcagcaatttccgccatagataccggcgatcgagggcctcggacaacccaatcgacggagcagcgcggcggcaggagagggcaaacccttttcttctcagtactctacttgtctgcgcctggatcccctccgcaggaagataagacatgggtcaagcactcggcttgattcaagtggatcaatcgacagtagccatcaaggaaacttttgggaagtttgacgaggtcctagagcctggatgccacttcttgccatggtgcatagggaagcaaattgctgggtatctgtcactgcgtgtgcagcagcttgatgtccgctgcgaaacaaagacaaaggataatgtcttcgtcaatgttgtggcatctgtgcaatatcgtgcccttgccgataaggcatctgatgcattttacaggcttagtaacaccagggagcaaatccagtcatatgtttttgatgtcatcagggcaagtgttccgaagatgaacttggatgatgcctttgagcagaagaatgaaatcgccaaagctgtagaaaatgaacttgaaaaggcaatgtctatgtatggatacgagattgtgcagactctgattgttgatattgagcctgatgagcatgtgaagagagctatgaatgagatcaatgcagctgctaggctgaggttggctgccagcgagaaagctgaggcagagaagatactgcagatcaagagagccgaaggtgatgcagaatccaagtacttggcgggtctgggtatcgcaagacagcgccaggctatagtggatgggctcagagacagtgttcttgctttctctgagaatgtgcctgggacctctgcaaaggatgtcatggacatggttctggttacccagtacttcgacaccatgaaggagattggggcctcgtccaagtcctcgtcggttttcatccctcatggaccaggtgctgtcagagacatcgcagcgcagataagggatggtcagctccaggccagtctgctgtgagcacgttggaaaaggcatgcttttgacattcccatcagtaaagaagtacatatacatcatgaggagtaaaaaaaaacttactagcgataatgtgagtacagcttgttcgttctatctatatggtgcatgtgattattattatggagattaatgttaaataggttcgcatgtattgtgccagaacaaggctaaggaccagtttgcgtaaaaaaatgtatgtttggaacttatctaagttttggagcctgaggaaacccctccatcctgtgcaaactattttgtggtaccctgcttctc

SEQ ID NO: 118849 - DNA, 1399 bp, Zea Mays
gatttattaaccccccacgttctcttgcgtctccacttgtctttacaaatcgactatatgtactgcgcctctattcccgtaagaccaagaaagacctgaacctgatacaccttgcctctccccactaagcttgtttaccacgcttgtagataagacatgggtcaagcactcggcttgattcaagtggatcaatcgacagtagccatcaaggaaacttttgggaagtttgacgaggtcctagagcctggatgccacttcttgccatggtgcatagggaagcaaattgctgggtatctgtcactgcgtgtgcagcagcttgatgtccgctgcgaaacaaagacaaaggataatgtcttcgtcaatgttgtggcatctgtgcaatatcgtgcccttgccgataaggcatctgatgcattttacaggcttagtaacaccagggagcaaatccagtcatatgtttttgatgtcatcagggcaagtgttccgaagatgaacttggatgatgcctttgagcagaagaatgaaatcgccaaagctgtagaaaatgaacttgaaaaggcaatgtctatgtatggatacgagattgtgcagactctgattgttgatattgagcctgatgagcatgtgaagagagctatgaatgagatcaatgcagctgctaggctgaggttggctgccagcgagaaagctgaggcagagaagatactgcagatcaagagagccgaaggtgatgcagaatccaagtacttggcgggtctgggtatcgcaagacagcgccaggctatagtggatgggctcagagacagtgttcttgctttctctgagaatgtgcctgggacctctgcaaaggatgtcatggacatggttctggttacccagtacttcgacaccatgaaggagattggggcctcgtccaagtcctcgtcggttttcatccctcatggaccaggtgctgtcagagacatcgcagcgcagataagggatggtcagctccaggccagtctgctgtgagcacgttggaaaaggcatgcttttgacattcccatcagtaaagaagtacatatacatcatgaggagtaaaaaaaaacttactagcgataatgtgagtacagcttgttcgttctatctatatggtgcatgtgattattattatggagattaatgttaaataggttcgcatgtattgtgccagaacaaggctaaggaccagtttgcgtaaaaaaatgtatgtttggaacttatctaagttttggagcctgaggaaacccctccatcctgtgcaaactattttgtggtaccctgcttctctgttatcgtgaatgagaatctcatgttcattttctgtgcccagattaagaggaaattctgggatttgattactgacgtggatgcatcctgt

SEQ ID NO: 118850 - DNA, 1429 bp, Zea Mays
atcgctctccccctgaacccccaacactactccacaagaccacaaccccgaacccggccggcggcagcacaacatgagaacagcccccccccccccccccccccccccccccttctcgcgcctcctacctctctccagtcggttcccacgccttgccgcgctttacctctgcggcgcactcccgttatcatataacccgcgcgccggctccggcgagattcgaccaaactccatggggctcgagatggtggaggtcatgtccgagactgttcctacggttgtgcctgcggcagcgagggagaacggggtggatatttacccgctcagccgctactacttcggcgccagggacgccgccggcgtgccccgcggcctcgagaccgccgctgaccgcgcgctacggctcaaggcaaacttcgcggcgcacgggctccgcacgagcgtccacggcgtcctcctggtggagctgttcgatcacccgcacgtgctgctgctgcaggtccggaactcctccttcctgctcccgggaggccgcctcaggcctggcgaggaagaggtccgagggctcaagcgcaagctctccagcaagctctccgttgtcgatgatgtggaggccgttgaagaagaagactggcagattgggcagtgcatcgggatgtggtggagatctgaatttgaggccatcccgtttccctacatgcctccacgattccgtgcggcaaaggaatgcatgaagctgttcctgatcaggctgccgatgtcccggcagttcatcgtgcccaggaacatgaagctcctggccgtgcctttgtcccagattcatggcaatgctcaggtttacggtccaattatagccgccattccgagcctactatccaagttctccttcaacgtcatcagcgactgaattgtggaaaccaaccagaatgttgaggggttagtagacgcatgcatacttggctagttgaagtcatagaacagtgtgcgataccgatgggagcttgtattgagaagtagctcatctgtttttgttttttttttttttgtgtgtgcatatgtgtataatgtatccccctcctgggctcttgctgataatgatatgtatgtactgtatgtgtttctcgcgacctgtgtatgaccgtgtgagaaggattcagttctgtacaataactcattttgatttatttttgctcctacagtcctgaacttggaacataattagcacaccattccatgaaacagaagctactaaattcatttttcgggacaggtcatgtaacctgctaaccgctgaaggccaccaacttggatttcgttgagattccgttgggtgagccaaatttacctgcagaggttaagtgtgatccagatctttacacctcaacatagatccacacgtttgattagctataggacaatatgtgataca

SEQ ID NO: 118851 - DNA, 1418 bp, Zea Mays
atgactgcccgtacgtcggttgttacaacgaacaacttaacaccgccctatagatcaagtgatcaactgcccggcatgctcggagtggatgatcactcactaacttccatgaagggatcatgccttttaataggtatgatgacgaagcaaacggaggctaattaatgggcgcggttatcccgcggtccctctcctattcctacgacgacgacgcccccgacctcggtgtggtgcgtggtagcacgacgatcgccattgccgccgcctgtgccatctggcgcgcgcgcggcgagacaatgacctcctcagtatccccagccgcggccgcctcccagccccaactgcatattaccaccaccggtacgagcaccgggtccactgcaatcatatcgccctcctcaaaccaaagcaccagcaacgcgcgttcctcctccccgcattccacgagcagcccccctcgcggacccagcaccaccggaggcacaggcagcggcggcggaagcggaagcgggtgcacgaaccaggcgtgcgcggcgtgcaagtaccaacggcgcaagtgcaacacggactgcccactcgcgccctacttccctgcggatcagcaggagcgcttcctcaactcgcaccgtctcttcggcgtccgaaagatccttaagacgctggagaacaccagtccggagctctccgccaacgctatggccactctgattttccagtcggacatgcgcgcacaggaccccgtcggcggctgctaccacctcatcctcagcctcgagcgccagctccagattgagatggccgagcactccgccatggtccaaagactggcgctcttccgccaggctgctaccacgatgccaccggatcaaggcggcggcacggttggcctcgactacaccgcgtcatccaagcagccgctcttccacaacgctcagcaagaggtggtttacgcactctacaagaacaaccacggtggaggccacggccccaacaaggatgatcacggcgggcaacaacaccaggtctttgactattacataaacctcgacaacatgcaacagttccattttaatgatagctgtgccgccgtcgacaaagtggatctgactccggcgggggctgacgaaatgagacatcatcagcacttcgacgagaactgccagattgaccacaaggattatttcgagattaaagcggccgcactcgtcgacgacgcgtttgacatgcgacaggaggtggtggacgtgtgcgccgaggttgacatggacaccaagacggtggatgtgaatgccggcatcggcggcgtcgatatcaaggcgatgggcatgaacgccaacgtcgatgtcaatgtctccacaccacaaatggcagctgagtcatcgcactgcagactagggctaggcttttcatcgttctga

SEQ ID NO: 118852 - DNA, 124 bp, Zea Mays
gttttgcactggtataaataaatgggtaaaataattaataaatatatatctagcatcattccgggtttttttattacacatttacttatagttcgaattcaaaactagagacaaatttggattc

SEQ ID NO: 118853 - DNA, 96 bp, Zea Mays
aaaatcctattgtaagatttataaatatttctttataaggtttagggttaaaaggtattttaatataagaatcctcatttttaaatgttattctgg

SEQ ID NO: 118854 - DNA, 2495 bp, Zea Mays
gctcgcaaatgtctcgccttctcccatgccgccgtcacctctcctccacctctactgcctccctcagtgaactcgcctccctcctcgacgccggccgcttccaccgcgcggtcgaccttgccaaatccctcctctcctcccatccccccgctaccaacgtccccgacctctaccaagctcttgccgccacagccgacaccaaggacggcccgcgggcgcgcccccattccttcctctgcgacgcggcctccgccctcgttgtcgcctccgcgcgtctctgccaacctgacggcgcgctccgcctgctctccctcctcgccagcgcgggcgacggcgcctgcgccggcgaggtgtgctcgccgctgccgtccctatcgtcctgcaatctccttctcgagtctctcctattcgtaggtcgccacgctgatgtgcgcgccgcgttcggcctcctcgtggcggccggggcgcgcccggacaccttcgcgtggaacaaggttgtccaggcctgcgttgccgcgggcgacctcgatgtggcactcgccatgctgcggcggatgggccgtagcgaaggcgccccacctcccgacgcgttctcgtacaacgtggtcatcgcagggctttggaggtccgggaagggcagcgacgccctcaaggtgttcgatgaaatggtggacatgggagtcgcgcctaaccggatcacctacaacacgatgattgatgggcatgtcaagggtggggacctggaggctggtttcagactgcgggatcaaatgctacatgatggccctaagccaaatgttgtcacttacaatgtgctgctatcagggctgtgccgcactggcaggatggatgagacgagagccttgatggatgagatggcatcacatagcatgttgccagatggtttcacatatagcatattgtttgatggtctcacaagaacaggagagtcacagaccatgctttctttgtttgcggagtctttgaagaagggtgtcatgcttggagcatacacttgcagtatcttgctgaatggtctatgcaaggatgggaaggtcgcaaaggcaaaacaggtgttcgagatgttggtgcacacaggactggtcccaacaacagtgatctacaacacactaataaatggctattgtcaggttcgtgaccttcgaggagccttctgcatctttgagcaaatgaaatcacgccatattaggccagatcacatcacctacaatgcactcataaatggtttgtgtaagttggaaatggtcaccaaagcagaggatttggtgatggagatggagaagagcggagtggatccgagtgtggaaactttcaatacactgattgatgcttatgggacagcagggcaactcgaaaagtgtttcactgttctgtctgatatgcaacagaaggggataaagtcagatgttatctcctttggttcggttgtcaaggctttttgcaagaacggaaaaatcccagaagctgtagctatcttggatgatatgatatacaaagacgttgcaccaaatgcacaggtgtacaactcaatcattgatgcttatatagagtcaggtgacactgagcaggctctccttctggtggagaagatgaaaaatagtggagtatccgcaagtatagttacctataatttgctgctaaaaggtctttgcagaagttcacaaatagatgaagcggaagagttgatttacaccttaagaaatcaagggctgagacctgacgttgtcagctacaatactataatatcagcatgctgcaacaagggcgatactgataaagcattggagcttctccaagaaatgaacaagtatggcatcagacctacactgagaacgtgccatacacttgttagtgcattggctagtgcagggagagttcatgatatggaatgcctatatcagcaaatgttgcacaagaatgttgaaccgagcagtagcatatatggcatcatggttgatgcctatgtgagatgtgaaaatgattcaaaggtagcatctctgaaaaaagaaatgtcagagaaaggaatagcctttgatgacacgaagagaagtaaccatgagctagataggataatagcaagtccaatttgattggattgccttgaaatgaaaaggctggaaggttgccagttatgttaatatcaaaaacaaaatttcagatttagagttcaattgtacagacatgaaacataaatgggggtatgcgggtataaagatggtagcggctaaatgtttggtataattcgtattgaaccttttgccactgccaagaaccatgtcatcagtttcttctttaatctgccctagggtagtggggatgggtccaatttttttattactgtattttcaaaaacttgggtgccagtgccatgctccttcaaccttcattacctcccaggttgcaaggacgatagagggcattgttttgaaatgtttattgttgcacatgaagggcataatagtatagttgatcaa

SEQ ID NO: 118855 - DNA, 261 bp, Zea Mays
atggcgacgcaggcggcaggcgaggagaagatcgagggcctgctggtctcgccagtcgccaatgcagcgtgtccatgcatgcacaccccgcgcgcgaggtatttaatggcggccgtcagcgggccgagagtttattcgtcgtcgctcccggcagggcattcaatcctaacagtttgcctagatttcttccttttgactggccccggtccaggccccgccaacggcaaatggcgtggcgcgaccactctagggctggagtag

SEQ ID NO: 118856 - DNA, 1522 bp, Zea Mays
gtcaccctcctccccccctccctctcgtcggtctcttctctcttggtcggtcctggataaacacaaatctcttgcctccctccccctcctcttcgcctctctgcattgcggtgctactagctagcaaccaaatccaaagcagcaaagccttgcaggctagctagggaagcaaatcaatctcaggctttgccgctcgctctatacatccgtcctcctcgtgctgcgtgctgcgtggcgtgtgtctgtctggagaggtgaagcggcggaggcagcatgagggcgggcgggatgctgtgccggtcgcaggcggcgacggcggtgtgcgtgccgggggacgcgcggtccatggtggtggcccggcgcgccgccgaccgcacccgcgacagcgacgacgcccgcgccctgcacgacgtcaggtacgcgcgcctcggcgccggcgccggagacgggggccgccgcacctccgcttcgcggaggttctcggcgcccagcagggccgccgcgcctcctccgaccgctaccgccgccactgcgtcatgcaagccgcgcgtggagaggccgcggcgcgcgcccgtggccgtgacgctgcccatggtgaccaagagccccagcaaggaggcgccgcccaaggacctcgccgcggcggccaagcgcgcgcaggccgccgccgtcgcggcgcctccaggcgaccagctgctccaggtggtggtgatgaaggtggccatccactgccagggctgcgcggggaaagtcaggaagcacatctccaagatggaaggggtgacgtcgttcagcatcgacctggagagcaagaaggtgacggtgatgggccacgtgtcgccggcgggcgtcctcgagagcatctccaaggtgaagaaggccgagctcctcctcgcctgatggatcgatcgacgattatggatctccagccgtccaccaactagctagctagttgttgcattgcattgctagcaaaacacccgagtgaacgaacgaacgaagaaccctgtgcactatcgctctgattggttagtcgcactgtctcatcctgcatcagtgcgtgcattgactttatttaagtctttgtttggttgcctgtatactagaagcgtgagctgcatgagtggatgcaaaataatttattttgaggctgtttgactgcatctgctcatacgtcaaaaacttcggttcctagccagcctggatggcacgagactggtttgtaaggctcaggcaaccaatcaggcagtatgtgttagtatctcgcttctgcttgcattggctgctactgctagccgtacgtgcatcgtataccaatccatggatggatgtatcatgcgcgtgcagtgatggcgtgtggcgaaccttctccctcctcctgtgccgtgcctgttggcttttgctgctggtacgtacttgtacctagctatggtcgggccgtcggtcctcctccgtccgtgtctgcattatgcatgcatgatcgatgccttgcttcgtttgttatacagcactattattgctt

SEQ ID NO: 118857 - DNA, 105 bp, Zea Mays
ctcacgcaaaagcgtcagtcaaaataccacagatattttggatcccaattttcttaacgatgtatacaatgtagacagtaattgtgacacggttttaatttagcg

SEQ ID NO: 118858 - DNA, 501 bp, Zea Mays
atggcgagcacctcgggcgtgtacccttggacgagcaccgttggggcggcgccgaagaggtggtgcttccaaagaggtggtgctgcggatggaggaggcgatccccgccaagcgcgcgtcggtggacgccatcaccaccaccaccacctgccctcgtctcccgctggtgacgcacacgctcagtggtgccgtgacgccgacgaggggacgggacacatggaatcactcgacggcgagctgcttgttcttccgccacgacgataccgccgagcgacgaagcagaggagagcagatccagatctccgcctgcccgcaaacatggggacgcagacctcgatggtcgtcgacgatggctctcaggggcgggcgcgacagtgtgataggtggggagtggacgatggtgcatgggtttgggactggggtgtgacggcgaacgcggctgtcacatggggtggcgggcggcggcatggcggtggagctcgagcgcgacttctgagatga

SEQ ID NO: 118859 - DNA, 496 bp, Zea Mays
atggtctcagagtccaaggagaccaccgcgcgattcgtcaacgtcaccgggatggcgaagctgcaacccgacgcctccctgaccttatcctttttgttacctctggacaccgccatcgaggggctgcacgacatgatcctcctgaatgcttgcgacgaccttgatgttttatctctgtggtcggtgggggggtcggcgtgtggtgtaggcagatgagggaggtggcgatgttcttcagtggtgacccatcgacgctgcagtgggtcgaccaacaccatcagcacgtggagattcatagggtagcaaatggatctacattattgaagggatttaggaaaccatcaccaaacaacaaccaattagaggttcacagttagttatgcttcttttcaattatgttgggaaatattgttcaaatatcctatcctgaaaaaaggttcatcaccttatcagactgtattgcccctaaataccgtttagttggtgattgttaact

SEQ ID NO: 118860 - DNA, 108 bp, Zea Mays
gatcttgcgctttggatggttacagttcttttttgggaggaaggacaaaagtaacaggttcagtaggtcttatgatttgataatagaaatatatataataaataaatt

SEQ ID NO: 118861 - DNA, 327 bp, Zea Mays
aacagatttttggacatagttatatagatgttggaatcacaccagaccagcagttgcaattacactagaaagcagttgcaatcacaccagacaacagttgcaatcattgtttgtttaacagatttttggacatagttatatagaagttgcaatcacaccagaccagcagttgcaattacaccagacaacagttgcaatcattatttgtttaacaaatttttgaacatagttataaagaagttgcaatcacaccagaccaacagttgcaattacaccagacaacagttgcaatcattgtttgtttaacaaatttttggacatagttat

SEQ ID NO: 118862 - DNA, 2683 bp, Zea Mays
atgaatgcaggaggagtactcggcaccaacctcctgtcctgggctgggcccctcgctagcgcttacactattctgcggtcagaccagagaagagaaggccgcatctaccaccgccagtcgcgacccccgtggttccatccatccgcgggcccgcgcggcatctaccaccggcgcggaccgaggacttggacttgcgctcgccttgcatttgcacgtgacgtgaacgcgacgtcgctcgctcgaccactgcaccaccgtggctgctcggtcgagagtgtatacaactgctctccatttggaggcagcagattgaatgatcatttcatcctcgcagtcgcagacatacattgtcccgttctctcgcggcgggcgcctgacgatctcgtcctccgcgtccgccctcctcgttgcccacgcacgcctgaaggcgacggcggcgctggctgcgcggaggaagcccgagcggacattccgtttgctcgcaggccggattgcaaggccccctctcccaaattgcaaggatagtcaggaagctaattaacagtgttcgaaagatggtccaccgcgagccggccgaggcggcggcggcggcagcagcaggaggcgagaccagcatctctacgcagcctccctcatcatcccagcaggctgcgccaccaccggccgtgttagtgtacaaggtcgggtatcctccccggaggagcctggccacggagttcaccagcacgctgagggagaccttcttccacgacagcccgctgaagcagtgcaaggaccagtccgtgtccacgaagctccagatgggcctgcagctcttgttcccggtcttgggttggggcaggacctacagcctgagcatgttcaagggcgatctcgttgccgggctgacaattgcgagcctctgcattccccaggatattggctactcgaagctcgcgtatttggatccggagtacgggctctactctagcttcgtccccccgttgatatacgctgcgatgggtagctccaaggacatagcgatcgggccagtcgcagtggtctctcttctgctaggttcgcttctgcagaaggaggctgaccacgacaaggacagggaggaatacctgcgccttgcgtttacggcaaccttcttcgctggcatcactcaagcagctctgggattcctgaggctaggtttcctcatcgacttcctgtcgcacgccgccatcgttgggttcatggggggagcggccgtcactattgccctgcagcagctcaagtatgtgctcggcatcaggagcttcaccaaggaaaccgatatagtctccgtcatggagtctgtctggggttcagttcgtcatggatggaactggcagacagttgcgattgccttcacgttccttgcttttcttctgcttgccaagtacattgggaaaaggaacaagaagtatttctgggtgcctgctatcgctcctgtaacttcggttattcttgccacccttttcgtgtacctctttcgcgctgacaagcaaggtgttcagattgtgaacaagatcaaaaagggcgtcaacccgtcatctgtgcacaagatctacttcaccggtccattcgtcgcgaaagggttcaagatcggcgctgtttgcggcatgatcggcttaacagaagccgttgccatcggaaggacgttcgccgccatgaaggactaccagctagatgggaacaaggagatggtagcacttgggacgatgaacatcgtaggctcaatgacgtcttgctacatcgcaacaggctctttctctcgctcggcggtcaacttcatggccgggtgccggacgccagtgtccaacgtggtcatgtccacggttgtgctcctcaccttgctgctcatcacgccgctgttcaagtacaccccgaacgcgatcctgggctcgatcatcatctctgccgtcatcggcctcgtcgactacgaggcggcgatcctcatctggaaagtcgacaagatggacttcgtcgcctgcatgggggccttcttcggcgtggttttcaagtctgtcgagataggcctcttgattgctgtgtcaatctcgtttgccaaaatacttgtccaagtaacaagacccaggactgtgctgctgggaaaccttccaggcaccacgatctacaggaacacggagcagtatccgcatgcgaggcatgttcctggggtggtcatagtcagggtggattctgccatttacttctccaactccaactatgtccgagagcgaatccttaggtggttgacggacgaagaagatagagtcagcgcagaggggctgcctagaatcagtttcttggtagtagagatgtcacctgttatagatatcgatacgagtggtatccatgcccttgaagacctgtacaagaatctccaaaagcgaggcattcagcttctcttatcaaaccctggctctgccgtgattgaaaagctccagtcgtccaaactcaccgagcacatcggaaatggtcatatcttcctcacggtcgcagacgccgtgcgtttctgcacttccaagtcgatgcaggagccttgaactgaaatggatttgtttgcgtccacattctgttctctaatctctactgtatacgttatgtatcatgtattcatgtaatcagaataatatacatatgcaagtttacgaatgacaggaatagtttcgaa

SEQ ID NO: 118863 - DNA, 2356 bp, Zea Mays
gattgcaaggccccctctcccaaattgcaaggtaagtctccgtccgtgccctgattcggccggcaaccggtactaactcaccccgccgctgccttcagtttcagcgagttctttctttatgcattgcgcccgtggtctgcaatcctgcttaacactgttacaattgcacaccaatttgttttcccaggatagtcaggaagctaattaacagtgttcgaaagatggtccaccgcgagccggccgaggcggcggcggcggcagcagcaggaggcgagaccagcatctctacgcagcctccctcatcatcccagcaggctgcgccaccaccggccgtgttagtgtacaaggtcgggtatcctccccggaggagcctggccacggagttcaccagcacgctgagggagaccttcttccacgacagcccgctgaagcagtgcaaggaccagtccgtgtccacgaagctccagatgggcctgcagctcttgttcccggtcttgggttggggcaggacctacagcctgagcatgttcaagggcgatctcgttgccgggctgacaattgcgagcctctgcattccccaggatattggctactcgaagctcgcgtatttggatccggagtacgggctctactctagcttcgtccccccgttgatatacgctgcgatgggtagctccaaggacatagcgatcgggccagtcgcagtggtctctcttctgctaggttcgcttctgcagaaggaggctgaccacgacaaggacagggaggaatacctgcgccttgcgtttacggcaaccttcttcgctggcatcactcaagcagctctgggattcctgaggctaggtttcctcatcgacttcctgtcgcacgccgccatcgttgggttcatggggggagcggccgtcactattgccctgcagcagctcaagtatgtgctcggcatcaggagcttcaccaaggaaaccgatatagtctccgtcatggagtctgtctggggttcagttcgtcatggatggaactggcagacagttgcgattgccttcacgttccttgcttttcttctgcttgccaagtacattgggaaaaggaacaagaagtatttctgggtgcctgctatcgctcctgtaacttcggttattcttgccacccttttcgtgtacctctttcgcgctgacaagcaaggtgttcagattgtgaacaagatcaaaaagggcgtcaacccgtcatctgtgcacaagatctacttcaccggtccattcgtcgcgaaagggttcaagatcggcgctgtttgcggcatgatcggcttaacagaagccgttgccatcggaaggacgttcgccgccatgaaggactaccagctagatgggaacaaggagatggtagcacttgggacgatgaacatcgtaggctcaatgacgtcttgctacatcgcaacaggctctttctctcgctcggcggtcaacttcatggccgggtgccggacgccagtgtccaacgtggtcatgtccacggttgtgctcctcaccttgctgctcatcacgccgctgttcaagtacaccccgaacgcgatcctgggctcgatcatcatctctgccgtcatcggcctcgtcgactacgaggcggcgatcctcatctggaaagtcgacaagatggacttcgtcgcctgcatgggggccttcttcggcgtggttttcaagtctgtcgagataggcctcttgattgctgtgtcaatctcgtttgccaaaatacttgtccaagtaacaagacccaggactgtgctgctgggaaaccttccaggcaccacgatctacaggaacacggagcagtatccgcatgcgaggcatgttcctggggtggtcatagtcagggtggattctgccatttacttctccaactccaactatgtccgagagcgaatccttaggtggttgacggacgaagaagatagagtcagcgcagaggggctgcctagaatcagtttcttggtagtagagatgtcacctgttatagatatcgatacgagtggtatccatgcccttgaagacctgtacaagaatctccaaaagcgaggcattcagcttctcttatcaaaccctggctctgccgtgattgaaaagctccagtcgtccaaactcaccgagcacatcggaaatggtcatatcttcctcacggtcgcagacgccgtgcgtttctgcacttccaagtcgatgcaggagccttgaactgaaatggatttgtttgcgtccacattctgttctctaatctctactgtatacgttatgtatcatgtattcatgtaatcagaataatatacatatgcaagtttacgaatgacaggaatagtttcgaatgctgt

SEQ ID NO: 118864 - DNA, 206 bp, Zea Mays
ataacctggtaatggttttttctttcctttcatacgcacaggggaaaaggaacaagaagtatttctgggtgcctgctatcgctcctgtaacttcggttattcttgccacccttttcgtgtacctctttcgcgctgacaagcaaggtgttcagattgtaagtagtacccaagttagggaagaacgcaggccctaatataagacccag

SEQ ID NO: 118865 - DNA, 2233 bp, Zea Mays
atccccaatcgaaacggctcgcagctcatctcaatccgatccgatggcccgcgccgccgctcgcctcctccccatcttcctcccatggcggcgtcctcccccgccctgcctcctccgccggggcttcctaaaccctagcagccccagaacctccgcgcgcgtcgacaccctcgttctccctggagacgagcgcttgcccttcccctcgcccccacgcctcccgaaccagctgcgtcctgactacgggagtggcggcggaggcggcgctccctcgaccatcgcggccatcgtcacctcactcggcggaggccctgcagcggtggggatcgtgcggatctccggccccgatgccgtcgccgtcgccgaccgcgttttccgcccagccgggaccaggagggcgtcgacgccgtggcaaccgcgcagccactttgttgagtacggactcgcgctcgacgcggacggcagcgttattgacgaggttttggtggtgccaatgctctccccgaggtcctacacgcgagaggatgttgtggagcttcagtgccatggcaacgatctctgcttgcgccgcgtgctcagggcttgcttggaagctggagccagacttgctgatcctggtgagttcacccttcgtgcattcctgaatgggaggttggacttggcccaagcggagaatgtgtctaggcttatttcagcaaagtcagcagctgcagcggactcagctttggctggcatccagggaggcttttctaccctagtaaagtcattgagatcaaggtgcattgagttgctaacagaaattgaggctcgtttagattttgaagatgagatgcctcctttggacccagtgatgcttgtcagcaaaattaattgtatgaggaaggaggttcaggatgctttggacacttccaattatgataaattgttacaatctggtctacagatagcaataattggccgtccaaatgttggaaagtccagcctccttaatgcttggagtaagagtgaaagggctattgttactgaaatagccggaactacacgggatgtagtagaagcaaatgtctcaattaatggtgtacctgttactcttttggacactgctggtataagagaaactgatgatgttgtggaaaaaattggcgtgaaaagatccgaggctgctgcaatgggagctgatcttattgtaatggcaataagtgcagttgatggatggactgatgatgacactaaacttatggagcatgtttcggtaaataggaagtcctcaggttctgcagttccgatggttcttgtaatcaacaaggtagattgtgcgccatttgttcctggagaacagttcaaacaattcagtggcctcttcagaaaacacgtacagacatgtgcagtcaccggtaaaggcatttctgatttggagagcgctgtaatagaggtcaggggtattgagcatgtgccttctgagggacgaaggtggaccgtaaatcagaggcaatttgaacagctgttgaggactaaagaagctttcgcacgtctagagtcatcaatcaacgagcagttaccaatggacttttggactgtggacttgagggaagctgcgcttgcccttgcaacaatcagcggggaggacatctccgaagaagttttgagtagcatattcagcaaattctgcatcgggaaatgatctcgcaagatgctgcatccagtagtttggagcagaagctttttccttgactgagaacaggaaccaacatgctgagtggcacttggttcgcggcatcagaatggtgaacaggcgtgcttgttctctgaggtgccacaaagaacacaagggaggtgaagccctgtccatcctagtgcacaccgtatagatgctaaggatggaaccatcgagttcctgtcttcgacgtcggatacgaatcctgtatactcgtggttgatatgagaaaattttattagacctaattgagaacgcaaacagtttcattcatccgtcttgctgtacgggacgcaacatacccgaattgtgaccaggagacattaaggtgccgtctggttcagacgttgtaacaggaatcgtaatgagatcccttaccggcggtaatgtaatggttattggctgatcccttaccggcggtaatgtaatggttattggctgtaattagattggatagtaccagatactacttgaaagagctcagtcaaataaaggtatcggtctaatccgtttgcgttg

SEQ ID NO: 118866 - DNA, 558 bp, Zea Mays
atgatgctggggaagagatccgggcgcccgtcgcctacggcgcgacagcacatgcgacggaccacaagcttgacggagttcgcggcgcccgacaaagtgctggcggacgtggcggaggaggaggacgaggagctgcagttgctgccggcgcacgcggaggcggccgagctggagggcccctacggatgggccatcggcggcgctgcggcggccgggcgggcggactggctggcggcgtaccgcgcccgcgcggcgccggttctggcggggctccgccggaactccgccgacttctcggccgccgagaccgccgcgttcctccgcgcctgcgggctctgcaaccgccgcctcgggccaggccgcgacaccttcgtgtacaggggagacacggcgttctgcagcctcgagtgccggcagcagcacatcacgatcgaggagtggaaggagaagtgcgcgcttgccacgccgccggcgtccgacccggtggtgccgctaccgcccaggcccagcggcgcgggctccgacaaacccgcgacggtcctagcctccaagtcctag

SEQ ID NO: 118867 - DNA, 842 bp, Zea Mays
atggcgacggacttcttctggtcgtacacggacgagctgcacacgtcgcgccgccgggagatcctggccaagtactcgcagatcaaggagctcttccgcccggatccgtggggcttcctcaagggcttgtcaagaacaaccggccatgccaggggttgcaagggaagcccgtccgcggttgtcgcaccattccccacctcgaattcggggtctccaagcccagacgccatcagcgcccgccgtcagcgatttggcaaccgcgcagatctagaccatcaacgccttgggtggaggggattcttgcatgccgcgcagatccaggccattccccgcctagctaaattttttcatgaccttcacgaagaggtaatggctattgcttctagaggacatggtttattgatccggttgcagcagttagaggcaaaattttcaatggttgaaaaggctattgaactcagatggggcactcaaattacccacatgatgacgattaactaaaatagctttgcatacctccttgctaatttctttagttgtgattttattttgtttttaaaaatgtatccatgatttcttataggagctgagtggcatgatagtcttctgcttaaacataagtgatcacacaaggagatatgccatatgaaaaatgtcgtggcccaccacaattgttcacattggataagtatggagatgttgtcttttgtgaacatttactatttaaatgttttctgcaattgaacaataggattattcttcagatttgatgttgttgctggtgttggagcctcaaaaagaacctgtgaagctagttgctactgttcaacagttcagaatta

SEQ ID NO: 118868 - DNA, 315 bp, Zea Mays
agtttcacggagggagacaacccctttgccgcatggagaagagacataggtcaaagggccatacttcatagctatttccccctcgatgtttcaagtgaaagggcctaagagtattggagcactctatgttacctgcttggtgccaactattcaaaatttactctagggtagtagataattttccttgtcgagttttattttggtatatgtaactttgtaattgggcctaagcgtattggagcactctaagttaacaggtgcttgaagctaatgatgaaattatatagcttggatgaataaacatttgttatagtg

SEQ ID NO: 118869 - DNA, 3059 bp, Zea Mays
aggtatattatgagtgttccaagactaatgcatcatctttgatggtgtaccaaaaaaatggttgttaacatcaaggcctcaacgagctagcctgagacaagaacactggaaccatggtttcaaaatcatattcaaatctgctagacatgaccccaggagatgggtttgactttcgacgaccttttaagtctcttcctcgtgttgtaacttctcctagcattatatctgaccatgattgggattccataagtgatggtgattcagttggttcagcattttctatcgagaggaaaataattgtcgccaacttccttccgctgaattgtacaagagatgaaaccggggaactgtccttctcattggatcatgattcactactcatgcaacttaaagatgggttttcaaatgagactgatgctgtgtatgtaggcagtttgaaggttcatgtagatcccagggagcaggaccaagttgcacagaagcttctcagagaatatcgatgcatacctacttttctcccatctgatctgcagcagcagttctatcatggcttctgtaaacaacagttatggccactttttcattatatgcttccaatttgccttgacaagggtgagttgtttgatcgcaccctgtttcaagcctatgtccgagccaacaaactttttgcagataaagttatggaagcaatcaatacagatgatgattatgtttgggttcatgattatcatctcatgctgctccctacattcttgaggaagaggttacaccgaataaagattggtttcttccttcacagcccttttccctcttcagaaatatacaggactctgcctgtaagggatgaaatcctgaagtcactgcttaatgctgatctgattggtttccaaacatttgactatgcccgccacttcctatcttgctgtagcagattgctaggcctgcattatgagtcaaaacgtggttacattggaatagagtattttggccgaacagtgagtttgaagatcctttctgtgggtgtccatgttggtcggcttgaatctgtcttaaagttgcctgctacagttagtaaggttgaagaaattgaacaaaggtataagggcaagatactcatgttaggtgtagatgacatggacatcttcaaaggaataagtctgaaattgcttgcactggagcttcttctggacagaaacccaaagcttagagagaaggttgtccttgtacagatcatcaatcccgcaagaagcacggggaaggatgtgcaggaagctatcacagaagctgtctctgtggctgaaagggttaacacaaagtatggttcttcaagttacaagcctgtcgtcctaattgataatcgcataccgttttatgaaaaggttgcattctatgccgcgtctgactgttgtattgtaaacgctgtgagggatggcatgaacttagtaccatatgagtatactgtttgccgacagggaaacgaggagatcgacagagtcagaggccttgacaaagacacccatcacacaagcacacttattgtttcggagtttgtgggttgctccccatctctgagtggtgctttcagggtaaatccttggagcgtcgatgatgtggcggatgccttgtgccgcgcaactgatctatctgaatctgagaaacggttgcggcacgaaaagcattatcgctatgtcagtactcatgatgttgcttactgggcgcacagctttgctcaagatctggaaagagcatgcagagaccattacagccgaaggtgttgggctattgggtttggcctgaatttcagagtcattgctctttctcctggcttcagaaagctttcttcggagcactttgtttcttcttataacagggcttctagaagggcaatatttctcgactacgacggcacacttgtgccccagtcgtcaatcaacaaggctccaagtgaagaagtcatctccattcttaacaccttgtgtaatgatccaaagaacgttgtgtttatcgtaagtggacgaggacgtgattccctcgacgagtggttttctccatgcgagaagctccgtctagccgcagaacatggctattttatcaggtggagcaaggaagctgcatgggagtcgagctattcgagtccgcggcaagaatggaagcacatcgctgaacctgtcatgcaggtatacaccgagacaacagacggatcttcagtcgagtcgaaggagagcgctctagtgtggcactatttggatgcagaccatgatttcggttccttccaagcgaaggagctaaaggatcatcttgagagggtgctatcaaatgagcccgttgttgtgaagtgtggccattatatcgtagaagtaaagccgcagggagttagcaagggtcgtgctgtcgacaagctgattcaagcactggccaacaacaacgggaaggcacaggatttcctgatgtgcgtcggcaacgacagatctgacgaggacatgttcgaatgcatcaacggtatggcctccaacgatgtctcatcgaccacagtaccggaggtgtttgcctgttcggtcggccagaagcccagcaaagcaaaatactatgtggacgacaccagcgaagtgatcagattgctcagggatgcaacccgcttctcatcgtcgcagcggagggaggacgtcaacgccagccgcgggcgtgtgaccttcagagacgcactcgattacgtggactaggcaccagcagcaattcttagttactcgaaatgattagctgcggagcttgtaaattccgctgtcttctgtctgccaatggttttcgttctagagaattgtagtgtagccgacatcgacatggatcgtcgtcaccgatacacgaacagcggaaatatgagttgaagttcgccgtttcgaggctcagaattggtacatttatagaattgtagtgtaggcaattttttggtagggaatagtaattggtacatttatagaattgtcaattgtttttcttctaccgctgataatactatagcttcgctaaattaatattattgtttcacttagcgatgaaatata

SEQ ID NO: 118870 - DNA, 174 bp, Zea Mays
ccgaaagatgaaagaggaatttaacaatgaactggaaagtgaaggtgcaccaaagccttatagtgggaaacttgtttttgaaattgtaaagaacattcatgttgtattcggaaaggaaaaaacaaaggagaaaagagaaagagaactgacccttcaacttacacaactttcaag

SEQ ID NO: 118871 - DNA, 1558 bp, Zea Mays
gagcgtgcctgttctcttctcccttctctgcctcgcctcgtcgcttcgggaccggataatttcattctctcctgtccgtctccgctttggtggatcggccgaaatcgtaccaggcttggcgtgcgcgcttctcccagcatgctgctgcaccgtccctggtccgcggagctgcttcgcttcctccgttagtacgaaggtaatgacacgcaagctggtcgtagcttggtgagctacggactgcggttccacttgcaccaaggcccaggccggagccgtggactatcacgcctacgttccgtgggatggactccggcaagagcgccagcctgcagtcgtccagcggcggcgacgacgagttcgactgcagaagcggtgccgactcctcgccgctatccgccctgctccggcagccgccgccgccgccatctgtgccgggcttcggcggcggctccttgatctacggcctccaggagctccgcacgccaccgctgtcccactggtgctcgacgacggcgcccctcccggccggcgcagaggcctcgccgccgtctctgtccggccatggttctatgacggcctaccaggccgacgcagcgccggtccagctggccgcagcggcgccgccgcaggggtccaggaagcgggcgcgggcgtcgcgccgcgcacccaccacggtgctcaccaccgacacctccaacttccgcgccatggtgcaggagttcaccggcatacctgcccctcccttcgccggcgccgcgagcgcacgctctctcttcgaccacatcttccccttgcgcaccgccgccgggaccgggagcctcgccacgctcccgcagtacctccgccgccccttcgcgcagaagctgcacgcgtcgaacccctacccgccgagcttcgcctcgtcctccacgtcctcaccagcgccgaccaacgtctccattgcgcccgcttccaccaccaccccgggcacggcagccgtggcgtccagcgacagctaccaccagctcacagcagcctcaacgtccgctcttctctggatgcagcaagatcacggcagcaacaactaccacccgttccatcagtgctcctccctcggcgacggcaaatacgcggcgcacccagtgttcgaccgcggcataccgtcgccgccgtcgtcctccacgaggctgcaggaccgggcggacttcgtcggtctcacacacgacgtcatggtgggctcccaagggccgaacgtgtacttgcacccgcgcaacggcggcgacgacctgtccagcctggtcgggggcgcgtccgtcaccggggccggcggctgcaagtcgacggctggagcgcaatcggcgtaagcgtaacccgtcggccaacgtctccacaacgacgacgacggccacatcagcggcgccggagggcatgagaaagcaagcaggcgttgactcatgggtctgcagttctgcacatcagattatgcacatctgattaaaatttacttgcttatttccaagaatccaatcgagagtagtacatgatgcgagcagattttggtttgtcctggctgctagtg

SEQ ID NO: 118872 - DNA, 1164 bp, Zea Mays
acacgcaaatcatcagctcaaccaaaaatcagaatgtacgcgaccaagccgctgtccctgttcaagagccacccggaggcggcgtcgcggccgccaccggagggccgcaactccggctacctcgtggtgaagggagccgacgacgagggtggcgacgacgagacgtgctgctggggcacctgcggcgggtcgcgcgtgcgggagctcccgttcccgcagaaccgcgtgctgacggtgaggtacacggagcaccacggggagagcagcagtacctacgccgacgccgtcgtgttcgtgcccgtacccgaccagccgctggcgtccaaccgctactaccccgtcatcgccacgggcaagcacaagggcctcgtcagggcgtgctctacagaggaggacatggtgcagtgctgtttctgccggtgcatcagcgacgtggacccgcggccgttcgacccggcggacatctaccagcaggtcgagatcgtgcagcgccggcgcgggcggttcacggccagagccgtggctcccgacggcttcccctacttcctctaccgcaagaagtactggcgcgtgtacgcgtccaagcccaagaacttcgacctcggcgaggcccggggcctggacgccgcgctccggtctcgccagctctcggacgccgccagcgtcctcgacgcgttcccggcgccggccagaagcgccgttgggaaatggtactccccgttcttcctcgtcaaagaagacggcgtagcgccgccgcgggagcagatggaacgcagcgcgttctacgaggtgaccctggagcagcgctggtgggagccggggcacgcgacggccggcggcccgaagttggacagcaggagggcgctcatcggcgggagcgttgaggcaaagcaggaggcggcgagctcgcggcacggagacgcgtacgtgtggttcagggcgccggcgacggggcagcgggtggggctgtgcgcgagcgtgtgggagaggatgcggtgggaggagtacaggggcgggtgggtggacgagggggaggatcccgggaaggtgggcggcggatcggtgctggtggagaggttcgtggtgaagaggctggatggcaccgtggttgtggcctttgactttgtgcatctcaacaaagtcagagcaaaacagctgtgaata

SEQ ID NO: 118873 - DNA, 1914 bp, Zea Mays
caaacccaccgttacttcagcaaccgccgcggtaacctgaaaaattttaaacaaggaagggaaacacaaaaggtggaagggaaaagggtttgatttccccactcctgtagtgccgccgccgtgttccggtgatccgccatccgcctccgttcgccgtcccccgcttgtcccgttagtggttttcgtccttctggttcactcgccggcggactacatgctgatcgacgggatgaggtccgtggtcgccacggtgagcggttaccacggcgacgagcggcataggcttgtaaacctcattgcggagaccggtgctagctacgtaggatcaatgagcagatccatcacccacctggtgtgctggaggctcgaggggaagaagtacgacatcgcgaggaggctggggacacgcgttgtgagccactggtggttcacggagtgtctcagggaggggaggcgcctcccagaggacccgtactttatggtaagtggtgaagaagcagggccagtcccagagctgccttctcgttcccgtaaacaagtcaagaaaaatgccatcatggaggacagagttttccaagagttacctgatgatttctgggacactcctcgagctagagccagctataaagttaagcttgatgattctgattctgattttgagtctgccctgctagaacaaaaaaatcattcaccagacgttaagaaaaggagaaagcgtatgaagcatgtcaatacatcaacggacagagatgtcttaaacctgcaggataatgtgtcaagtgtcatggcaagacagtgccttcatatctcaagtcatagaacgtcccagagcacatcaaagcataagggaaacttgtcacacttgcttcacaatgaagttcctatccggatgggagaaaggaacaatcttactgaaaactctgaaaatgatagtttgtctgacagcttcagtgaacctcagacttcagatactctgtgtatagaagctcaaagaaaatcaagtgcaccatcatcatcacttagacaaagtaccctagattctctatatgaatttggtgaaactagtaggcatgaaccagcaggaagaaaaaaactagacaacgttgaattaagggagacttcaagaagcttacttccatttgatttgtcaggacaggaaccagctttctgtactcaggagcaagtagataaatgtagccttggcactctagctgataaaaaacccatggaaaaatcatctaatatggaaaggcaaccagaattatcatgtgtcatatgctggacagatttttcttctacaaggggcatcttaccatgtggacatcgattctgttattcatgcattcaaggatgggtggattgtctggcttctaggggtaaagtctcaacatgtcccctttgcaaagccagtttcacatgtatcagtaaggtggacgaggcaggcacctcagatcagaagatatactcgcagaccattccctgtgaagcttctactgatgtttttgtgtcgggcaatgtaggctacgatttctctcgaccaacgtctgggcaaggagcatgctaccagtgtcacttccgtgagcccgaggagcttcttctaagctgccacgtctgcagatcacagtgggtacactcgtactgccttgatcctccgctgactccttggacatgcatgcactgcagagacctgcgtatgctgtttcaccggtatcgttagccccagttatggtactcatgtcaaaccttaattgttggaggaaattgtatcagaaggcatgaacaccatttgattactgagatgtaactgccaagttccatttgatgtctatactctaacattgattactgagggtcgatgtgagcttttttatctcagtatcttctctgcataaagaactggaaactagtgtcaaa

SEQ ID NO: 118874 - DNA, 346 bp, Zea Mays
attcaccagacgttaagaaaaggagaaagcgtatgaagcatgtcaatacatcaacggtttttgtgtcgggcaatgtaggctacgatttctctcgaccaacgtctgggcaaggagcatgctaccagtgtcacttccgtgagcccgaggagcttcttctaagctgccacgtctgcagatcacagtgggtacactcgtactgccttgatcctccgctgactccttggacatgcatgcactgcagagacctgcgtatgctgtttcaccggtatcgttagccccagttatggtactcatgtcaaaccttaattgttggaggaaattgtatcagaaggcatgaacaccattt

SEQ ID NO: 118875 - DNA, 1448 bp, Zea Mays
cctaaaagatccgaatctagggacgaccgggttcctccaccccaggattctcgtggcgacctcgcaacaaccttgctcttcgcatcttttcagttgccgaatctctctcgccttctctgcttcaggctatagtcagtctgttcttggtgataggtttagtcacagtaactcttctactatcgtttgcttgctcctccgatttgcgccgagaagcaaccgctatagttttcagcggtttcttttgttccacttgatgttgctttcgcttaaagggcggttccttcctccatttgcctgccaatatccacttttgacgagacagatatttattggatctagttccggaagaagataagattttcctcacagattatcctttttgctttgctctattctctttgattttgtcagctttgcgcccccaattttcaaccggatcaagacgacccgagcattctttgatttctttcccccacaacggccatgtcgctgagccgattctcgcagtggatatggccggggagcagagccagaaaccgtagaggccgcgaccgcgagccaccggcgtggagcagcacggccgtgacgaaaggcctcttcccggactccccgtccgggtttcgggagccagacgccggcgtcgggcgcacgggcatgatcagccggcgcggcggccgcgcggaggacagggtcgacagcgagcacggcatggttatcgtgcagtccgacggcgacggctgcctgtctgactcggactccgacgcctccgactggtccatcggctggttggagccgctcgcgccggatctccatagtgacgtggactccgagggcagcttcgccgtcctcgtgccgtgctatcgacgcggccgcgttgaccgacctgcccgacctgatggtaggttccctggtcctggtggtgtccccgcccacggcggcgtttctgataacaggacttctgtggagcagtgggtgtcttcccttcagaactgatttctccagttccattcttagctggcttcaatgtataatacagtattgtttcattcctcatgtgtgggaatagatgaagagaggaaacccaaaagggaaaaggaagaggacagaatcacagaacagaacattagcaatggattatatataaaaaaaacaacaacggatgggtcatgggtgcatcattcttcctaaggttccaaggctaccttattcttgcagagtaagaccatcgtgataaccttgatttgtgattggtatgaaatgtcattgacacttttgacgatggagcaatggattgatggcctcattatcccattttcttctaaagtctagactacctgtatatacaatcattatgtcattggcatgttctttcttctgcattcatgaataactggaactgctcttatggattccacgtatcttttgtatgaagattatttagtttttgt

SEQ ID NO: 118876 - DNA, 1282 bp, Zea Mays
gcttcaggctatagtcagtctgttcttggtgataggtttagtcacagtaactcttctactatcgtttgcttgctcctccgatttgcgccgagaagcaaccgctatagttttcagcggtttcttttgttccacttgatgttgctttcgcttaaagggcggttccttcctccatttgcctgccaatatccacttttgacgagacagatatttattggatctagttccggaagaagataagattttcctcacagattatcctttttgctttgctctattctctttgattttgtcagctttgcgcccccaattttcaaccggatcaagacgacccgagcattctttgatttctttcccccacaacggccatgtcgctgagccgattctcgcagtggatatggccggggagcagagccagaaaccgtagaggccgcgaccgcgagccaccggcgtggagcagcacggccgtgacgaaaggcctcttcccggactccccgtccgggtttcgggagccagacgccggcgtcgggcgcacgggcatgatcagccggcgcggcggccgcgcggaggacagggtcgacagcgagcacggcatggttatcgtgcagtccgacggcgacggctgcctgtctgactcggactccgacgcctccgactggtccatcggctggttggagccgctcgcgccggatctccatagtgacgtggactccgagggcagcttcgccgtcctcgtgccgtgctatcgacgcggccgcgttgaccgacctgcccgacctgatgataacaggacttctgtggagcagtgggtgtcttcccttcagaactgatttctccagttccattcttagctggcttcaatgtataatacagtattgtttcattcctcatgtgtgggaatagatgaagagaggaaacccaaaagggaaaaggaagaggacagaatcacagaacagaacattagcaatggattatatataaaaaaaacaacaacggatgggtcatgggtgcatcattcttcctaaggttccaaggctaccttattcttgcagagtaagaccatcgtgataaccttgatttgtgattggtatgaaatgtcattgacacttttgacgatggagcaatggattgatggcctcattatcccattttcttctaaagtctagactacctgtatatacaatcattatgtcattggcatgttctttcttctgcattcatgaataactggaactgctcttatggattccacgtatcttttgtatgaagattatttagtttttgt

SEQ ID NO: 118877 - DNA, 943 bp, Zea Mays
caatctgaggatcccatttctaaccattgaagtgttctttgcatcaattgagacacataggaatggtttttctgttgatccttcctagaagtgtatctgtattgataattttcgcactccttgatcgatcttgtattgtattcctgcattcatttggcttatcagatttgttattgtttttgtttatttacaaccggaaaaacatgctctctgcctgaaccacaatttacgacaatattttattctggtattctaccattttaatatcaatatcctaatatacataacaaatattgttttctatgcttcaatcaagcttatatatcctaatacagttatgccatttgatcattttgctgtttttttgttattcgtattgtgaacagaattactgcctccgctgtaatccttctgactttgtagtctgtctctattctgtagataacaggacttctgtggagcagtgggtgtcttcccttcagaactgatttctccagttccattcttagctggcttcaatgtataatacagtattgtttcattcctcatgtgtgggaatagatgaagagaggaaacccaaaagggaaaaggaagaggacagaatcacagaacagaacattagcaatggattatatataaaaaaaacaacaacggatgggtcatgggtgcatcattcttcctaaggttccaaggctaccttattcttgcagagtaagaccatcgtgataaccttgatttgtgattggtatgaaatgtcattgacacttttgacgatggagcaatggattgatggcctcattatcccattttcttctaaagtctagactacctgtatatacaatcattatgtcattggcatgttctttcttctgcattcatgaataactggaactgctcttatggattccacgtatcttttgtatgaagattatttagtttttgt

SEQ ID NO: 118878 - DNA, 2095 bp, Zea Mays
ccaaagaagatggcgccgcggccgcgccgacggatgctggcgctgccggcggtgtacccgtgcgaggccatcgagccggcgccgctgctggcgtcgctgatctccctcgccgcggacatcgccggcctccgcgccgccgacgtggacgcgctcccggcgctccgtggcgcggcacgcgaggctgtccggatcgtcggcttggtcctcgtgctcctcgacggcatcgtccgcgacgctccggctccggaccaggcggccgtgctgggcctctcggagctacacgtggcgctacaaaaagctgcggctcctgctcgccgactgcgcccggaagggggcgcgcctgtgggtgctcatgaacgccgagctgtcggcctccgagctccgggtgctgctgggctccgtcgccacggcaatggacgcgctgccgggggacgtcgtcagggcgtccgcggacgccgaggagctcgcggggctggtgtcccggcaggcgtggcgcgcggcgtctcgtctgcggccggacccggaggacgaccgcgcggcgcgggccgtgcgctcggtgctcgcgcggttcgcgagcggcgtgtcgcccgacgcagaggacgccaggctcgtgctcgcctgcgtcggggtcgacacctggctggactgctccgaggaggccgcgttcctggaggccgagctgctggagcgcctggagaccggcagcgacagcgacaacgacaacgacctcgtgctcatcggcggcctcatggcgttcttgctctactgccgcgtcgtcttgttcgaccgcatcgatgattccggcaaggccgcgacggcgaacaggctcccgccgaggtgggcggcgggggtcaacctcaacctggaggcgctgcagtgcccgatcacgctggagctgatgacggacccggtaacggtggccaccggccagacgtacgaccgcgcatccatcaagaagtggatcaagagcgggtgccggacgtgccccgtcaccggcgagaggctgcgcagcgccgagctcgtgccgaacgtcgcggcgcgcgcggtcatcgagcagctcctcctcagccggggcgtcccgctccacgagcccagcagcaaacaccggtgcgcggtcgacaagaccgccacgccgttcggcgcggccgcggccggcggcgtgcgcctctccgcggcgttcctgatggcaaggctgtccagcggcgcgcccgaggaccagaagaaggcgacgtacgaggcccgcaagctctcgaagcggaacgtcttctaccgggcgtgcctcgtggaggcggacgccgtgccgtggctgctccacctgctctcttccacggacgcgtccgtgcaggacaactccgtggcgggcctcctgaacctgtccaagcacccggccgggcggcgggcgctggtggaggccggcgggctgggcctcgtggtggacgccgtgaacgtggccgccaaggtcgaggcgcggcagaacgcggcggccatcctgttctacctctcgtccaacctggagtactgcgaggagatcagccgcatgccggaggcggttccgacgctggtgcgcctggcgcgcgagggcgcgtaccgcggccggaagaacgcgctggtgagcctctacgggctgctccagtgcgcggacgcgcacggcagggcggtgtcggcgggcgccgtggacgcgctcgccggcctgctggggtcgtccgccggagacgacgacctcgccctcgacgccgtcgcgctgctcgcgaggctcgcggagcagccggccggcgcgcgcgccgtcatggagagctcggagctggtgacgaggctcgtggacttgttcggcgaggcggcgtcgcggtcggcgaaggagcactgcgtggcgctgctggcgttgctgggccggcactgcggggacaaggtgctgacgctgctgggcaagctacctggcctgatgccggcgctgtacgcggtgatcgccgacggcaccccgcaggcgggcaagaaagcgcggtggctggtgaatgagatccaccggcactacgaacagcggcagacgccggcgtccgcgccagcaccgacgaccggcgaccgtgtcatccatgtatag

SEQ ID NO: 118879 - DNA, 103 bp, Zea Mays
gatgggtcaaaggaaattataacgttcgaaatgcatatgacatcttgccctcagacaacaccgtaatccatttcaagatccaaatcataaatgagaacttatt

SEQ ID NO: 118880 - DNA, 3650 bp, Zea Mays
tgttgttgggcggagacaggacgaaagaaaacgctatatgtaggggacagaataatttacaggatattgttggagacagcctaattcacgagcggggccaaggcccaacagcgcatccagagcctctccatccggctcggaacagtcgatccaccagccaatctttgatcacccaaccggtctcctcgtgctctaactcgaacccaaaccaaaccaccgtctccttggcggctccgccctaccaccatggctgccgtcgcgcctccgcccgacaacatggacccgccgccggccactcccccagccgccactcctgccgcgacgctaaccccgcctcccgccgccacctccaccccgccaaaccccgcgacgcccggccccgcggcgcctagtccaaaccctaacctgccccccgcccccgcttccgcgcctccggcggcatttgcgccaccgatgcccccagctccggtctctttcgccgctaccttccgcccgctcggtgctcctgcgccaccgccgccgcaccaggtcccgcagtacggcgcgttgccgccgaacccgggctacccgatgccgccgccgatgcagccgccgggcgtccccgtcgtcatgcctccgggctccgttcggccgccggtcatgtacggaccgccccagccgggagcatacatgccgcagcagggcgctgcggtcccccatcctggaatgcctcgttatcctgcaccgtatcctatggttcgtccaggttttgttccacgtccaatgccgccacctggtgttgtgacaattcaacgaccaccaataatttctgggatccgggctattcctcctttggtagccctgactgcccgtccacctcctccagctgttatgctggctgataaaccgccaaccgcagtttatgttggcaagattgccccaacagtagacaatggtttccttctttcacttctccagctttgtggacctgtcaagagttggaagcgtgccgaagatccaagtaatggaaaacctaaaggttttgggttttgtgagtttgaatctgctgaaggcatccttcgtgcgacacggcttctcaacaaattgagccttgatggtcaggaactggtgattaatataaatgatgccaccaaggagtacctgaagaaacatgttgaggaaaagaagagagcacaagtgaagtcaaaagatgcaagtggggatggaactacagctgttgctgaaaatgaatcatcaaaatctgttcctgatgaatcagataaggagacaggagatgctggagacaaggacagtgacgagagcactaagaaatttgggattgttactgatgaagactctcaagctgataaagacgtcgcagaaaaaataagcagtatgattgagcagtggttaaagactagaccgccacctccacctccaccagttcaaccatcggcggatagctctggtgtagataaggcaaaaaatgattctgctgataagactgatgctgacactgttaaaagagcagtcaatgaaactgaaagatctgaaactgcctctcctgataggaggaaggatagagagcatgataaggataaacgggacaaagatattgaaaggcatgaccgtgaacgcgaacgtgaaaggatacggagggatagggagaaggatcataagcatagagaagttgatagactatacagggatcgccttaaggagtgggaatctagggagagagagaaagaatatcagagatatagtgaaaaggagaaagaaaaagatagagaacataaccgcagaagggagatcctgaagcaggaagatgagagcgacgaagaggataataggaaaaggaagcgaaggagtagtagttcacttgaagataggaaaagaaggcggcaacgtgaaaaggaggaagatttggcagataaaataagggaggaagaggaaattgcagaagcaaggcggcgggctgtagagttgcaacagcaagcagatgaagcagctgcagcagcggctgcagctgctgaagagtctgctacacttatggaggttgatgctgacgacgaaaaagaaacagatgcacaaaacgagccgtctgttgtggaagctgataacatcccgagctttgctaatagtgttggtgctggtggacttggtaaggaaaataacagtgaggaaataagcatggtacctagtcataccaagcaaaacaacaatgtcccagtaaagaaactgggttttggtttgattggcttgggcaaaaggacatctgttccatcagtttttgctgaagaggatgatgaaaataatgttgataaaagcataagacctctagtacctatcgactacaatgaagaattacaagccgtacaggctaattcttcgactggggcaaatgtcgcagcagctgctgagtttgccaagcgcatctcagtttctaactcaaaggaagagaaggctgacacagagaaggataggaataggagatccagtgaaggtcgtcctagcgatgagcgaagagagaagctacatgatcgtgagaaggataagtccaagtcggagaacaagaagattctggatgcaaagcaattaattgatatgatcccaaggacaaaggaagaactttttgcctatgatataaactgggtgatatatgacaagaatgagttgcacgagagaatgaggccttggatttcaaaaaagattattgaatttcttggcgaggaggaatcaactttggtggactatattgtttcctgcaccaaagaccacgttcaggcagaaaagatgctagagctcctacagtcgattttggatgttgaggctgagatgtttgttctcaagatgtggcggatgctgatatttgagattaagaaagtcgaatctggactatcaggaagagcaaagtaatgaagctaagcctgttaccttgtatgacctttgatttacatcactcaactgtggtcatgcttgtaaggtcatactgtactaaacaagcatcagaaaccatttttaatgatgctgagtggacggttttgattctacacttcccttgtagaaatgtatacgagaattaatgagagactgcgtaattattttgatagattgttgattgcataatgtgtttggtgcagttcacatgcatcaacagcctactcttgttctctggtgaacgacgaagaatgtcgaaggctggcagtagtcgcaagtataaatccctaatcatgctcttcgtagttcctgctgtgcaataactctgcagttttatgaccatctaattatggctcattttgttgtgttgtcttttgaggttgtatgtaagcaattttttgttgtttttgctctaattgtggatcatgttgttgcgttgtattttgaggttagcatgtgttttggttagcagacggttggtgttgaggtggtccagcacttttcttttgaatggaaccatcttgtgttatgtttaggtcttgttcgtttgtgtcggattggtgggtcggaacgattcctagccggattgtttctctaatttatataaactttgattaggtctcgttcgtttctggctgatccagccgttccaggcctcttttcagtcagaaaaattatccagtttcgaatccggcactcagctgttcgtttcaatctgaaataaaaacaaaaac

SEQ ID NO: 118881 - DNA, 1238 bp, Zea Mays
atgacgaagacgaactagccgcacctgctgcgctgacttccgcagccactacaccccacgcgaagcacagcaagatttcactagcagaagccagatcgagtagaggcgggatccggcggaggcgcgaggcatggagatcgcgacggttgacctccgcggggtggtgccggggggcgccgggtgggaggccgcccgcgcggcggtgaccgcgtccatggtggcgcacggctgcgtcgtcgtggcgcacgacgcggtcggcgcggacctccggcaggcgctgttctcccgcgcgctgccggagctcttcgcgctccctctcgaggccaagcagcggacggtgtcgcccaatggggagttcaggggctacatcggccagcgccccggcatggactgggagagcctccgcgtcggaaagcccacggacgccgccagcgtcagcggcttcgctgagacgctctggccggagggaaacccagagttctgtgacacgatcgtggcgttcgccgagaacatgatggagctggaggggacggtggagacgctggtcctggaaggcctcggcgcccgcgggcagagcatccgcgcccacttcggctcgctcgaccacgccgtccggctgtcgcactacggcgtgccgccggacacggagagcagcatgtcgatgcagccgcactacgacgacagcgtggtgaccgcgatcgtgcagcacgaggtggaagggctcgagatgcacgccggggacgggcgctgggtcgccgtccctgccgaagtcggcaccctcaccttcgtcgccggcgagcagttcagggtcgtgacgaacgggcgcgtgccggcgtgcctccaccgcgtgaggacgcccagcaaccgcgagcggttctcggtgctgttcggccgccggcagaaggacggcgtggcggtgcgcgcgatggaggacctcgtcgacgcggagcacccgctggcgtacaacccgctgcgccatgaggagtactccaggtggcgtgtcacacccggttttagaaggcaaaccgaatgcgaaccatgtacgtgccaggatcagttattcacgtacacagcagttacataatatggacatcatcacacagtgctcaaaatagtattaaaaggggaaatagtcgattacatcatacgtctgagacgtccatatagttcttacaataaatcaaagtgcggaaaagaaacgtagataacacggccttcacaggcagccgactgggggt

SEQ ID NO: 118882 - DNA, 100 bp, Zea Mays
gtgcctatgatcttgaaccaaaggggctatagattgcaaccaaataaagtacctttttgttctgaagcaggcaagcatgttgtagtcaatgagtgcggtg

SEQ ID NO: 118883 - DNA, 237 bp, Zea Mays
gcacatccagtttttattgatgcctgactttagcaatcactccatattttgatctatcttttttataagtttgactttatgggacttattttagaaacttgatctcacaaactttctcttatttggtctatgtatgatagaattatgtcattttataatctctgttcattcagtcaatcgttgtgaactctcttataatcgctcacttcattggccgtgttgtaccaagacatattt

SEQ ID NO: 118884 - DNA, 216 bp, Zea Mays
ttataagtttgagttcatgtaacttattttagaaacttgagctcacaaactttctcttattttgtctttatatggtggaattatgtcattttataatctatgtccgttcagtcagtcgttgtgaactctcttctaatcactcacttcattgatcattttgtaccaagacatattggatggagtaaacaataacatcagttagccaaatcaaaaaaa

SEQ ID NO: 118885 - DNA, 504 bp, Zea Mays
atgagttcttgggaggaggatgctagacaatttcttttagaccaggaagaagaagatgatgaactcttctttgtaattgtctctgttgttctcgcggctatgcaagaagagaaaagggcagtccatacttcttctcttactggtgctatgaagattaaggaagttctagaagggcatgaaatttggagcaaagttgagtttgggatggagccaaatattttcagagcgatactagctttccatagagccgagggtcttctacatgacacaagaggtgttactgttgaagaacagtttggcatgttcatgtacatgatctcgcataatgctactaatcaagatatgcaaaaatggtttcaacatagtggtgaaaccattcacaggaagataaatgaagtctttgatataattccagccttaacaagtaggtttgtaaagcttccaagttccgtacaaactcacatcaaaattgtaaccgactctcgtttcatgccttttttctag

SEQ ID NO: 118886 - DNA, 411 bp, Zea Mays
atggcgtcgggctcctctcacccccaaattgaccaggacaatattgcagaacacggacacaatgcagccaagcatgtagcctcattaatcagtgtagatacgcctaaagtcggccgtgacatacagcaacgcacgaccaagaaaaggtggggcaagtgcgtggaccagcagagtcctttgtgttgcattttgttttataattgcattagccttggacttacgcttggagcaattgctggtgttttgtcgaggaatgagctcgtcgctgcagctctcttcactcttgcaatcaatcacaaacaggtggatagaattctggacaaagaaaattttatattggaagaacttcttgatgaggatgaaattaatcaggagtgcaaagcactgaactcaatactcataaacttgtaa

SEQ ID NO: 118887 - DNA, 2047 bp, Zea Mays
catttgcaccgttcgagttcgatcgattcccggacagcgccaaacgtcatccgttgcgtctgcaatattaatcttggccttagtggcgtcgtatctgtgactgtgatcgctcgtcgctttgcttgagagggtcccggtgtgcttgtatatatgtgtgccacgccacgccatgcaggatgacagcacgcataggacgaactaccgatgcaagctgcgatcgatcagtcaccgcatctccggttccgcgcaggcatggacgacaagtcctgctacgtggcaaccggcctctccctggcggccatcctcctcgtcctccaccgcctcgtggtccgtgctggcggcaaggggaacgccgccgcgcggcggctgcctcctagccctcccgccgtcccgttcctcgggcacctccacctgctagcgtcggagtgccctctccactcgtcgctggcccgcctcgcggcgcgccacggccccgtgctctcgctgcgcctgggctcccgcgccgccgtggtggtgtcgtcgccggagtgcgccgaggcgtgcttcacggagcacgacgtggcgttcgccaaccgccccaggctgacctcgcaggcgctggcctccttcggcggcgccgcgctggccgtgtccagctacgggccctactggcgcaacctccggcgcgtggccgccgtgcgcctcctctccacgcaccgcgtggcgtgcatgtgccccgtcatctcggccgaggtgcgcgccatgctgcgccgggtggggcgcgcggccgaggcggcggggcgcgtccagctcaaggccagtctgttcgagctctccctcagcgtgctcatggagaccatcgcgcagaccaagacgtcgcgcgccgacgacgcggacgacgccgtgtcgcccgaggcgcacgagttccggcggatcgtcgacgagatcctgccctacctcggcgccaccaacctgtgggactacctgccgctcctgcggcggttcgacgtgctcggggtgaggaacaagatcagggacgttgtcggcaggagggacgccttcctgcagcggctcatcgacgcggagcggcggaggctggacggcgacggcgacggcgacgagaagaagagcatgatcgccgtgatgctctcgctgcagaagtcggagccggacgtgtacacggacaccatgatcatggcactgtgcgggaacttgtttacagccggaacggagacgacgtcgtccacgatagaatgggccatgtcgctgctgctgaaccacccggaggcgctgaagaaggccgaggcagagatcgaggcggccgtgggcgcgtcccgcctcatcaccatggacgacgtgccggggctgggctacctgcagtgcgtcatcaacgagacgctgcgcctgtacccggtggccccgctgctgctgccgcacgagtcggcggcggactgcacggtcggcggctacgacgtgccccgcggcacgctgctgttcgtcaacgcgtacgccatccacagggacccggcggcgtgggaggagccggacgagttcaggccggagcggttccgcgacggcaaggccgagggccggctgatgctgccgttcgggatgggacggcgcaggtgccccggggagacgctcgctctgcggaccgccggcctcgtgctcgccacgctcatccagtgcttccactgggacagaatcgatggcgctgagatcgacatgaccgagagcggcgggctcaccatgccccgggccgtcccgttggaggccacctgcaagcctcgcgaagccatgcgtcatgttcttcagcagctctgattggtctatgtgctaaacattctcatccctattctctcttgtgtgtgtggcagtacgaacagcacgtgctagctaaataagctgcgagcaatagctatccgcgtaacagtatggttcgtctaagttgttatctttcaaaagttatctagtactataaacaaattgttcgtgtcttgttcattcgtctgtctcttatgttattttgtcacacaccctgtccgccttctatcccagtcattgtctc

SEQ ID NO: 118888 - DNA, 114 bp, Zea Mays
atgctcttatacaacataaatagaaatagaaagaaaagagaggagtgtgcaaaaagtacaattaaaataaatgtgagatgtgttattatgaaatataaagattggcaattttaa

SEQ ID NO: 118889 - DNA, 1136 bp, Zea Mays
gagttaatttcgcagttaatggtgcgaccctgacgggggccgtcttatccccttcctattctgctttcccctcgctccagagtccagtccccagacgagcggttggagcttcgacgtgcggtttccatttcctgccctgctctgatggccgtcgccgaagtggcgatcgagattctcccgcagcagcagcagcagcagccgccgccgccgccgcgggaaccggcggtagtgcctccgaacctctccgtgccgagagtgctccagtatctgtacctcttgagcgcgtgggtcgcctgcgcgggcgtggctgccgggaccgtggcgcgccgggccttgggcgactcttccccgttggtctacgggttcctcaaagtctcgatcggagccctcgttttccccgcgctgctcatcctcgtcttcgccctgcgggtcttgcgcgccatgcttgccgtggggttcagacggtcactccgcactcacgccagggagattcagatccaagccacgaagatatttagagcgttaacgtggaaggtgctgcaggaccctattgtgcttgcgtggctcgcatctttgcttttcatcctgcttcttgcagcaagtgttctggtgtttgtgggacttctaccaatggaggagtctcgcagagaaaggattggttatgcgctctctgatgtgggggtattgggtgcaatggcaatgtattgccttatcattatacccagttttgcgctgaagatctggaggagcaagtagggtggcgatgctgcacaaggcacaacactggcgatatctgaggtacccaactgtttctctggccatcctgtggtcttgtgtcgtataagcttttctataacgaaggatcgtacatagttgtgctttgttgcctcttattagtatgttaacagcccttttagtagcataaatcagaattctgactgtgaaagctgcttcaataggtagttattgaacaatagacttcatgtgaacgttagcataaaatctgctacaggctgaaaaatgtttgaaagtacttttttttggaaattatgtgtaattgaatccagtctgaggccatgtgtaactcctaatctgtcactacggttcctggatttttcatctattactgaagacaa

SEQ ID NO: 118890 - DNA, 1730 bp, Zea Mays
gagttaatttcgcagttaatggtgcgaccctgacgggggccgtcttatccccttcctattctgctttcccctcgctccagagtccagtccccagacgagcggttggagcttcgacgtgcggtttccatttcctgccctgctctgatggccgtcgccgaagtggcgatcgagattctcccgcagcagcagcagcagcagccgccgccgccgccgcgggaaccggcggtagtgcctccgaacctctccgtgccgagagtgctccagtatctgtacctcttgagcgcgtgggtcgcctgcgcgggcgtggctgccgggaccgtggcgcgccgggccttgggcgactcttccccgttggtctacgggttcctcaaagtctcgatcggagccctcgttttccccgcgctgctcatcctcgtcttcgccctgcgggtcttgcgcgccatgcttgccgtggggttcagacggtcactccgcactcacgccagggagattcagatccaagccacgaaggtattggattgagttttagttttacgagatatatatactagtagtttggtaggttctagttctctgtgtgttgatgtggaatcatatactgtatacacacgcagtttcagttgggaaatagcttgcgttatttcttcgaaaggagaattgatctgaatctgtccaatttcagaaaataatcatacacatcctatcaatacggtcgtgtgagctcaaaattaaacgctttttagtttgctccaagtcgtcctcatcaggtctatggtgtgtggatgccggagctgctttcagttatgctgtatcagtttctctagagaaaatttaatttgtgcactatattttcgtgattgcatttgcatctttccagttttatattcaaacataattataaatccaatccaatccctatgattatttcaatcgaggagaactgactgagtttgcttgctcttgctgacatgctctcggacatccttgtcagatatttagagcgttaacgtggaaggtgctgcaggaccctattgtgcttgcgtggctcgcatctttgcttttcatcctgcttcttgcagcaagtgttctggtgtttgtgggacttctaccaatggaggagtctcgcagagaaaggattggttatgcgctctctgatgtgggggtattgggtgcaatggcaatgtattgccttatcattatacccagttttgcgctgaagatctggaggagcaagtagggtggcgatgctgcacaaggcacaacactggcgatatctgaggcaaggacagttggagaaggtgcaaaagatggactcctagttaccgtgggtgaagccagctaattaatgttttagagaaataattctctcttggagactactactactgttctacctcagcatcaccggtgctggtgcgtgtgtaacgtggtcactgtgggtatcatcactaccctaccctaagccctatcagaacataagcaccccttggagatttgtgccgtctaaatgaatatagttggttcagcgtcgtgactggatctgtggttgtgattattacgtatacagctagttgtggacttgtggtaggagtgtatcaatgccagcttgcgggcatgtggccatgtgggcgactaggcgagttcttggttagtactactcagctgtggattgttgttcgaatcttcatttagctgatgaaggctaccagacggagatgggtgactaacct

SEQ ID NO: 118891 - DNA, 1260 bp, Zea Mays
ctgacgggggccgtcttatccccttcctattctgctttcccctcgctccagagtccagtccccagacgagcggttggagcttcgacgtgcggtttccatttcctgccctgctctgatggccgtcgccgaagtggcgatcgagattctcccgcagcagcagcagcagcagccgccgccgccgccgcgggaaccggcggtagtgcctccgaacctctccgtgccgagagtgctccagtatctgtacctcttgagcgcgtgggtcgcctgcgcgggcgtggctgccgggaccgtggcgcgccgggccttgggcgactcttccccgttggtctacgggttcctcaaagtctcgatcggagccctcgttttccccgcgctgctcatcctcgtcttcgccctgcgggtcttgcgcgccatgcttgccgtggggttcagacggtcactccgcactcacgccagggagattcagatccaagccacgaagatatttagagcgttaacgtggaaggtgctgcaggaccctattgtgcttgcgtggctcgcatctttgcttttcatcctgcttcttgcagcaagtgttctggtgtttgtgggacttctaccaatggaggagtctcgcagagaaaggattggttatgcgctctctgatgtgggggtattgggtgcaatggcaatgtattgccttatcattatacccagttttgcgctgaagatctggaggagcaagtagggtggcgatgctgcacaaggcacaacactggcgatatctgaggcaaggacagttggagaaggtgcaaaagatggactcctagttaccgtgggtgaagccagctaattaatgttttagagaaataattctctcttggagactactactactgttctacctcagcatcaccggtgctggtgcgtgtgtaacgtggtcactgtgggtatcatcactaccctaccctaagccctatcagaacataagcaccccttggagatttgtgccgtctaaatgaatatagttggttcagcgtcgtgactggatctgtggttgtgattattacgtatacagctagttgtggacttgtggtaggagtgtatcaatgccagcttgcgggcatgtggccatgtgggcgactaggcgagttcttggttagtactactcagctgtggattgttgttcgaatcttcatttagctgatgaaggctaccagacggagatgggtgactaacctagacctaggtgagtgaccctcaaagagcgttcttgagact

SEQ ID NO: 118892 - DNA, 1036 bp, Zea Mays
ctgacgggggccgtcttatccccttcctattctgctttcccctcgctccagagtccagtccccagacgagcggttggagcttcgacgtgcggtttccatttcctgccctgctctgatggccgtcgccgaagtggcgatcgagattctcccgcagcagcagcagcagcagccgccgccgccgccgcgggaaccggcggtagtgcctccgaacctctccgtgccgagagtgctccagtatctgtacctcttgagcgcgtgggtcgcctgcgcgggcgtggctgccgggaccgtggcgcgccgggccttgggcgactcttccccgttggtctacgggttcctcaaagtctcgatcggagccctcgttttccccgcgctgctcatcctcgtcttcgccctgcgggtcttgcgcgccatgcttgccgtggggttcagacggtcactccgcactcacgccagggagattcagatccaagccacgaagatatttagagcgttaacgtggaaggtgctgcaggaccctattgtgcttgcgtggctcgcatctttgcttttcatcctgcttcttgcagcaagtgttctggtgtttgtgggacttctaccaatggaggagtctcgcagagaaaggattggttatgcgctctctgatgtgggggtattgggtgcaatggcaatgtattgccttatcattatacccagttttgcgctgaagatctggaggagcaagtagggtggcgatgctgcacaaggcacaacactggcgatatctgaggcaaggacagttggagaaggtgcaaaagatggactcctagttaccgtgggtgaagccagctaattaatgttttagagaaataattctctcttggagactactactactgttctacctcagcatcaccggtgctggtgcgtgtgtaacgtggtcactgtgggtatcatcactaccctaccctaagccctatcagaacataagcaccccttggagatttgtgccgtctaaatgaatatagttggttcagcatcgcaaaaaaaaaaaaaa

SEQ ID NO: 118893 - DNA, 252 bp, Zea Mays
cagcggaaataaattatttattacaaaatggttacaagttacaacatttacaagttatagcaagattacaatatatatcatcggagttggttacaaaagaaattgattcaaaaagattacaatttgaatgtataaaacatttataagttttaaattacatgctagcttaagtgacaatcctcaataaagaagctaaagatgggatacacctatataagaaggccgagcccaccggcacttagcagcatccac

SEQ ID NO: 118894 - DNA, 301 bp, Zea Mays
gagcagcaagggcagcgaggtttcaccggagtttgtgacgtcgcgcaggggctgtgcagatcaagttggagctcgctgcggtatttcatcgaacacgtcgagggcgcgacacgatggggtttcatggttgctgttgtaccgtggtcgggcatgaggataatctgcacagggccaatcagcaagattcgagcagggatagatggagtagagttagcgcttgacaaacctagggcaggagcaaccggccatccaacgcagggggcagaggtgagcaccagggagggcagcatggccagcatcc

SEQ ID NO: 118895 - DNA, 1093 bp, Zea Mays
acaccaccaccaccggcagcaagaaaaaacattctttgtcctcttctcctccgctccccatttctcttgctagggtttctacccctccatatcctcgctccacggtcatggcgaagacgaagcagggaaataaggacgtggattcgtacaccatcggcggcaccaacaaggtcgtctatgtgggagactgcgtgctgatgcgggcgtcggactcggacaaccagccgtatgtggcgcgggtggagaagatggagggcgacgggcgtggcagcgtgcgggtgcaggtgcggtggtactaccgccccgaggagtccaagggcggccgccggcagttccacggcgccaaggagctattcctctccgaccatttcgacctgcagagcgcccacacaattgaggggaagtgtgttgtccactctttcaagaactataccaggcttgacaatgttgggcctgaggacttcttctgccgattcgagtacaaggcggccaccggttcgttcacccctgaccgcgtggcagtgtattgcaaatgtgagatgccgtacaaccccgatgacctcatggtgcagtgcgatgcttgcaagcactggttccatccatcttgtgtggctatgaccattgaacaggccaaaaagctagatcactttgtttgctcagactgtttcaaagaaaatggttcaaagagactttcaaatgcatatgccacttcaccaaattttgagcctaaggctgaaccaaaaaggcagaggaggtaacaaactgtgagtggtaacatccatatgggtaaggggagatgtgctgcttctgtggtgaatcagcccttgccctttgctgtggtgagagcagaggtgtacagtgtactagaccagtgtttgctgttaggggaacgggttttgttcgatgtgtagaccgtgtggcatggcatgcagttgttggtagaggtcaaaagaacagtcgttgtgttcacttggtcagcttagcgccttagcccttgttaatgtgttaatgcactgtgttaactcagcgagccccccttgtggctgataatgcaagtcatgcagttgttgatacaaatgttgctgcggccatt

SEQ ID NO: 118896 - DNA, 651 bp, Zea Mays
cttccattgctggctgtcccttttactgtgcatgcatttttagcttgcttgtgatgattgggttgtctattttctctcaaggtattgcaaatgtgagatgccgtacaaccccgatgacctcatggtgcagtgcgatgcttgcaagcactggttccatccatcttgtgtggctatgaccattgaacaggccaaaaagctagatcactttgtttgctcagactgtttcaaagaaaatggttcaaagagactttcaaatgcatatgccacttcaccaaattttgagcctaaggctgaaccaaaaaggcagaggaggtaacaaactgtgagtggtaacatccatatgggtaaggggagatgtgctgcttctgtggtgaatcagcccttgccctttgctgtggtgagagcagaggtgtacagtgtactagaccagtgtttgctgttaggggaacgggttttgttcgatgtgtagaccgtgtggcatggcatgcagttgttggtagaggtcaaaagaacagtcgttgtgttcacttggtcagcttagcgccttagcccttgttaatgtgttaatgcactgtgttaactcagcgagccccccttgtggctgataatgcaagtcatgcagttgttgatacaaatgttgctgcggccatt

SEQ ID NO: 118897 - DNA, 1987 bp, Zea Mays
acgatgcgagtggcagcgcgcgagcgcccattcccgttcctcctcgcccatcggcttctcgcggtctcgccccggcacctcgcactcccaccgcagtccaaaatcctcggcctcacaccctatgcctccgcctgttcttcgcctgttcgcggcagctccgccccgcgctctcggtggccgcgccagggcgcatcgtggcgatggcgggttcgcgcgcctgcgcctgcgcgtcagagcagcggctggggaggccgcgccggcgccttccagaacccagatgataatggataagatctctgctggcgaaggagtcggaggcgctggaggggcttactcatatagtgcgttgaaaagattggatcaaatatggtctagtatttgtgaagctcaagcagattccaaagtccctgaagttgttactcgggttgaagggctgttggctgattctgatcttggttctggttcagagatatttgatgtaattgtatgtggcggcacattaggtatatttgtagctactgctctcagttctaaaggccttcggattggaattatcgaaagaaacataatcaaagggagggaacaggagtggaatatttcaagaaaggagcttatggaaattgtagagattggtattctttcagaagcagaacttgaacaaataatttcaagtgatttcaatcctaatagatgtggatttgaagataaaggtgaaatttgggtggagaacattcttaatcttggtgtttcgcctgctaaacttgttgagaacatgaaagaacgcttcatttcttcgggaggagcaatatttgaggagaaaagtctatcaagcatttatgtctatgatgatctcgctgcttttcctgctggttctggtcccaatgaccgtactacatacatgttcacttatgttgatccaacatttggaggcccaaagctagaagaacttttggaagtgttttgggatcttatgcctgcttaccaggatgtgcttcttcaaaatttggatataagaagagttatatttggaattttcccaacttatcgggatagccccttgccagctgcatttgaccgtatcttacaggttggcgatgctagtggaatacagtcacctgtttcttttggaggttttggaagcttgacgagacatcttggccgtttgtctagtggtatatgtgaagcagttgaaggtgatttcctggatgctcatagtttgcagctgctcaacccttacatgccaaacttaagtgcatcatggttgttccaacgagcgatgtcagtaaggccacatgtcaatgtttcaccaacctttatcaatgagcttctctttgctaattttcagtcaatgcagaaactaggggattcggtacttcggccatttctacaggatgtaatacagtttggacctcttgtgaaaactttggggctagtaatgatcactagaccacaaattttaccttccatatttaagcaggttggactgggagtcatccttgagtggtcaggccattttatgatgcttggttactacacattcctttctacctatattgatccgatcctgaggtcttgggtggaatccttgcccccacgggacaaatatcagtggaaacggtacctggaagcttggagatatggagccggtttagattaccgccaaggggaataaactgtttcactaaaaacacatgaaagtttcctcagaaacaaaattatgtatagatacatgaatatagcactgtcaggggaaagatgaatagagtacatatatgatctctgattgatttagttttccttttccagagcacaagattgaacatcaagtttagaatgtgtattatctagtttcacttgtaatttgcccactttactgaactgatggagtgaatatgtatagtactctagaatttcaaataatgctgaatggagctgagatgctcaatatttgttgatcaatgtatcaattatgtgaaataaaagtaaa

SEQ ID NO: 118898 - DNA, 2218 bp, Zea Mays
acgatgcgagtggcagcgcgcgagcgcccattcccgttcctcctcgcccatcggcttctcgcggtctcgccccggcacctcgcactcccaccgcagtccaaaatcctcggcctcacaccctatgcctccgcctgttcttcgcctgttcgcggcagctccgccccgcgctctcggtggccgcgccagggcgcatcgtggcgatggcgggttcgcgcgcctgcgcctgcgcgtcagagcagcggctggggaggccgcgccggcgccttccagaacccagatgataatggataagatctctgctggcgaaggagtcggaggcgctggaggggcttactcatatagtgcgttgaaaagattggatcaaatatggtctagtatttgtgaagctcaagcagattccaaagtccctgaagttgttactcgggttgaagggctgttggctgattctgatcttggttctggttcagagatatttgatgtaattgtatgtggcggcacattaggtatatttgtagctactgctctcagttctaaaggccttcggattggaattatcgaaagaaacataatcaaagggagggaacaggagtggaatatttcaagaaaggagcttatggaaattgtagagattggtattctttcagaagcagaacttgaacaaataatttcaagtgatttcaatcctaatagatgtggatttgaagataaaggtgaaatttgggtggagaacattcttaatcttggtgtttcgcctgctaaacttgttgagaacatgaaagaacgcttcatttcttcgggaggagcaatatttgaggagaaaagtctatcaagcatttatgtctatgatgatctcgctgtactgaaacttagtgatggtgattctttgtcttgccgacttgttgttgatgctatgggaaatttttctccaatagtacggcagatccggtctggtagaaaaccagatggaatgtgccttgttgttggtgcttgcgctcatggattcgaaaaaaatacaacaagtgatattattttcagtagctcatcagtgaaaagagctgggaattcaggagtacagctcttttgggaggcttttcctgctggttctggtcccaatgaccgtactacatacatgttcacttatgttgatccaacatttggaggcccaaagctagaagaacttttggaagtgttttgggatcttatgcctgcttaccaggatgtgcttcttcaaaatttggatataagaagagttatatttggaattttcccaacttatcgggatagccccttgccagctgcatttgaccgtatcttacaggttggcgatgctagtggaatacagtcacctgtttcttttggaggttttggaagcttgacgagacatcttggccgtttgtctagtggtatatgtgaagcagttgaaggtgatttcctggatgctcatagtttgcagctgctcaacccttacatgccaaacttaagtgcatcatggttgttccaacgagcgatgtcagtaaggccacatgtcaatgtttcaccaacctttatcaatgagcttctctttgctaattttcagtcaatgcagaaactaggggattcggtacttcggccatttctacaggatgtaatacagtttggacctcttgtgaaaactttggggctagtaatgatcactagaccacaaattttaccttccatatttaagcaggttggactgggagtcatccttgagtggtcaggccattttatgatgcttggttactacacattcctttctacctatattgatccgatcctgaggtcttgggtggaatccttgcccccacgggacaaatatcagtggaaacggtacctggaagcttggagatatggagccggtttagattaccgccaaggggaataaactgtttcactaaaaacacatgaaagtttcctcagaaacaaaattatgtatagatacatgaatatagcactgtcaggggaaagatgaatagagtacatatatgatctctgattgatttagttttccttttccagagcacaagattgaacatcaagtttagaatgtgtattatctagtttcacttgtaatttgcccactttactgaactgatggagtgaatatgtatagtactctagaatttcaaataatgctgaatggagctgagatgctcaatatttgttgatcaatgtatcaattatgtgaaataaaagtaaa

SEQ ID NO: 118899 - DNA, 249 bp, Zea Mays
atgccatccgcgacaccggccatctttgcgccatctgggacatcggtggaggcggtggcagctacaacccgaggaagttcttcattggacggctcccgcgggacaccacaaatggagggagcaggggaagacaatggcaacgatttgctagagatgcaggcatctgaccctgaggcgtacaatgacaaggtcatcagagcgctctgtgtggaattagagatggtacaaccagtttcgcatattgtatag

SEQ ID NO: 118900 - DNA, 195 bp, Zea Mays
atgatccatatacctccactccttgtctccttttgttgttcttttctatttgagcgagaactccagctgcctgaaaaggttcatgggaaggaacaagtgttgtttgatactgctttgcagtgttttgagaattccatagaagtgaaaatatatagagggattaacagcttagttttgcatgaggttacatgctag

SEQ ID NO: 118901 - DNA, 1094 bp, Zea Mays
cctgttagcaaggtgctttgcaagctgcggcgccttgagcaaggaggtccatgtgagttagaagttcttggaaagaagggtatggtccaattaaatggaagactggtacaacaaattatcgatgctattttggttctggacattgatgatcctccgtgcgctattgctgcaggagctcttttatttgttttggcaagtgatgtcgtattactccaatattgtttccttagttatcttaatgatgacagacgaaatttactgatgaacctgtacagcctgttagcaaggtgctttgcaagctgcggcgccttgagcaaggaggtccatgtgagttagaagttcttggaaagaagggtatggtccaattaaatggaaggtccataagttcaggcacaaaagttccccttacaggaggggatgaagtcatattcaattcatgcggcaaccatgcttatatttttcagcatcctttgagtgacaaagttcctaaaacggtgccatcatctgctgttagccttatagaatctccggttgctagcgtaaagcgcatccgtacatataagagaacaggagacacttctgctattgctttagccgttcatttttctacatgttgtaggggcttagcacggagcttggctgagaagtacggcaagacgctggcgcagctcgtcctccgctggggtctgcagcgggacacagtggtgatccccaagacctctaaggtggagaggctgcaggagaactttgacgtcttcggtttcgacatctccggcgaggacatggagaggatgaaggccgtcgaccggaagtactggactaaccagcctgccaagctctgggcatcgacctgtgaaggcaattgtaaggatctgagaaccttgagtggtcgcatgaaaaaggttggacagtacctcttgcgcaggcgaacacaatatatgtctcagtttgagaaattagctatggagctcatgccaaaattgggagaacactttgttgaagaaatgataaacccaagcatgtatggaagccggtggtttatcacagttttctcgtgttccttcccatttcatctaactcttagagttttgtaa

SEQ ID NO: 118902 - DNA, 258 bp, Zea Mays
atgtctccagacacacacgatgtccccggaactctgtcgggtgatggcttccacagggcgacggcctccacggaaaaccggcgagtcctctctaagcgctcgatctcagatcagtatgtgatggttataccaatttggagagggaaggggttccgatggataaaactgcagcatctgcaccacttctcaatgctatcttggatggagattgacgcaaatgatacaggacttgaaaactcaatgcttggagcactttaa

SEQ ID NO: 118903 - DNA, 546 bp, Zea Mays
tgaaacggacgtgccagcaaaaaccgccacgtgctgaaccgcctgccgcaccgcactagcgtccgcaacagcaggagacgtcctcgctttccacctgcacagagcgccagggccgtagcgtgccgatcgctcgatcccaccaactgaggccactgtctagttgccgactctcctcgcaggccgcaatctcgcagacacgcaccgtcgcggtatccgtatcgccagagtcctcacggatggcctcgccagcgatggtcccgctgcggcagctcttcgtcgacggcgagtggcgcccgcccgcgcagggccgccgcctccccgtcgtcaaccccaccaccgaggctcacatcggcgagatccctgcgggcacagcggaggacgtggacgccgcggtggcggcggcgcgggcggcgctcaagaggaaccgtggccgcgactgggcgcgcgccccgggggccgtccgggccaagtacctccgcgctatcgccgccaaggtgattgagaggaaacctgagctggctaagctagaggcacttgattgtggga

SEQ ID NO: 118904 - DNA, 1018 bp, Zea Mays
gaaattctgttgcattccttaacattgcatttttcttgacagcctgttacactggaacttggtggaaaaagtcctatagtagtatttgatgatgttgacattgacaaagctgtcgagtggactctgtttgggtgcttttggaccaatggtcagatttgcagcgcaacatctcgtcttcttatccatacaaaaattgctaaaaaatttaatgagaggatggttgcatgggccaaaaatattaaggtttcggatccacttgaagagggttgcaggcttgggccagttgttagtgaaggacagtatgagaagattaagaagttcatatcgaatgccaaaagccaaggtgctactattctgactggaggtgttagacctgcgcatcttgagaaggggttctttattgaaccaactattattactgatatcaccacatcaatggaaatctggagggaggaagtctttggtccagtcctgtgcgttaaagaatttagcactgaagatgaagccatcgaacttgccaacgatacacagtatggtttggctggtgctgtaatttctggtgatcgggagcgctgccagaggttatctgaggagattgacgctggatgcatctgggtaaactgctcgcaaccctgcttctgccaagctccctggggcgggaacaagcgcagtggatttggacgtgagcttggagaagggggcattgataactacctgagcgtcaagcaagtcacggagtacatctctgatgagccgtggggatggtaccaatccccctccaagctgtaaactggcaagacgaaaatttgtctgtttcggtagaataaatatatctcgatgctatacagaacgaacccgtgtatcacattgaatgacatggtgaaaaaggcacatctgcaggataaaggcgagagttgagttgaaaccaaaaattttggaactgtgccattataagaggtggattttgtcaatgggccttgtctagacttcgttatcagcaaagacagatttgccccta

SEQ ID NO: 118905 - DNA, 1156 bp, Zea Mays
cccgttcggcgcgagccgagttttcgcatttgtctcgacgcggccgcgcgatctctggcgctgcatcacgggccggggccgcgagccacacacggagcaagcagccaagcgagcgaagcgaacaaaaagctcacgggggccagctaagcgcacggaccgacgcccgacgatggccgctctgccgcggcggaggctcctcctctttctcgcgctgctccgtgttctaatctgcggagcggcgccgttccgggcgagggacctgctgccgctgctgccgcggcggatggcgtggcagctcatgggcgccacggcccacagcgccgtcgacctgctcccgtcgttcgtcggcgccgtggcgccgggcgggcccgcggccgcctggcgcggcgcgtgcttcgacgaaaaccaggccgtgctcgacctcacccccggccgcaacgggaccgccgggggcctcggtggcgccgtcctccgcctcaagactgcttcgcctcagagctggacatgcatggacctgtacgtgttcgcaacgccctacagggtagcctgggactactacatgaggtcgaacgagaaccacaccttcgagatcaaagcgtgggaggacgcggcagagatggaatacgtacgtaaagcagcacgggatcgccgtcttcctgatgccatctgggatgcttgggacgctgctgtccttggccgacgtggcgcctttgttctccaacaccggctggggccaggacgccaacttggcgttccttgggaagcacatgggggcgtcgttcgagaggcgtcgttccgcgaacacaattataaggagggaggacgtgcggtcgggcgacttcttggcgctctccaagatccggggccggtggggcgggttccagacgctggagaagtgggtcaccggcgccttcgccggccacaccgcggttgtcctcaaagatggtgacgccaacctctgggtcgcagaatcaggctacgaaaataacaaggcagttcttgctggttcagttttttcatagctagagctaggaagctagctttgattcagccttatagctagctaatttatggcaataattgtggcctgcagggtgacgagatcattagcatgactccgtgggacgagtggtgggggatggcgctcaaggacgag

SEQ ID NO: 118906 - DNA, 2032 bp, Zea Mays
cccgttcggcgcgagccgagttttcgcatttgtctcgacgcggccgcgcgatctctggcgctgcatcacgggccggggccgcgagccacacacggagcaagcagccaagcgagcgaagcgaacaaaaagctcacgggggccagctaagcgcacggaccgacgcccgacgatggccgctctgccgcggcggaggctcctcctctttctcgcgctgctccgtgttctaatctgcggagcggcgccgttccgggcgagggacctgctgccgctgctgccgcggcggatggcgtggcagctcatgggcgccacggcccacagcgccgtcgacctgctcccgtcgttcgtcggcgccgtggcgccgggcgggcccgcggccgcctggcgcggcgcgtgcttcgacgaaaaccaggccgtgctcgacctcacccccggccgcaacgggaccgccgggggcctcggtggcgccgtcctccgcctcaagactgcttcgcctcagagctggacatgcatggacctgtacgtgttcgcaacgccctacagggtagcctgggactactacatgaggtcgaacgagaaccacaccttcgagatcaaagcgtgggaggacgcggcagagatggaatacgtaaagcagcacgggatcgccgtcttcctgatgccatctgggatgcttgggacgctgctgtccttggccgacgtggcgcctttgttctccaacaccggctggggccaggacgccaacttggcgttccttgggaagcacatgggggcgtcgttcgagaggcgtcgttccgcgaacacaattataaggagggaggacgtgcggtcgggcgacttcttggcgctctccaagatccggggccggtggggcgggttccagacgctggagaagtgggtcaccggcgccttcgccggccacaccgcggttgtcctcaaagatggtgacgccaacctctgggtcgcagaatcaggctacgaaaataacaagggtgacgagatcattagcatgactccgtgggacgagtggtgggggatggcgctcaaggacgagtccaaccctcagatagcgcttctgccgctgcaccccgatgtacgggcaaggttcgacgaaagcgccgcgtgggaattcgcccggagcatgtgcgggaaaccctacggctaccacaacatgatatttagctggatcgatacggcgtcagacaattacccgcctcctcttgacgccaacctggtaatggccattatgtccatgtggaccagactgcagccgcgctatgcttccaacatgtggaacgaagcacttaacaagcgacttgggactgagaaactggacctccatgggatcattagggagaccgagagacggggcctgtccttcaaccagctgctcaccgtacctgagcgagacgactgggagtacagcgacggcaagtccacgacgtgcgtcgccttcatcctgtccatgtacaaggcggccggagtcttcgctccctacacggagtccatccaggtcaccgagttcaccatccgggacgcgtacatgctcaagatcttcgaggacaaccagacgcggctgcccagctggtgcaacgcggcggcggacggcctccccttctgccagatcctcggggagtacaagatgggcctgccggagtacaacaccatcgagccctacgccaacatgaacgagaactgcccctcggcgccgcccacctacagccgcccgtcgcgctgctagctcggcgttgcctggggtgtgtgtaaactgtaaactaagctagctaagtgtaaatagaccacgctgtgtgcatgctattcatgcagtggtttcatttgcaggtaagtcgtcgtcgacgtcgtacgtgcagagtatatgttgttgttgttgttgttcgctcgtatgcttaattcagccattaattcagctacggcctagctaccggcacaagttaatttgcttagcctttagccttcgctgctgtaaagtgactgctcgtggaaatgattactacaaaattagtgtaaagcggcc

SEQ ID NO: 118907 - DNA, 633 bp, Zea Mays
atggccttgcacggttgcacccaggtcgaagccgcacccaggtctccggtcgctgcgcccaagtcgatgccgcagccgcgagcgtctccgggcggcacacgcccaggcccaggtctgcggccgcagcgcgccaactcgaagccgtgccggcgccggtcctcgcgccggttgagggtatgcactgattcctgccggggtggttattacacttctgcactcaacctggagggtgcatcaattagagaactgaagctgaaatatcagaagctgaaatatcggaataaacctaacaattgtaatgcggacgatcatgtcaatgctgaaagatcacccggaagaaaagctgaggagaaaaaagtgctggcgagaaagcatgaagattgtgatgatgaccctttcattgaagaaattaaaaagacgagagaagcacatcaagaaatagagagagatcgaaaggcccgtgatgataagttctatgagctagagaagattaagcttgacttgaagcgagaccgactggatacaatgataatgcaaactgacacgagcgcaatggacagtgaagcaaaacaatactttaagctgatgaaagaagagattttggctcgtcgattcaagagtaggaaagcatag

SEQ ID NO: 118908 - DNA, 234 bp, Zea Mays
atggatggagaggagcaggggcacgattcggcgaggttgcggcacagggggcgcgacgaacgccggagctgggggaaaagcaagggcgtcgagcaggggcgagctccatggccggaggctgaggcgatctcgagcaagcagggaaggatctcggctggaggaggaagatggggaggatggctggggattgaagataggaaggggctgggcgtcgaccgccacaatagaggatga

SEQ ID NO: 118909 - DNA, 1592 bp, Zea Mays
cacatgggtccttttagggattttggttcgcaaactagccatatagcagatggaatttcatgggcgccgcaccggtccgcggatcccatgtccgtgaagcaaacatcgaccgaaagttaggcaggccatggctgatggcagcatggcgcggagatgctgtggataaggaggcatccattgtttgtcgtcctaattttcactttcttccggcgtcccagcaactgataccgtgatagtggcgtgggtgcccaccgcctgcgtcgatcggacgccgtcgtccatcccacggccgccatcgcccggaatcgcggcatctctctctcgcccggccgcccgctttaaaatgcccgtgcgcgaggaatgagcgtgcggcagagctcgagcactcgacaccagcgtctaacgggatggcgagcctgaccatgccgccggtgccggcgtggccgcggcaggacgccatcgacctccacaaagcattcagagggttcggttgcgacagcacgacggtgaccaacatcctggcgcaccgcgacgcgacgcagcgctcgctgatccagcaggagtaccgggccgtgttcaaccaggacctggcccggcgcatcgcgtccgagctgagcggccaccacaagcgggcgatgctgctgtggatcctggacccggccacccgcgacgccaccatcctgaagcaggcgctcacgggcgacatcaccaacctgcgggcggccacggagatcgtctgctcccggacgccgtcgcagctgcagatcatgcgccagacgtaccgcgccaggttcggctgctacgtcgagcacgacgtcaccgaacgcacgtccggcgaccaccagcgcctcctgctcgcgtacctggccatcccgcgcgccgagggccacgaggtcgacccgtcgacggtgacgctggacgcgcgcgacctctacaaggccggcgagcggcggctgggcaccgacgagcgcgccttcatccgaatcttcagccagcggagctgggcgcacatggcggccgttgcccgggcgtaccaccacatgtacgaccgccccctggagcgcgccgtcaagagcgagacgtcgggcaacttcggtttcggtctcctcaccgtgctccgctgcgccgacagccccgccaggtacttcgccaaggagctgcacagggccatgaaggggctgggcaccagcgactcggtgctcatccgggtggtggtcaccagggcggagatcgacatgcagtacatcaaggcggagtaccacagcatgtacaagcgctcgctcgccgacgccatccacgccgagacgtccggcaactaccgcaccttcctcctctccctcgtcggccgcgaccgcacctagtgatgacgatgatcgctgtttcgtctctcatctatgcctctagtagcaacaacgtacgaggcgacactgggcgccattgccactcgcgtgtgcttgctattcctgttatctccatggaaatcttcctccttgtaaatactcctacttgtgttcttgggatagttgttcgaataatggtgtactggttgcattgacaactcaaaaccttccaacagtatgtgtatgccgcat

SEQ ID NO: 118910 - DNA, 2035 bp, Zea Mays
cccatgcatatcccccattctgtgtatttatactcgtctgatcagtctttttctcataatatctcttgccttttaataccgtaacctaaccaagagtccaagattagctagttgacaacacaagaaaccaactgcattcgatctcggcttccttaatacctcatctccgtggacatctcaagagcaatagtgacgggccaagagaagggagaggaagcaatggctgtagctagctagctactgcgatagcaagtcacagaaaaatcatcaccacacacaaacacacacataagcacaagcaaaaaagcatcatccccagcaggtcccaataagaactccaaccatcactgccttcatcatccgatctcatatatccttacgccaacgacagctgctagctgcagcggagggagggcggcggcgcacgcgcggcacctatggaggcgcgggcagtgtcggcgctggacctttcgctgcacatcagcctgccgagcagcgccgccgggtcggcatcgcccgccccggagctgggcggcgggggagggattgggcgaggtgcgcagccgccggccggagcggacccatggcgtcgactgaacggatccacggcgtcgaccgagctgtcgctctcgccgccgctgtggcagcaggacgtggctgccggggatgtccttccgtgccgtcggctccggccggcagcgccgaatcactactcctccaccgcggatgcaacgacgttcgtgccagtgaccgtaccccggcttatttcgttcgacgccgcggcgggagcggaggacgaggcggcgcgggcgaggccaatcgaaggcgtgcccgtctacagcagctcgcgggctgcccgtcgtccatttctaggcgccggtgccggtgagtaccaccgccagggccaccacccaaaggcggccgggctatacaatcgtccctgtcactcctcgtcgcggccctcgtccctgcgctcgacgacgacgacgacgtctcccgccgtggctccccccgcggagtcctcgtacctctcgccgtccgcgtaccaccggatgctgtcgagcaccagcaggctccgcctccagggcgtgctcgccgacacgctccggggctacggcggacaccaccaccagcagcagcacttggacagcctcgccgcggcccgctatatgccgaggttcctggcctccaggcgcggcatgcgcgcaccgcggatgcggtggaccagcagcctgcacgcgcgtttcgtccacgccgtcgagctcctcggcggccacgagcgggcgacgcccaagtcggtgctcgagctgatggacgtcaaggatctgacgctagcgcatgtgaagagccacttgcagatgtacaggaccgtgaagagcactgacaagcctgcaacgacctcatcgggcgggccgcctgtggacggtggcggcgacgacgatgatctcccgagtgcccggcgggctcagtcgtcgtcgtcgtcgccagctggacgacgggacggcagcagcccgcaggcgttcaccagacaccggtcggctgcctcctcggagggcgcggcgagcctcgcgggcggcgacgacgtcgaatgctcctcctcggccgacgattccgactgcggcagggcgcgcagtgcttcgtcgtcaagagatcagttgctaccaccaagtgcaggcagtgcaggcacccttccttcagttggcgtatcatcatccactactgaggatatggagccagcttatcgatcagtaggcttgcaacaggcacccaaccatgaaatgagctgccctcctagcctggagttcaggctagggcgaccgatctggaacggagcagaacattagtagctaacactatctgcaacagcttattcaaactccactatgtaaacggtacagtctacaatgtagaacagtgcaaaacaatgttttaggtaaccatatgggtaaatgttggacacggtctaagcaacactagttacacacatgaatggcacattattagttcaacacttccactatacagtttactatat

SEQ ID NO: 118911 - DNA, 2091 bp, Zea Mays
gcccggcgtgcccgaacagcgcctcaccgcgccgcacgcctgcgtcggtcgccgaccccagtcaccggtccacgcccgcctccccctttctcctccgccctttcttgtgaccgccgccgcgggccctagcccgccgttccctctccggcgccccgctcccgcacccgcaccggatcagtccgggccgcgtggtcgcccccacctaccgcctcgggtccactcgctcgcggttgcgtgtcccgcggggtggcccctcgggcctcggcagctccggtttcgaatggggctctcgtcggccgccactggcgacggggtgcagctctgcgtgttcgacctccagagggggcaacaggagggccaggagctcgacaagatcctctacttctaccccgccgactgccccatcctgctccagctctctgtcatcggcctctgcgaggggatcgtcactttcactagaatattttccccagaagaggattgcgaggttatagaatcagagaaacactcccatgttttttaccaagccgaaacggatatttggatggttctggttgtggaaaaaaacaaggaaaatgaattgacttggcgttgtggtgcactacaagggattcttaaagaggctcattctctctttgcaatgtttcatggaccaatccgaactttgcttcacaaacaacccagtgcagagcttgctcgtggtcacctccgcacatttcttacagattatttgagcgattttaatgttggaaagaagttacaatttccaacctaccgtgacagcctaaaggagaggggaacagtccaaatgcttacggtatcacgagaagtggcacttgacgttcagtcactcgccacagtacttggatcatgtcttggaaatgttacctgccaatcacttgtactatttgaagacctcttggtgtcaacgacactgcccccggatgatactttaaacctatatacatatgctgttctgaggttaactccgcgtgctttatattccaatgcaagttcttggtcctatttgcggaaaggaacttctgttagtgctggccaaacatcaagttcatcaaatggaacaactgcaggagaaaggcctctcctacgtgagaaattgtcaaagggaaaggatggctttgttgctgctgatttcacagctacagaagctcgttgtgctgtaccctcgactccaatactttggttccagcaggcagatgagtgcatgcacctatgcatttatcagcacaaaagtctcactatcttactgctggttcctgcttcctcagtgataaatggagaagagggcattactcatgtgaagaaggcgatgcttgaaaatgcatcacagaagattgtcactgttgagcagaaattgacacgaggatggggaggagaaaatgcgtatcatgttagtggatatcgttatttgcttgttgatccggagagaagagtatcaagagcctccccacctgggaaagtcaccaccctagcaaaggattctctacttgccctcaacatgctaagacaagaagtagatctagagaagtcaagatacaagagaggcgacccttgtcatgataaggatttcgaagtatgtatcagaacaaaaaacaatgcgtgggttattgctaaaatcagtcaaggaagggagctttacatggctctagagaagggtggtgaaacgcttctatatgcatccacagctgtagagaaattcagcaacaggtactgtgagggagcattctctacagattagaagcaccagagggagatcttagcttttccatacattacctattatgtacatcctgtttttttcccagctgtatcgttgccccctattgttgagagactcggaccactctttgcgaagggaataaggagttcgtatcagttgtacagctgctctgctgtcgtgtgctatctgcaaaagaatagcctagtctgggaataacgcagagcgggatagagtttgtttgttcacttatgcccttccttaacgcagagcattgtgcgtgttttcattttgctgtaacagccggcgatttacctgcagactgggaaagtaacttagcgtttaatttggta

SEQ ID NO: 118912 - DNA, 2101 bp, Zea Mays
gcccggcgtgcccgaacagcgcctcaccgcgccgcacgcctgcgtcggtcgccgaccccagtcaccggtccacgcccgcctccccctttctcctccgccctttcttgtgaccgccgccgcgggccctagcccgccgttccctctccggcgccccgctcccgcacccgcaccggatcagtccgggccgcgtggtcgcccccacctaccgcctcgggtccactcgctcgcggttgcgtgtcccgcggggtggcccctcgggcctcggcagctccggtttcgaatggggctctcgtcggccgccactggcgacggggtgcagctctgcgtgttcgacctccagagggggcaacaggagggccaggagctcgacaagatcctctacttctaccccgccgactgccccatcctgctccagctctctgtcatcggcctctgcgaggggatcgtcactttcactagttatatgcagaatattttccccagaagaggattgcgaggttatagaatcagagaaacactcccatgttttttaccaagccgaaacggatatttggatggttctggttgtggaaaaaaacaaggaaaatgaattgacttggcgttgtggtgcactacaagggattcttaaagaggctcattctctctttgcaatgtttcatggaccaatccgaactttgcttcacaaacaacccagtgcagagcttgctcgtggtcacctccgcacatttcttacagattatttgagcgattttaatgttggaaagaagttacaatttccaacctaccgtgacagcctaaaggagaggggaacagtccaaatgcttacggtatcacgagaagtggcacttgacgttcagtcactcgccacagtacttggatcatgtcttggaaatgttacctgccaatcacttgtactatttgaagacctcttggtgtcaacgacactgcccccggatgatactttaaacctatatacatatgctgttctgaggttaactccgcgtgctttatattccaatgcaagttcttggtcctatttgcggaaaggaacttctgttagtgctggccaaacatcaagttcatcaaatggaacaactgcaggagaaaggcctctcctacgtgagaaattgtcaaagggaaaggatggctttgttgctgctgatttcacagctacagaagctcgttgtgctgtaccctcgactccaatactttggttccagcaggcagatgagtgcatgcacctatgcatttatcagcacaaaagtctcactatcttactgctggttcctgcttcctcagtgataaatggagaagagggcattactcatgtgaagaaggcgatgcttgaaaatgcatcacagaagattgtcactgttgagcagaaattgacacgaggatggggaggagaaaatgcgtatcatgttagtggatatcgttatttgcttgttgatccggagagaagagtatcaagagcctccccacctgggaaagtcaccaccctagcaaaggattctctacttgccctcaacatgctaagacaagaagtagatctagagaagtcaagatacaagagaggcgacccttgtcatgataaggatttcgaagtatgtatcagaacaaaaaacaatgcgtgggttattgctaaaatcagtcaaggaagggagctttacatggctctagagaagggtggtgaaacgcttctatatgcatccacagctgtagagaaattcagcaacaggtactgtgagggagcattctctacagattagaagcaccagagggagatcttagcttttccatacattacctattatgtacatcctgtttttttcccagctgtatcgttgccccctattgttgagagactcggaccactctttgcgaagggaataaggagttcgtatcagttgtacagctgctctgctgtcgtgtgctatctgcaaaagaatagcctagtctgggaataacgcagagcgggatagagtttgtttgttcacttatgcccttccttaacgcagagcattgtgcgtgttttcattttgctgtaacagccggcgatttacctgcagactgggaaagtaacttagcgtttaatttggta

SEQ ID NO: 118913 - DNA, 99 bp, Zea Mays
ttttttgtgatgcagttccagtgttacatcaacgaagatatcatgtgttggcaaatgtttaagggttgtgctcaaatggagcctcccatttttcataca

SEQ ID NO: 118914 - DNA, 130 bp, Zea Mays
tactaacacattggttaatattgtgtccgcaaaaagattttaaatttgatttactatctaaatataagaaactgttggagatcaaagctttttactttcaaatcttatttacaaactttctaaactaaaa

SEQ ID NO: 118915 - DNA, 822 bp, Zea Mays
ttttgaactgcagattacaaatgtgtttgtctgattgctatttaattacttccggatcagaatatagattacatgtggacagcaaaattctgcaactatcgtggaatataacattcactgagaactcatactgacatgttcattccgtcactttttgttatgtacactggcctctgtgggtatggttctaaggtgtttatcttgtacttgcagctttttgtgcccagatgcacaggattaacagctgatggtctggtgaaaatcattcattttctgcatgggcagcacaaaggcaatctaagtcgtgttcgactgcatggtatctgcaaggtgaataaccaccatctcgatattatcaagtctctcatgtgcagaggtagccaacaacaagatgctcaagcacttcactacaaccatagagtccatgaagtgctgaacacggacgacggtcgccctattgatgtagatttgtgccctttgtgcagaaatgtgagactcgtgtttgattgtacaaggaagaactgcagggaagtgaaggatggccggtctcgatgccgcggttgcttcttttgtgttgctagatgtgaaacttgtggtggctgcatcgacctggaggagctcggtgagtctggactagcctgctctgactttctgtgcatggattgctggctcaagcttccaaaatgctgcacatgcaaccgtccctactgcgagaggcattcaaatttgaaagagaatctatcagcgtctgggcagttcacatgtcaggagtgtgcagcgtttgctacctcactcagaagtcggggagaaggttactagaag

SEQ ID NO: 118916 - DNA, 114 bp, Zea Mays
accttccgccattacttcccatgcaagatccataaattacgcgcccacgtatcatagtaatcacgtttgcatgtggaaactattccctttaattccgcgtctttcccttatgag

SEQ ID NO: 118917 - DNA, 171 bp, Zea Mays
atgcccgcggtggcctgcttcacggcggcgtccagcgggtccttgggcttgggcgggcgcccgcgcccgcgccccgatggcggcgacaccggcgcgccggggtcccgcgccttcgggggccgcccgcgcccgcgcttcggcggcgcgtcgggcgcgtcggcgcggaagtag

SEQ ID NO: 118918 - DNA, 2875 bp, Zea Mays
atgaagaagcaagggcatcatgagccactagaacagtacgaggcatctgtgactgtgctgattggtggtcacacctgtacatcaagtgcaagaaggaaaaccactacacccactagtgctcgggtagcttctaaagctgttcatatcctacaaaagaaaccagccatgaagactgttgagctgagggacaagttacaggaggacttttgttgtgagattcactatgacactgtatggaaaggaagacagaaggcattacgagaactgcatggcagctgggaacagagttttcaattgttgttcaattggagagcagagggggcttgctatgttgcttggggagagcacaagtgagcaggctgacttcaaccttggcagcaacaaagatttggatgtgtcgccaacaaagcttacaacaacaaagaatgcaaagcctgcaaaaaaatgacaccaaggaagaagaagaagaacctgacagcaagtgaatgaacctgacagcaagtgtatgccaccaagcaaagtctgtttggacttgtttgaaatcaatgtatatgaattgtgtgactctttttatgagtccaatgtgtgtaaattttaatatctttctgtctgaacatctatgaaaccagtgagtctaaactatgaacacctatgtggtcatttgaattgtgaacatctctgaaattttatttgaactttatcgattggtgtgctgaaatttctgtgctgaaaattgcaccgtgctgaaaactgtactgtattggattttgttgcagattggtgtgcttctctgtactgtgcgctagaaagcacagaattttttttgcgccaacttccatcagaacagcactagtcagcttggtctggacgctttatctgaacctgggttggagcaatttattggtctgaacgctactcttatttgaaccaagggtggagtagtttttgaacctggtctggacgtttttttttgaacctgggttggaacagcctatgtgccagttttcgaacgctcctcttatttgtacagttaacggcgttaaatggccgaaggttataatgtgctgaagggataaaatggcattttgtctgttgaacaatgattgaaaatagcgtagcggcgaaacccatttttatgatggcatttggacgaaacccgtatttgataatggcgaatgggcaaataactcgtctaaggacgaggcagaaagtggggcccgtcagagtttcgccaggccggcacaaactggagtacgctggacgcatttgctgccgcatgccgccaaatgccacctgttcggttccccccctatccccaccccacaccccagctggccagctcaccgcgatgctacgacggcgcgctccgtccaccccgctcaccgaccaaccacccgcagccgcagcagagcagagagcagtgtagagggaactcacggacctcacgttgagtccacttgtcagcaagcaaacatcgatgcagtggactcggactctgtgtacgcgaagcaggtgcctcacgtcggatcgaacgtactccatgcggccggcgtgcggctgcgcgcttcatcacttcggagttcggacagcagtacagcaccagggcccctgcggccctgccccctggcccggcctgttggggaggtacggtacggtacggggctgggccgcaggtgttggcctttggccggaccccgcctctccctccgttgccgcaccggtccacagccacgcagctacggtctaggcgtggtcagcttcgccttcgccccacggacccactgcgcagccaccaggggcatcccattgctattagttacggtgcaatagaaagcgagatatatctggttagttaatgttatgtattaccactagctggaaagtcgtaacgaaaagagatgagtatgtgttaaccgttatgaactagcctaaccaaacaaaaaaacaaagggaatatataccactctaaactgatccctgacagaaacatctaaccaaaccgccactgaagcgatgatttctttttgtcagataaaaactgaagtatggatggattttgtgtccgttctgccacgacgaggttccgtttgaaacgtgtcggctattcgcccgacttctactgctcttacacaatgttttatctctataaattatagctgcagcaattctaactgtttgatttaatccgaaacgaacagtctagtggcttggtactctccgaacaactagagtaattttaaaataaacctttttttgctagtatcttctgaaatacaacttaacaaaaacaagacattaaaatctaggacatactccgtactattcggtaccactcaagcattggagcctcagtcctagcttcacctccgtacgtgtgcctagaaaggcagacactgaccccttaggactaatctgaaagcaaagaaaaccaaacctaaaagaaaaaaaaagactcccgtaataaataaatatcttattaaatcagatcctcatgaatttcttacttttaaaaaaagtagaggggtccaaaaagatttaagtttttaaactgatcctttaataaacgccagtatgtagagagagataacaggcacacgcacatcgtctttctcatctatctcgctcacgtatgtaccttcgccctcactcctttagctcggacgacaactgcatgcccagaccgacggggaaactcaaactgcatgcaatgacacttccaaaccgtctgtaatgagactacctatctatatatctaagtaaccaaagcaaggaaaacatttgaccgtacaatgcaaacaagtaagcttagcctgtttttcaagttgtgtacattataaaaaaaatactcccttcattctatatatgttttggattt

SEQ ID NO: 118919 - DNA, 276 bp, Zea Mays
atatgtggcaagaagatgtctttgcttcctcatattttccatttggctgttagagggagccgcggctgcgaaacattacttccatttcctgccgtgtctagcctgtttggcaagaaaaaccgtcttaatcgtatcgtttttttccagtttgcggttagaccattagaggattcctgcactatgtccttttgtttaaccaaattttttcggcaattgaggtagtgcatttcgcctctctttctaatgttcaggaagactgcttcttgatagaccaag

SEQ ID NO: 118920 - DNA, 714 bp, Zea Mays
gcgaggacaggaatccacaagcgttcatagggatccgcacgaaaaaagaaattcgtggcggagacagggataaggagctaaaaactgatgaggaatattcctatgccatccctacacccacccacccaaaaaaagtttgagaaaactaaagctggcaaaacatattctgcaaacacagatgcaataagacgcgatctagcagtacgccaaatagatttgggaatctcagctcaggggcgcaaaaccgcaagacctgattcctgaaaccgaacagcgtgtttccgacatcttttcagtgacaactagaactagccaccacgaaaccgtctggatggtccaggagcaaatgcttgcaacaagttcaggagattcccgtccagtctgcttcaagatggcatgtgcaaagctttatcccaagcttctgcaacagagttgcgggacgtgtcccgcagattgtgagccagtatctgcttgttcccctgagctacagattaaaacgatcataaagtgtatcagatcaatcttatagtaatgataggttagtttagagtcatgtcttttagtatatattattttcaaagaaaaaaaaacagttcaacaaaaatgtaggcaagtggagcacatgttgcagcaatttgacctcaaattaacttaacagcatatctaagtaatgggatccaaggtctaagttgtcagctacaacctcatgctctc

SEQ ID NO: 118921 - DNA, 294 bp, Zea Mays
atggcgcgctcaccgcgccgccagcaccccacaccgacatctacgcagcctcctccccatctatccacatccccatccgagcccctacaaccttgctccgcatcccgatcccgcccccgtcacgtcgcctgctccaaccgcgttctgcctccatcatgctgccacacgcccccctcctaccacgctcctcacaacagtggatctagcgtcctgatcgccagcaaggagagtctgtatgagcctgcgcacaaatctggtgtacgaaggttccgtgcaatcagccaatcgcattag

SEQ ID NO: 118922 - DNA, 201 bp, Zea Mays
tactggatcatctccaccaccaagctgcacaacctcacacagtaccaagccgtggagcgcgtgaaccccacgctggtgcccaccgacctcgacgtcggcaccatggtcacatttcccgtcttctgtcagtgcccggccgtcgacgacaacgccacgacgctcgtcacctacgtcatgcagcctggggacacgtacgcgtcc

SEQ ID NO: 118923 - DNA, 2616 bp, Zea Mays
tctcttcgcccacccccacattattctctccccaaatctgaccttccctcgtgcgaggcctcacctcttccgacgcgacgcgatacgcaccacacgcggagaccaagccgagcccatctagggttagcgtcccactgcggcggccatggacgaggcagcgacagcggccctggcggcggcgagggggcggtggacgcagtgggaggaggtggtggtgtccaacgaccgcggcagccgcctcgtgcactactacctccgcggcaacagcgaggagaagcagctggcggtggttgggcgggagcggagcccgcgtcacatgtcgtacgccgtgcaggggcggttcctccgcgcgctcgcggctgccgccggggcggtcgccgtcgcgccgtcgccatcacggtcgcctctgccggctgctggggcggacggcggcgctccgaggaggtggcggtccagacgggaggtcgtggactggctgtcctccctcgtttctggtcataattatggttcctcctcaatggcaactaggtgcagtagggattcatatgatgacagtgttaacaactgcacacaagttactgcttcgaaggatgtttcttctagggaaccttcaaatgtcttcacatggttaggagctccatgttattgcccacaacgtttgaagcactacaaatctttctgccgtagaggaattactatctcggtgcatagttttgtattcatcatgagtgaagagatgaagagacttattgcttatgtggaagatctctacgaggatacaaactcatgcaacatggtcaaggtacaatggttcgacaaagttgatgaggttggtgttcccttgcccatggatttcgatgacagggagatcttcttctctctgggtcgtcaagatctcaatgtagaatgcattgatggattggctgcagtcctgagtgtccagcactacgagaagttcaagggtgataccagatacaacttgtggcaaccttatttttgctgtcggcagattgataatggtgacatcaaaccttttgatgtcacacagctgcaaggctactggagccaggaagtacttaggaccatgttcaatgcaacttcctctctgaaggtgcgtttcaaggtccctaaatccagacccagttcagatggagggctgaagaggaagcgtgatgcattcaacgatgatgctaatccacagaagttcatttcttctggtgcttctacttctaggttttatggtgagaacatccaacaattgtgtcctggttgccatgtggaagtactctctcaagatagtggtataaggggatgttggtttagatgtttgattctgaagaggcataaagataaaatcaaggtgcgctacctagaacttcaggatgctgatgagactggaaacttggaggagtgggttatgctaacacgagttgccaaacctgatcaactgggtgtacgtttccttggaaggccaatggttcgtccacagcgcgtggaacaaagcaaggcctcatgctttgatgttggagccattgttgatgcgtggtggcatggtggctggtgggagggaatcgtgctgtaccaggtgggcagtgggcgtctacaagtttattttccaggagaaaagcgaacagctgaatttggtgaagatgagctgaggtgttcccttgagtgggttggtaacaaatggaatcctttgaagggaagaaaagatgtcacaagcaagctgacctccactgcagattgtggaagtgaatatttgattgcgaaacaagatccactgaattttcatgtgcctaaaaattcagaacctcaactagagggacatcaatatgacaagaggggtattgagaaatcttcagtcagcacaatttcacgagatcagaaacgtgtccttgccgacctgactaatgatttgaagttagataacttgaggtggaggccaagaaagaggagcagaagatctggctcaagaaagcagtcggacacaagcagtggaagcagcagcggggacatggacctgttcagccccagccccagtggaagctttggtcaacataatttagtgcctgacgaggagacatgcaagagcagtggagagcagacttttatgggtgtgcctgtgcaggttcccaatcttgtgatgtccaggtgaaagccatcttagcaccggttgaagattaacatgttagcttctggagttacaccgaccttggcgagatgtggttttgtgcatccccaggttatttttgccagcacaacccagatccagttttctgcagtttttttggaggctcatcagctgtgatcagttagatgtgaaaatgtctcaccaagaaccagtatacagtttgtatgtagggagagaagaaaatgctcggtttggttttggttttagagctttcagttttttttcttttcttttcaatcctagtctttgttgtttgaaggacaggtcctagatttgacatagcctctttacatcggttattctttcccatagttgtcagtacttggtagtccttgttttttatttgtccatgcagtcttgtagcagtcgcgcgccttacgtaaaattatcctgaactgaactcagtgaaatgtcacaaaatagtg

SEQ ID NO: 118924 - DNA, 2798 bp, Zea Mays
tctcttcgcccacccccacattattctctccccaaatctgaccttccctcgtgcgaggcctcacctcttccgacgcgacgcgatacgcaccacacgcggagaccaagccgagcccatctagggttagcgtcccactgcggcggccatggacgaggcagcgacagcggccctggcggcggcgagggggcggtggacgcagtgggaggaggtggtggtgtccaacgaccgcggcagccgcctcgtgcactactacctccgcggcaacagcgaggagaagcagctggcggtggttgggcgggagcggagcccgcgtcacatgtcgtacgccgtgcaggggcggttcctccgcgcgctcgcggctgccgccggggcggtcgccgtcgcgccgtcgccatcacggtcgcctctgccggctgctggggcggacggcggcgctccgaggaggtggcggtccagacgggaggtcgtggactggctgtcctccctcgtttctggaatatggagaatacaggtgtgccccagtggaagcagctgctggcttcctttgggccaattgcataaccttggcatttgggaatagagataagcgaagcagcagcatgaatgtatgctccatcaggtcataattatggttcctcctcaatggcaactaggtgcagtagggattcatatgatgacagtgttaacaactgcacacaagttactgcttcgaaggatgtttcttctagggaaccttcaaatgtcttcacatggttaggagctccatgttattgcccacaacgtttgaagcactacaaatctttctgccgtagaggaattactatctcggtgcatagttttgtattcatcatgagtgaagagatgaagagacttattgcttatgtggaagatctctacgaggatacaaactcatgcaacatggtcaaggtacaatggttcgacaaagttgatgaggttggtgttcccttgcccatggatttcgatgacagggagatcttcttctctctgggtcgtcaagatctcaatgtagaatgcattgatggattggctgcagtcctgagtgtccagcactacgagaagttcaagggtgataccagatacaacttgtggcaaccttatttttgctgtcggcagattgataatggtgacatcaaaccttttgatgtcacacagctgcaaggctactggagccaggaagtacttaggaccatgttcaatgcaacttcctctctgaaggtgcgtttcaaggtccctaaatccagacccagttcagatggagggctgaagaggaagcgtgatgcattcaacgatgatgctaatccacagaagttcatttcttctggtgcttctacttctaggttttatggtgagaacatccaacaattgtgtcctggttgccatgtggaagtactctctcaagatagtggtataaggggatgttggtttagatgtttgattctgaagaggcataaagataaaatcaaggtgcgctacctagaacttcaggatgctgatgagactggaaacttggaggagtgggttatgctaacacgagttgccaaacctgatcaactgggtgtacgtttccttggaaggccaatggttcgtccacagcgcgtggaacaaagcaaggcctcatgctttgatgttggagccattgttgatgcgtggtggcatggtggctggtgggagggaatcgtgctgtaccaggtgggcagtgggcgtctacaagtttattttccaggagaaaagcgaacagctgaatttggtgaagatgagctgaggtgttcccttgagtgggttggtaacaaatggaatcctttgaagggaagaaaagatgtcacaagcaagctgacctccactgcagattgtggaagtgaatatttgattgcgaaacaagatccactgaattttcatgtgcctaaaaattcagaacctcaactagagggacatcaatatgacaagaggggtattgagaaatcttcagtcagcacaatttcacgagatcagaaacgtgtccttgccgacctgactaatgatttgaagttagataacttgaggtggaggccaagaaagaggagcagaagatctggctcaagaaagcagtcggacacaagcagtggaagcagcagcggggacatggacctgttcagccccagccccagtggaagctttggtcaacataatttagtgcctgacgaggagacatgcaagagcagtggagagcagacttttatgggtgtgcctgtgcaggttcccaatcttgtgatgtccaggtgaaagccatcttagcaccggttgaagattaacatgttagcttctggagttacaccgaccttggcgagatgtggttttgtgcatccccaggttatttttgccagcacaacccagatccagttttctgcagtttttttggaggctcatcagctgtgatcagttagatgtgaaaatgtctcaccaagaaccagtatacagtttgtatgtagggagagaagaaaatgctcggtttggttttggttttagagctttcagttttttttcttttcttttcaatcctagtctttgttgtttgaaggacaggtcctagatttgacatagcctctttacatcggttattctttcccatagttgtcagtacttggtagtccttgttttttatttgtccatgcagtcttgtagcagtcgcgcgccttacgtaaaattatcctgaactgaactcagtgaaatgtcacaaaatagtgcttattgcctatttctgtgttcttttaaatgtcagttagggtactagttgggttaca

SEQ ID NO: 118925 - DNA, 872 bp, Zea Mays
ctgcttatttcgttaggcccatggcttctattattactgagcaatgagatgagcaggcccacgaggccacgacttatcccgtaggccacaacactcgcatccagctcctctgcttctggcgaccaaattctgccgtctccaccgccgccgcagccagcgtcaccggagggatctgccgtctcccttgctccacgcgatgaacaccgacatcaccgcctcgactaagccggagtacccggtggtggatcggaacccggccttcaccaaggtggtcggcaacttctctgcgctcgactacatgcgcctctccaccatctccgccgtctccgtcaccgttggctacctctccgggatcaagccggggatccggggcccgtcgatggtcacgggcggcctcatcggggtcatgggagggttcatgtacgcctaccagaactccgccgggcgcctaatgggattctttcccaacgacgccgaggttgcgcgctacaagcacaagcttcattgaggatccagctccattccgtctctcttttcgcaaccgtttcgcctgttcctttcctgattccgtgttaacttcagtactttatctgggcactctatggccttggttaaataaaagtggtatgttgttgcacggttatgaggattcgatgatacaattcacctcatctttatgttgtttggtgagaatttcgtcgccgtttgggtgaatttatgaatactgaagtgatttctgctctgaacttgttatttgttgtgtggtcgtgtttgtgtatcttagcttgtcaggattggggatagtgatcttattacctctcatggtaagcaatgggggttcatttggctcattggctgcctgtaggggaata

SEQ ID NO: 118926 - DNA, 982 bp, Zea Mays
gtctcccccgagtgtcgtgtcgcacacctgcgcctcctcctcgtcggactcggctcccccctagagccgtgtcgcacgcctcaggtacttctgttctccgaggttcctttggtttggttctgctcaaggtttacgagggttgcctatctctttctctgtgctccgtgatgtctagaaggtcatgtctagtaggtccacgaacgatccaagcaaactggtcatggggtagctgaaagcactctgcgtggtttggatatagctaccatgggttcagtaggggtgggtttggatatggattgtattggcagtcaggcagaggcgactagctcatggatctgctcatcggctgatcagataggcagcgtgaaggtttgtcgcggctggtatggtagatagatagtgatgaccgggtaattgttttcaagactgcaagccattggcttgagcttgagggtgtccggttaaacaaatgagggtgttcgatagccccttgagatccgtgctttgcaagaatgtttagtttgatctatctagttcctctcagataaaccatacatgcgtatttgtagccatgagcatcaggcaccacttgtttatccgcgagagcatgagcatgtcatgtagtagtagtcgttgcagttttttcagtgcgttctattgtgtcgtgtgcctgtgtggagccatttcagaagaaagcaaggggatccaaatgcaagtttgagttagttaattcctgatatttccaaagtgataatcatgtttcatactacctttgtttttgtgtccttattagtgagtagttactgatttttttattccttggacctgtgtaagtttcagttcagtcgtgtgcacttgtttcagatgtgtggtaaaaaggattcatcttttagaatatgtgtgcacttgttctaaaaaaaatagtgagatgtaaactattgagtccttgaaccgagaagccaatcagaaaattatatttctc

SEQ ID NO: 118927 - DNA, 1005 bp, Zea Mays
agaaactaaaatggattaatttggacctagtatgaattttctaggaattaaataagtttctgcaattatttatatattcacaaatcaatttataaatagttttctctgatttacctagtccttgggctgcgcctcaaatacccgagaagacaggggctaatctataaacattcctgagactcatacgccaacaaccagtactgcgggttgatacctagatacttcgggggctcttttacaacatgtgcaatccgaaggggtatcctcaaatctggcccgtccgatccgagatggacggatccgattagacttctactcaaaacaaactagtatctcacaggcgccctcagatctaaatccaacggcccatgtttgatctcacgaaggggtaagcctaattctaatatccaccgctcactcacaatctgacggcgcgcctatgttcttccaccacgcgatgaccagagaaggcggagtagaggcccgcggcggcgcattgtcgacatggagcgcacccagcgctctgatggactactgctaccccagctacgcaacaagggatgcggagaacatggcagataggtttgtaagtcccttactcgaatctgcacgccggtgatgaactccaagcgacccagccatgcactaggcggatcaggcgttgactgcaggcgccagtggaggaaccgcgcccgcgcgcacgtggtggaggggaacgaggcgggagaacgctacagcggcaggggtgtggctggcgctgttcgccgtcgcgcgacgcaaagctagcagcggtgttcctgcccttcgccgcctgaccctgcaagcagcggcctatatgcacgaactccgccccgtggccctgcccgcgtgaaccaccactctgctgtccgcaccggccactgcgcaccttctcccttcctctctctctccacctcggttgcgctggctcggtaaaagggaaattgtggctggtcgatcaagccacccagggaagaacgggcttat

SEQ ID NO: 118928 - DNA, 7816 bp, Zea Mays
cgagctcacacaagagacgagtaactccgtctctctaagacgggcatcacaagatcaaaggaaattcgactacgactacaaacaggaggaagaccgcgatgcgcatttgttgccaagcctcgagacaccccctcgagacagctccgatttttcatcaacgagacatccaaatcatgatcctcctcgccctcgacagtagccaaaccttcgaaggtggttctaagcgagtcagatttaagtgaaacaaacggtaacccacaagcaccaaccaatgtaaacttttcatatttctttcacaatagtacaaaatgatgtgactttacaaaaccaccaagaaaattattttttatagatgcaaaatatttataacttagaatgatatatctagtgccttgtttgcttgggccttttctcactattagcttttagacttttcaaaatccaaacgtctcttagtatagtgagcctctgattttttttgtttgtcggagttctttggattttaaaaggtccaaagtctctgggaagcccaaacaaacatggactaaatgtattttagaccaactattctcgactatgctaagaacagttacttaagatgtacaacacaaatagtacaggtgtaccaattcctatgctacatataacattttgaggccccttcggaatgcaggaatttcataggaattatataagaattttacaggatttcacagaaaaaacacagaaaacggggaaaattttgtatgtagatggtaacattatttttttatggctacatatgtaggaaaagaatacaaaagtgaacataacttacataaaaatggtacataaacatgtttaaagaaagaatgaaagtttagatcaagttatcttgcgagtaaacatattttgataagtaaacgaagatgagaatacagtaacaaactcataacttatttgtcttagaaaatctccagcatggcaaaaaaaaaaaagacacaagctagcaggactgtactcaggttcccaaaagttacatatatgggcggtttaacaaactcaaagtaactttaccagcttcctttgaagcgaaaggttttgttcttttcgttgtagttgtagtccctactctaaagtagagatcatatggttgtccagtcactctcatttatgttaattaattgaaagcttttccaatcttactagctctggcaaagggaggcagaaagcttgaggcagcaactgcataacttaaaagagcaccatcggcagttgttgggtcagcagctttctggcctgaacgtgggagatttgcagaatttagagaataagctggagacgagcctaagaaatattcgtctgaaaaaggaccaactttttttttatcagattcaagaattaaacaggaagggaagcctcatgcaccaggaaagcatagaactatacaacaaagttaaccttcttcatcaacataacactgaattacggagaaaggtgtatcgacaaggagtaaataatgagcaaacaagtactactgttagacacagtactcggaatacagagaatcttccgatcaatcctgagctaagtgtgcaaagggacaaatcagaaacaccaagtgtagggtgagatttttgtccaaacttcaggataactcagagtcagtaaaccagatgatttaataaagaacactgaaagtgccatatgactttaaatacagtgaggataattaaaccgagtgataagaaatggatatcgttggttgaatcgcaagacctaacagctaaactttaagctgctagatgcgattgtttatgtatgaagaagaatgttgattttaattttgcttttcatataagcttgccatgtatgctattgtaaattgtactctgaattataagtcctcttggttttctaggtacatagttttttctatacacctagatatactatgtctcttgagctaaaaccacttataatttagaatggagtaacttcaaaagatagttataagttaaatattggatgaccttttaccattagaacataacggaaaacaatgcactcatcagataattacaagacatcagaaggagctattgagacataaataacgataaaacaacgagctacatgattttttttcttgcaagaaatgctcttacaaaagtctataagacaagcagtacgtgaatttgtcaatggcaacaagtacatgagtatagcctccctgagctttcttaaaaggtctgatcatgtccagcccccagcattgcaaatgaccatgttacaggaatggtctgtagctgctgtgcgggtaaatgttgttgctttgataaaaattggcaagcttcacatctctggactaactcggcagcatcactcttcgttgttggccaatagaaaccagatctgaaagcctttccgaccagagttctggacgctgcatgtactccgcactgtccggcatggatttcgtctaacagttgcttcccaatagccgagtgaatgcacttcatgagaactcctgccgcacctcttctgtacagtatgccccctatgagggtgtagtgtgctgactgccttgcgatgcgttccgttgccgccttgtcattcggttcttcttcattttttatgtacctgatgatagactctctccagtcattggggtccatataccatcaacttcttgcccatggaatcagtcgagcaatcctagtctttgtttatctggcttatgaccactagcgaatctccatataccatcagcttcttgatgctgagtgatacggcgatgtttaatccgtggatcagtgcttcatattctgctgtattatttgatgccggaaacaatagctggagtgcatacttgagttgttcacttccaggagcaataaagagaatctctgcatctgctccttacaacttctcgatacttcggtagtctccgggttgtttgggacctggtgttcagttcactcagatacgaagtcaaccagtgcatgagtcttgattgccgtgcggggccggaattctatgtcgtgagctcccagctcgcacgcccacttggctatccttccgatagcttctttgttgtgaagaatgtcccctattggaaatcttgtgactactatgactttgtggtcatcaaagtagtgacggagcttgcgagcggttagaagtaccgcgtatagtagtttctggacttggggatacttcatttttgagggcccgagaacttcgctgatgtagaccggatgttgcaccgggtatgtatgtccttcctccacccgctcgactactaacgcggtgctcaccacgtgagttgtgcaggagatatataacaacagatcttctgctagctgattcggcgtggctcggcgtggtggcttgagtactggtggtgtagtcagaaactttttcagtgcctctagagcttcctgtgcctctgtggtccactgaaacttgtccacctttttgagcaatttgtagaatggcatgcctttctcccctagccttgatatgaacctgctcagggctgtcatgcatccagtaagcctctgtacctttttctgtgatcgtggcgcttccattctcatgatggcctcgattttttctagttagcttcaatttctcggtggctgacaatgaatccgagtaacttccctgccggtactccgataacacacttttctagattgagcttccaacagtatcgcctcaagctgttgaagaccagccgcaaatcttcaatgaagttttctgagttttctgttttgatcaccacatcatcaacataggcttccactcgcttgcccagtgatcggctaagcatgtttgaatggctctctggtaggtcactcctgcgttcttaagaccgaacgacatggaggtatagcagaaagctccaaatggggtgatgaatgccgttttttcctcatcttcttttgccaagctgatctgataatatccagaataaaagtctaggaaggacaacatagaacagcaagcggtcgaatcaaccacctgatctattctagggagcccgaagggatccttcggacaatgcttgttgagatcagtatagtcgacgcagaagcgtcaatccactttattctttttagtacaagaacaaaatttgctagccactcaggatgcagcacttctctaatgaaccctgcagccactaagcgagctaactcggcgcgaatagcttctctcttgtcagacgtgaaacgacgtagcttctgtcgaatcggccttgcttcagtataaaccttcaatttgtgctcggccagttctctcgggactcccgacatatctgcgggttgccatgcgaatacgtctcggttgtcttgcaggaaccggacgagcgcgctttcctatttgtcgtcaaggctagaactgatgatggcagtcttgcgctcatcggagaatcctaggttgatttttttagtctcctcaagcggccatatggaggtcacggcttgagcttcatttgcgggcattgcgaggtcttcctcaggctttgtgtctgcctgcgtggagcaagtcgtcgatggtcctgcagtgagggttgcctggatggctccccgaaagcattctgcggcgccttgtaagtcagcgcgcatggtgatgattccttgtggtcccggcatctttaatatcatgtacgagtagtgcggaatggccatgaatttcgccagtcccggcctgccgatgatggcgttgtatccgcagtcgaaacgtgccaccttgaaccttaggaactcagttctgtagttatctggagtcccaaaggtgacgtgcatgtaaatgtgtccgagtggatactctccctcggtcgacacgatgccgaagaagggggtatctgacttggtgaggtctttgagtgcaacccccaaggccaggagtgttcgagggaaggtaacgttaatgctacttcccccgtccactagtactttatttaccctgctctctcggatcaccggatcaacgagcagcaggtacttaccggggtggtcaaagttgagccactaatctacccggctgaaggttatcgcgtgctctgaccaccgataaggagctagggcactagtggttgccgccaagacctgccggtcattgagcttctgttgccttttgttctcttgcgatccgtggcctccgaaaatgacgttggcctccctgtcaacgcgtgggaatgctccaccccctcccccttctggttgctgaggctgcttgggctcaccaggctctcctcgtggtgggggaggtggtagaggttggaacggtcggccattcccgacggagtgcttgaagtccctacagttccgtaaggtgtggcgcatatccttgtggtacgggcactaggcgtcgaggatgtcgtccagtgtccgctcgcctccacggggtggtacgggcacgagcgacgggtggtccggcggcgtgaacctactcacgaggcctcttctcccaacgcctgtcgggttgctggttcgcgtcgcgccgcggtgccggtggtgcaggtttcgttcttccgataaggtcctaggcccgctcgtcagcggtgatgtagaggtccgcatctcaaaacagttgttcggaggtggtcggcgctttctgcagtatggctcggacgaaaggccgagtcattagatccccggtagatgtcctcaatcactgatgcctcagtgacctcagggatacgatttctcatggtccgaaaacctcttgaggtacgaccgaagtgtttcatcgctccggcacctgatggatttgaggtcccatggctacgccgacttgtcggagggactgaaagttgacgatgaaacaccgactgaagtcactccaatcgtcgatgcagtgtcgtggcagatgtcgtagccaatgcaatgcatcttgcccgaggacgatgggcaaatatgcggtcatcacatctttggttgccccagcggcccaggtagcggtcatatagacggccaaccagcctctcgggtcctgcttaggctcgtacttgtcgacgttggagaccttgaagtttgggggccactggatggccctaagacgcggagtaagcgcggatactccacatgtgtcttcctatcaactttcatggtgtcgatcccggtgaggggagtcggtgatgtgtcgtctcgaccgtccccggatcgggccactggttaaggctgcagccgactcaactcgggtgggcgtggcgtgacttcgagccgggacgtcatggtcccgatcatactcctcccggctccttatctcgttttcgtgtcgtcggtcgcgcgaagcgttgatggagctccgcgcgtctcggcgacttttgatggcgtgtcgcaggtcgctcgggggatgagcgatgggtagaagatgattagctgcccgagtaagcagccgtcgatagccttcagcatccggagtccgcgggaggccatcaactatctgagccagcactcctccgacttcgctcagcgtgttcattgcgcgagcgaagtcaaggttccttgtaatccgcatccactcctttgtggacgaagtgggcagcggagttcttcgggcaagtaattcccgattctcggcttgcaaaaagtagtcttcgtctggggcgtaggaggttgcgttgtccgctgtcttgttctggctttcctagggatttccaaggaaagtttcttctccggtggatctgctatgcggtgcagaattcccttctcatctgccacggataagatagtcccgaagcagaatacagattcagggcgaagagcaatcttgcactgggagataacggccattgagctagcttggatcaacgacacaccccctacctgccgcgccagctggcggtgtttggagcccgaccgcacacccgaggttacccctcgcggtgcttttgggtaggacggtgttgttgactgtaattcaatggttcgtgcgagatgcacgagagacgacaggcgactttctacaggtttgggccgcttcgagaggcgtaatattctacttcctggtgaggatctttatgtggtgggttacaagaggaatctccggaacgaaaagaaactagtgagatgggatggtgcttaagtcccacgagtcgcttgggcctgagtctgctcctttctcatgccggcccattccgccagcagttttctcctggcccatgaagagatggtctagcgagataacaggcctaaagcctctcgcgaggccttcttaccttctagtggacccgggggatatgaaagggaattaggcttacacctatttcctaattgattttggtggttgaattgcccaacacaaataattggactaactagtttgctctagtctataagttatacaggtgccaaaggttcacacttagccaataaaaagaccaagaattgggttcaacaaagagagcaagggataaccgaaggcagccctggtctggcgcaccggactgtccggtgtgccaccggacagtgtccggtgcaccaggggacttcacgctgaactcctcaccttcgggaaaatctagaggcgctccgctataattcaccggactgtccggtgtacaccggacagtgtccggtgccccagggaaaagcgactctggaactcgccagcttcgggaattcgctccgctataattcaccggacatgtccggtgtacaccggactgtccggtgagccagcagagcaacggctattcagcgccaacggtcacctgcagaagcattaaatgcgcgccagagcgcgcagaagtcaggcacgcgcgaagtggcgcaccggacactctacagtgcatgtccagtgtgccaccggacatctagccggg

SEQ ID NO: 118929 - DNA, 714 bp, Zea Mays
ctctggcaaagggaggcagaaagcttgaggcagcaactgcataacttaaaagagcaccatcggcagttgttgggtcagcagctttctggcctgaacgtgggagatttgcagaatttagagaataagctggagacgagcctaagaaatattcgtctgaaaaaggaccaactttttttttatcagattcaagaattaaacaggaagggaagcctcatgcaccaggaaagcatagaactatacaacaaagttaaccttcttcatcaacataacactgaattacggagaaaggtgtatcgacaaggagtaaataatgagcaaacaagtactactgttagacacagtactcggaatacagagaatcttccgatcaatcctgagctaagtgtgcaaagggacaaatcagaaacaccaagtgtagggtgagatttttgtccaaacttcaggataactcagagtcagtaaaccagatgatttaataaagaacactgaaagtgccatatgactttaaatacagtgaggataattaaaccgagtgataagaaatggatatcgttggttgaatcgcaagacctaacagctaaactttaagctgctagatgcgattgtttatgtatgaagaagaatgttgattttaattttgcttttcatataagcttgccatgtatgctattgtaaattgtactctgaattataagtcctcttggttttctaggt

SEQ ID NO: 118930 - DNA, 385 bp, Zea Mays
gcaacgcgtgaagccgtgaacacgggcacaccagtacgacagtaccacgccacatgaactcgtgaagaatagagccgccactgaggaaccctagcgacggcggcgcgctaccggtgacatcgtccaactcggcccctccatccccgacgcggcggcgccagcgtgcaagtgttaggatacttggattggagtcgagtgctaggctgctagtgctagtgttcaaagcctgaagccatgtccatgggcgtgtggttgttgcctgtttgtccaccggcagttcaaagcctgaagccatgtcctggcggccgcgaagaacctgcgcagtgcgcacggaggccgcctcgggagcgcagagcgattaatcgggctgatcgtcgactaatcg

SEQ ID NO: 118931 - DNA, 99 bp, Zea Mays
gtgattcgtggcggcagcaacgacgagggggaagaggatggcactggccactggggctctagcagttgctgttactcatcattgtcgacgccgacgaca

SEQ ID NO: 118932 - DNA, 104 bp, Zea Mays
cgattctcaaaacagaggttagtagaagaaaccctaatcgcataatcccaaaaccccaacatcatcacatctatctttggaaaacctatattcatgcatggatg

SEQ ID NO: 118933 - DNA, 364 bp, Zea Mays
cttcgaaggtttggctactgacgagggcgaggaggatcatgatttggatgtctcgttggtgaaaaatcggagctgtctcgaggcttggcaacaaatgcgcatcgcggtcttcctcctatttgtagtcgtcgtcgagtttcctttgatcttgtgatgcccgtcttagagagttggagttgctcgtctgttgtgttgagctcggcaacgatgactcagcatgagtattgtgtgtggggttgctgttatctgagttggcaccctgtgtaggttttagaactggttttccttaaaactggatcaatttctttattcttaattaagagattgtcattacgtttttttaaaaaagaaccaccttcccgtc

SEQ ID NO: 118934 - DNA, 1070 bp, Zea Mays
taccctaacagcgggcctcatcaccatcggcgtctacctaccagcaagagcagtcagtcacttaccgaaccctactgcagctgcttttgtttccttatgccctcgaccgccgcgatgtcgtcgtcttgggacgggtacggcgggcagatcttccccgcagacatgtcgtcgttccaccgccaccaggacaccctggaggcggtgttccaccacccgccgcctgagacgacgacgacgacggggctgctgaggaacgacgggtcatcaccggtggtggacgacggcggcggccacgccgcaccgcgaaggcggccgttccggacggaccgccacagcaagatccgcacggcgcagggcgtgcgcgaccgccggatgcggctgtcggtcggggtcgcgcgcgagttcttcgcgctgcaggaccgcctcggcttcgacaaggccagcaagacggtgaactggctcctcacccagtccaagccggccatcgaccgcctcgtcgacgccgccgccgccgccgacgaccccgcggccgtagcagcctcaggaggccgacgaccgacggtggtgaggggcagaggcgagggcagctcctcgagcacttgctgctgcttgacggactcgagagaggccgccgaggaggcgacggggaacgggagaagcagaggcggccctgacgacgggccaccggcagcgcttctggaaggacacggcggctgcggcgagctgggctggatcatgtcgggagcgcccacagcagcggtggcaacgacgacgacgacgacgccgcagcagccggacgggcacgagtactactaccagtattgcctgcagctcgaggagatgatgcgatgcagcaacgacgaaggagaaacaacgccaggtgatttcttgtatggtatgcagacgcgtgataggtcttgagctctctaaacgcgcgtgagaggattttccattacgtcctgagattatgctgatctgctgccatgatgatccattactactgcatatctatctagtacatataaatctcaactggttctttatctcatcaatcaagatccaaaggccca

SEQ ID NO: 118935 - DNA, 783 bp, Zea Mays
aaaaaaaaaactacttcagcagatcccctttctccgttccatttctcctatatttatcccaagttcccaacgactcaaacctccatccactcaatccctcaaatagaggggatcctcccaccattttttctcaatcctctttgttcctcttctagtcgccgtgagagcaccgaccgctctgctgccgcacgccgctactgcatcaccggagctcatgagtcgctagctgcagcgccgctctgcaaacgctgccacctcaagcaggagatggaaggcatcgtgagagcaggcgggcggacaggacctaccgaaatcccatgagcagggagatgcggacgacggacgggaacaagaaggacgacgaagatgaaggacaaaccctccagaaaggaaaaacaaaattctgccacgtataaagggaatacaaaaaatcctctatctgctgtagcacatctcacctacaacttaggtttatatatgttttcgtgatctcctgttgtctgatatagaggattattcttttttcttaatctgatggattggagatcctctcttcacatctcatatatctgcatgcctcaaagctcgacaccaaacccatcaggaaggggtcaggcaggagaaatacctttgtgtcaattctatcccaaaaaaggcatgcacctcaacactaatttagaactcgttattagcaagtacaaattacagttgcatgcctgttatttggatgacattattatattcttcagaacattgcatgaaattctgccaaagttacaacag

SEQ ID NO: 118936 - DNA, 104 bp, Zea Mays
gttagtcccctcggtcaagcccgatatccacggcattttcttctccatggtagtttcctggaaggaggaggtcgtgcgttctgtagagaagaaagaggaaaaaa

SEQ ID NO: 118937 - DNA, 403 bp, Zea Mays
taagttgaggcgattccatcagaaatgggattgcttgcagtgctcttgattatttcaaccatgtaattatatatgctatgggtgaaggtttatagagccagccagtgtcacactagcggtggtagcgcgggtgtccaaagaaactggctaagctgtctagttaggtagcaagctcggttacaccctgtgtgttaccctgagctgtttgttagctgtctgttcaatctgaattgaacagtccggtaatcaagctagtggccattttcttgtcgcctgctcgatctgaactgaacagtgggcgatcaacccaagctatgaactgatctcgcgatcgtgcatctctgcagggccaccaagctggcaggttctagctagggtttcgtcatagatggatggatggatc

SEQ ID NO: 118938 - DNA, 1068 bp, Zea Mays
atggggcgatcaccatgctgtgagaagattggactgaagaaaggtccatggacgccggaggaggatgagaagctgcttgccttcgttgaggaacatggacacgggagctggcgggcattacctgcgaaggcaggcttgcagaggtgtgggaagagctgcaggttgaggtggacaaactacctgaggccggacatcaagaggggcaagttcagcttgcaagaagaacagaccatcatccagcttcacgctcttttaggcaacaggtggtcggccattgcaacacatctaccaaatcgcacggacaacgagatcaagaaccactggaacacgcacctcaagaaaaggctggccaagattgggatcgatcctgtcacccacaaatctacctgtggcactctcactggcaccacgaacgacagatcagccaaggccgcggcaagcctcagccacatggcacaatgggagaatgcccgcctcgaggctgaggcacggctggctcgagaatcgaagacacgaacagcaacaccgacgccatctgcactccatgcgcagccaatggatctacctgcctctgctgcttctccatggcttgacgtgttgcatgcttggcagggtgcaaagatagacctggagtcacctacctccacactgacgtttacagggagcaatggtggcatgctgccaacccccaggaccaacggaccagaggtatcagaaagcaactccgcgatgtcgcattatcagatgagcgatgagttggagggtgaagaaacctattggcagatcttcagcaagcaccaagtgccggaagtggacagcaaggagagtgaagatgacttcattggctgtgaggagccgtggttctcagggatggctggggttggagctggcatgctgcttgatgtatccaatgagcatgagctatcagaatgctggggtgagtccagcagtggccaaactgttgagcacagcaagcaagcatccgataaggaggacaaggattattggaattgggtccttgacagagtaaactcagagctgacagcacagtcgccttccttggtctaa

SEQ ID NO: 118939 - DNA, 2032 bp, Zea Mays
ggattggaaccacggtcacgaagcgcagcccaagccagccccatcccccaccccccatttccccaataggccaaccccgtctccctcctcagcaacgtgctcggtttcttcctccctcgaatcggctgcaccccgtgccgcgatacgaaaacccaccaaaccctaaccctagctgcagtgccactaccgcccgcttgcccggtctccggagaggaagccgacccaagcaacgatgccgtccgggtcagcgacgcaatttcggtacacgcagacgccgtccaaggtgctgcacctgcggaacatgccgtgggaatgcaccgaggaggagctcgtcgagctctgcaaacccttcggcagggtcgtaaacaccatgtgcaacgtcggcgccaaccgtaaccaggcattcgtcgagtttgcagatcaaaaccaggcaatttcaatggtgtcctattatgcttcatcttcagaacctgctcaagttcgcggtaaaactgtctatatccaatattcaaacaggcaagaaattaccaacaataaaggcactggggattcttctggcaatgtcctacttgtaacttttgaaggcgttcagcctaatgatgttaccatagaagtcattcatttggtattttcggcatttggatttgttcacaagatagctacttttgagaaagcagctggtttccaggcacttatccagtatactgatgccccaactgctcttgaagctaaaaactcattggatggaagaagcatccccaaatatttacttccagaacatatcagtgcctgccacatgcgcataaccttctctgcacataaggatttgaatatcaaatttcagtcgcatcgcagcagggattacaccaatccttaccttcctgtgaaccaaacagcaattgaggggattgtgcagcccactgtaggccctgatgggaagataaaggagcctgagagcaatgtacttttagcatcaattgagaacatgcaatatgctgtgacggtggatgttctgcacactgtgttttctgcttttggtgctgttcaaaaaattgccatgtttgagaagaatggtggaatgcaggctctaattcaatatccagatataacaactgcagccgttgctaaacaagctttggagggacactgcatatatgatggtggttactgtaagcttcatctgtcatactctcgtcatactgatctcaatgtaaaggctcatgatgatagaagcagagactacactctttcagaccctaatgcgcagctgcaagctgctgcacaggcgccagttataagttctccgggagtggcatggcagaaccctgcatcagcaccagctgctcctttctatggaagcacggcggcttcaactcctgttggacaaccgcctgcttggaaccctaacatgcaggcccctggttttgcatctgcatcgacagcgtaccccaacccaccattaatggccaactccacgccttactatcctgctattggatcaagttcaggtgccccgccggtatcgtttcaggcttcacagcagaggccacagtatggcatgccccctggtgctccaccgcacgcaccaccagctggccaaccaatgtacttccagaaataagtggtttcgattcaatgttatcaaagagcattcacgcatattacctgcaactattgttgtccgcaaatgccatctggaatttttttggaagtgcattgtaactcttgtaacttacgagcgccctacgcaagaataccccaggctggctggctattaaaccgtcaaaaatagttttaacctattagcctgcgtggtatattgttatctcaatgccgagttgttttgatgcctcaagtgtttggaaagaaagtatttcgaaaccgtggttttggaatacagttttaagatgtcacgacatgactgtagtactggaatacagttttaagatgtcatgacatgactgtagtactccctctatagaactgtattttttatatcgttcttaacaatacgtgtttgatgattatctca

SEQ ID NO: 118940 - DNA, 1828 bp, Zea Mays
acgaagcgcagcccaagccagccccatcccccaccccccatttccccaataggccaaccccgtctccctcctcagcaacgtgctcggtttcttcctccctcgaatcggctgcaccccgtgccgcgatacgaaaacccaccaaaccctaaccctagctgcagtgccactaccgcccgcttgcccggtctccggagaggaagccgacccaagcaacgatgccgtccgggtcagcgacgcaatttcggtacacgcagacgccgtccaaggtgctgcacctgcggaacatgccgtgggaatgcaccgaggaggagctcgtcgagctctgcaaacccttcggcagggtcgtaaacaccatgtgcaacgtcggcgccaaccgtaaccaggcattcgtcgagtttgcagatcaaaaccaggcaatttcaatggtgtcctattatgcttcatcttcagaacctgctcaagttcgcggtaaaactgtctatatccaatattcaaacaggcaagaaattaccaacaataaaggcactggggattcttctggcaatgtcctacttgtaacttttgaaggcgttcagcctaatgatgttaccatagaagtcattcatttggtattttcggcatttggatttgttcacaagatagctacttttgagaaagcagctggtttccagtatactgatgccccaactgctcttgaagctaaaaactcattggatggaagaagcatccccaaatatttacttccagaacatatcagtgcctgccacatgcgcataaccttctctgcacataaggatttgaatatcaaatttcagtcgcatcgcagcagggattacaccaatccttaccttcctgtgaaccaaacagcaattgaggggattgtgcagcccactgtaggccctgatgggaagataaaggagcctgagagcaatgtacttttagcatcaattgagaacatgcaatatgctgtgacggtggatgttctgcacactgtgttttctgcttttggtgctgttcaaaaaattgccatgtttgagaagaatggtggaatgcaggctctaattcaatatccagatataacaactgcagccgttgctaaacaagctttggagggacactgcatatatgatggtggttactgtaagcttcatctgtcatactctcgtcatactgatctcaatgtaaaggctcatgatgatagaagcagagactacactctttcagaccctaatgcgcagctgcaagctgctgcacaggcgccagttataagttctccgggagtggcatggcagaaccctgcatcagcaccagctgctcctttctatggaagcacggcggcttcaactcctgttggacaaccgcctgcttggaaccctaacatgcaggcccctggttttgcatctgcatcgacagcgtaccccaacccaccattaatggccaactccacgccttactatcctgctattggatcaagttcaggtgccccgccggtatcgtttcaggcttcacagcagaggccacagtatggcatgccccctggtgctccaccgcacgcaccaccagctggccaaccaatgtacttccagaaataagtggtttcgattcaatgttatcaaagagcattcacgcatattacctgcaactattgttgtccgcaaatgccatctggaatttttttggaagtgcattgtaactcttgtaacttacgagcgccctacgcaagaataccccaggctggctggctattaaaccgtcaaaaatagttttaacctattagcctgcgtggtatattgttatctcaatgccgagttgttttgatgcctcaagt

SEQ ID NO: 118941 - DNA, 1182 bp, Zea Mays
ccgtccgatccgacagcacggcgtatctacgccgtcggccgcagccggcgcctgctggccacacccgccggaccggcccggcaggtggcagtttaatagtacaaaccaggctgatcctggcggcaaggaccaacgtgctcgatctccatctcgaccgtcgctcaccgggaagctacgctacgacgaagcatggcgtccgtcaccgcccgcgccccggtcgcagccctgcgcccgtcgtcgtcgtcggccttccttggccactctagccgcctcggccgcactgctaccgcgtcgccgacgaggcggagcctcaaggcggaggccaagggcgagtggctcccgggccttccctcccccgcctacctcgacggcagcctgccgggtgacaatggcttcgacccgttgggcctggcggaggacccggagaacctgaggtggtacgtgcaggcggagctggtgaacgggcggtgggcgatgctgggcgtggccgggatgctgatcccggaggtgctgaccaaggccgggctgatcaacgcgccgcagtggtacgacgccggcaagtcggagtacttcgcgtcgtcgtcgacgctgttcgtgatcgagttcatcctgtttcactacgtggagatccggcggtggcaggacatcaagaaccccggcagcgtcaaccaggaccccatcttcaagagctacagcctgccgccgcacgagtgcggctaccccggcagcgtcttcaacccgctcaacttcgcgcccacgctcgaggccaaggagaaggagctcgccaacggtgagttgcattgcattgcaccatctcatctcaccgccgccggtcgtcgtcggccacttccgatccttctctgacgttattaattctgcagggaggctggccatgctggcgttcctggccttcctgatccagcacaacgtcaccggcaaggggcccttcgacaacctgctgcagcacctgtccgacccatggcacaacaccatcatccagaccctgtcgggttgagtcgacggtccatcaggtcatgtggtccgagctgaaaggccgagactcgaagacagttcgtgtgatgcgttcttaatcgactgagggctaaggaatgtgacgtactggtatatgtacattagttgaagcggaggctataaagggtgtagagattgtttcatcagtgt

SEQ ID NO: 118942 - DNA, 1147 bp, Zea Mays
ccgtccgatccgacagcacggcgtatctacgccgtcggccgcagccggcgcctgctggccacacccgccggaccggcccggcaggtggcagtttaatagtacaaaccaggctgatcctggcggcaaggaccaacgtgctcgatctccatctcgaccgtcgctcaccgggaagctacgctacgacgaagcatggcgtccgtcaccgcccgcgccccggtcgcagccctgcgcccgtcgtcgtcgtcggccttccttggccactctagccgcctcggccgcactgctaccgcgtcgccgacgaggcggagcctcaaggcggaggccaagggcgagtggctcccgggccttccctcccccgcctacctcgacggcagcctgccgggtgacaatggcttcgacccgttgggcctggcggaggacccggagaacctgaggtggtacgtgcaggcggagctggtgaacgggcggtgggcgatgctgggcgtggccgggatgctgatcccggaggtgctgaccaaggccgggctgatcaacgcgccgcagtggtacgacgccggcaagtcggagtacttcgcgtcgtcgtcgacgctgttcgtgatcgagttcatcctgtttcactacgtggagatccggcggtggcaggacatcaagaaccccggcagcgtcaaccaggaccccatcttcaagagctacagcctgccgccgcacgagtgcggctaccccggcagcgtcttcaacccgctcaacttcgcgcccacgctcgaggccaaggagaaggagctcgccaacgcacaacgtcaccggcaaggggcccttcgacaacctgctgcagcacctgtccgacccatggcacaacaccatcatccagaccctgtcgggttgagtcgacggtccatcaggtcatgtggtccgagctgaaaggccgagactcgaagacagttcgtgtgatgcgttcttaatcgactgagggctaaggaatgtgacgtactggtatatgtacattagttgaagcggaggctataaagggtgtagagattgtttcatcagtgtatatcatctgtcccgatgggttttgttttgtgcttttcacgattcattgtggaagcacatgtattattagtacaagaactgctagtagatatatagg

SEQ ID NO: 118943 - DNA, 1276 bp, Zea Mays
ccgtccgatccgacagcacggcgtatctacgccgtcggccgcagccggcgcctgctggccacacccgccggaccggcccggcaggtggcagtttaatagtacaaaccaggctgatcctggcggcaaggaccaacgtgctcgatctccatctcgaccgtcgctcaccgggaagctacgctacgacgaagcatggcgtccgtcaccgcccgcgccccggtcgcagccctgcgcccgtcgtcgtcgtcggccttccttggccactctagccgcctcggccgcactgctaccgcgtcgccgacgaggcggagcctcaaggcggaggccaagggcgagtggctcccgggccttccctcccccgcctacctcgacggcagcctgccgggtgacaatggcttcgacccgttgggcctggcggaggacccggagaacctgaggtggtacgtgcaggcggagctggtgaacgggcggtgggcgatgctgggcgtggccgggatgctgatcccggaggtgctgaccaaggccgggctgatcaacgcgccgcagtggtacgacgccggcaagtcggagtacttcgcgtcgtcgtcgacgctgttcgtgatcgagttcatcctgtttcactacgtggagatccggcggtggcaggacatcaagaaccccggcagcgtcaaccaggaccccatcttcaagagctacagcctgccgccgcacgagtgcggctaccccggcagcgtcttcaacccgctcaacttcgcgcccacgctcgaggccaaggagaaggagctcgccaacgggaggctggccatgctggcgttcctggccttcctgatccagcacaacgtcaccggcaaggggcccttcgacaacctgctgcagcacctgtccgacccatggcacaacaccatcatccagaccctgtcgggttgagtcgacggtccatcaggtcatgtggtccgagctgaaaggccgagactcgaagacagttcgtgtgatgcgttcttaatcgactgagggctaaggaatgtgacgtactggtatatgtacattagttgaagcggaggctataaagggtgtagagattgtttcatcagtgtatatcatctgtcccgatgggttttgttttgtgcttttcacgattcattgtggaagcacatgtattattagtacaagaactgctagtagatatataggcttataattaagcacgacttctaaaacctcaacgtacgtatgtgaaagccccatatgatggtaaacaaaaggaaaatacaacattaca

SEQ ID NO: 118944 - DNA, 964 bp, Zea Mays
aacgtgctcgatctccatctcgaccgtcgctcaccgggaagctacgctacgacgaagcatggcgatgctgggcgtggccgggatgctgatcccggaggtgctgaccaaggccgggctgatcaacgcgccgcagtggtacgacgccggcaagtcggagtacttcgcgtcgtcgtcgacgctgttcgtgatcgagttcatcctgtttcactacgtggagatccggcggtggcaggacatcaagaaccccggcagcgtcaaccaggaccccatcttcaagagctacagcctgccgccgcacgagtgcggctaccccggcagcgtcttcaacccgctcaacttcgcgcccacgctcgaggccaaggagaaggagctcgccaacggtgagttgcattgcattgcaccatctcatctcaccgccgccggtcgtcgtcggccacttccgatccttctctgacgttattaattctgcagggaggctggccatgctggcgttcctggccttcctgatccagcacaacgtcaccggcaaggggcccttcgacaacctgctgcagcacctgtccgacccatggcacaacaccatcatccagaccctgtcgggttgagtcgacggtccatcaggtcatgtggtccgagctgaaaggccgagactcgaagacagttcgtgtgatgcgttcttaatcgactgagggctaaggaatgtgacgtactggtatatgtacattagttgaagcggaggctataaagggtgtagagattgtttcatcagtgtatatcatctgtcccgatgggttttgttttgtgcttttcacgattcattgtggaagcacatgtattattagtacaagaactgctagtagatatataggcttataattaagcacgacttctaaaacctcaacgtacgtatgtgaaagccccatatgatggtaaacaaaaggaaaatacaacattacatttgtat

SEQ ID NO: 118945 - DNA, 1110 bp, Zea Mays
gcaaaagcagcaaacgattgaggcggtgccggtggtgacatggagggagggggcgcgggcgccaaaagaagatgctgccatggcccggccaggccccagctgctgccctcacgcgcggcgccatattcccccttgtgttgtgttgtgccttgccgccgattcgcggccccgggcgtatccatacatataccgccggaggcggagacagggacggaatatctctgggccgggcggggcggtggtggagtcccaggaaagcaaagcaaccgaccgacgcagccagccggccggccggcctataagagcccccgcgcggctcgcggtggcatcgaccgtcggtcgatcacccgctgagcttgcttgttttcctgccgcggtcgctgcttggccaggaccagctgcttgctgccgtcgtctcgtctgcggctactccggcctctcatgctggccacgccaccgacgctgcgatacgaagcgccgcggtgggcacgtcggaaatggcatcgtcgctgggagtgggtggtcagcagcaggggcacgggcacgggcacggcgaggccagggcgcggctcaggtggacgcgccagctgcacgaccgcttcgtgctcgccgtggcccagctcggcggcgcagacaaggcgacacccaagtccgtgctgagggcgatggccgtgccggggctcacgctgtaccacctcaagaggcacctgcagaagtaccggctggtggcggtgagccgaggcgtcgcttccccgctgggcgacagcggagatggcaccgacgagcgttcgtcctcgtcctcggagaaccagccggcggacgagtgcgacgacggtaccgtcgccgagccgcatggcgattcttccaggagcgtggcgcggatgcagaggaagctgcaggagcagatcgaggtaaacgaaacgatagagtccggtcggtcgatcaccattgtcccgaccttgtggttgtggcagtgaaatccattaggtttcaggctttcagccgattgtgtgccgccggttcgtgcttggctgctgatcaagccgagctcggccattcatgaccacacacatccatacatggtggcaggtgcagcggcacctacagctg

SEQ ID NO: 118946 - DNA, 2045 bp, Zea Mays
gcaaaagcagcaaacgattgaggcggtgccggtggtgacatggagggagggggcgcgggcgccaaaagaagatgctgccatggcccggccaggccccagctgctgccctcacgcgcggcgccatattcccccttgtgttgtgttgtgccttgccgccgattcgcggccccgggcgtatccatacatataccgccggaggcggagacagggacggaatatctctgggccgggcggggcggtggtggagtcccaggaaagcaaagcaaccgaccgacgcagccagccggccggccggcctataagagcccccgcgcggctcgcggtggcatcgaccgtcggtcgatcacccgctgagcttgcttgttttcctgccgcggtcgctgcttggccaggaccagctgcttgctgccgtcgtctcgtctgcggctactccggcctctcatgctggccacgccaccgacgctgcgatacgaagcgccgcggtgggcacgtcggaaatggcatcgtcgctgggagtgggtggtcagcagcaggggcacgggcacgggcacggcgaggccagggcgcggctcaggtggacgcgccagctgcacgaccgcttcgtgctcgccgtggcccagctcggcggcgcagacagtgagtcctctcttctgtccacccctccattcacagtcacagcctcacaggcagtcctttgtctgatgctaccgtaccgacgacgtcggctttcccgttccttgccattggctgcagaggcgacacccaagtccgtgctgagggcgatggccgtgccggggctcacgctgtaccacctcaagaggcacctgcaggtccgtccggccaccgccgaattatttctctcttggttggttgatgacgatcgcgcgctcaactctgccttgcctcctccttcctgatccatcgaccgtgtgcatgcggtgcacgcgcaccacactgccgctgcagaagtaccggctggtggcggtgagccgaggcgtcgcttccccgctgggcgacagcggagatggcaccgacgagcgttcgtcctcgtcctcggagaaccagccggcggacgagtgcgacgacggtaccgtcgccgagccgcatggcgattcttccaggagcgtggcgcggatgcagaggaagctgcaggagcagatcgaggtgcagcggcacctacagctgaggatcgaggcgcaggggaggtacctgcagtccgtgctgcgccgggcgcaggaggtcctcgccgaccacggcctgggctcggcagccggcgcggaggcggagctggcctccgcggtggacaccgggtccctgtcctcctcctgctgctgctccccgacgcgccgccgctccgccgacagctgcgtgacgtcctcctcttcggaggccgagagccaggcccccgtcggcggcgccacgtggctccacacgtgcgccggtacgcgcgactgctccgttgagcaacagccggtgcagggggagaagagtacattcctgcagaggcacggggcagcagaggacggcacttcgtctgagatcgatcccaacggcaacaggtaggggacggagtcggagatcgtgatcggaagcatctctctgctctgcatgtgcccagcgtcggagaacagggaatgaatgattggcggggtggccttcaaggttgggacttggggaggggggccaggcttttgagcaatgtctgctgctgaaacagctacctgctctgctcttcgttccagaatatgatgtgcatgtttattttcgtttatgcgaatggttcttgtgtttcatgtaaaaaaattatgactgcaactcgaggaagggccagctgcaaatgatgcatgcagtgtgcttgaggtagcagtacaatgcaaggatgattgcatggtacagaactgtagtagctactatattattagtaagattgtatgccatcagtgagattgatgccttaagagggtaatggcatgagaactggaaaaggtttagaatgtatattaaggcctcatttgaaatagaggattagtaaaaatatatggatg

SEQ ID NO: 118947 - DNA, 1792 bp, Zea Mays
gcaaaagcagcaaacgattgaggcggtgccggtggtgacatggagggagggggcgcgggcgccaaaagaagatgctgccatggcccggccaggccccagctgctgccctcacgcgcggcgccatattcccccttgtgttgtgttgtgccttgccgccgattcgcggccccgggcgtatccatacatataccgccggaggcggagacagggacggaatatctctgggccgggcggggcggtggtggagtcccaggaaagcaaagcaaccgaccgacgcagccagccggccggccggcctataagagcccccgcgcggctcgcggtggcatcgaccgtcggtcgatcacccgctgagcttgcttgttttcctgccgcggtcgctgcttggccaggaccagctgcttgctgccgtcgtctcgtctgcggctactccggcctctcatgctggccacgccaccgacgctgcgatacgaagcgccgcggtgggcacgtcggaaatggcatcgtcgctgggagtgggtggtcagcagcaggggcacgggcacgggcacggcgaggccagggcgcggctcaggtggacgcgccagctgcacgaccgcttcgtgctcgccgtggcccagctcggcggcgcagacaaggcgacacccaagtccgtgctgagggcgatggccgtgccggggctcacgctgtaccacctcaagaggcacctgcagaagtaccggctggtggcggtgagccgaggcgtcgcttccccgctgggcgacagcggagatggcaccgacgagcgttcgtcctcgtcctcggagaaccagccggcggacgagtgcgacgacggtaccgtcgccgagccgcatggcgattcttccaggagcgtggcgcggatgcagaggaagctgcaggagcagatcgaggtgcagcggcacctacagctgaggatcgaggcgcaggggaggtacctgcagtccgtgctgcgccgggcgcaggaggtcctcgccgaccacggcctgggctcggcagccggcgcggaggcggagctggcctccgcggtggacaccgggtccctgtcctcctcctgctgctgctccccgacgcgccgccgctccgccgacagctgcgtgacgtcctcctcttcggaggccgagagccaggcccccgtcggcggcgccacgtggctccacacgtgcgccggtacgcgcgactgctccgttgagcaacagccggtgcagggggagaagagtacattcctgcagaggcacggggcagcagaggacggcacttcgtctgagatcgatcccaacggcaacaggtaggggacggagtcggagatcgtgatcggaagcatctctctgctctgcatgtgcccagcgtcggagaacagggaatgaatgattggcggggtggccttcaaggttgggacttggggaggggggccaggcttttgagcaatgtctgctgctgaaacagctacctgctctgctcttcgttccagaatatgatgtgcatgtttattttcgtttatgcgaatggttcttgtgtttcatgtaaaaaaattatgactgcaactcgaggaagggccagctgcaaatgatgcatgcagtgtgcttgaggtagcagtacaatgcaaggatgattgcatggtacagaactgtagtagctactatattattagtaagattgtatgccatcagtgagattgatgccttaagagggtaatggcatgagaactggaaaaggtttagaatgtatattaaggcctcatttgaaatagaggattagtaaaaatatatggatg

SEQ ID NO: 118948 - DNA, 2322 bp, Zea Mays
cacgcgcccacgggcacgggcggggatctcctccgttgtttcctaggccgcacgccgcccacgccgcctccgtctccgtccgttcgtcgggcgcaatagagacaccacggcacgcgccgccgctcctgccctgcacttttctaccaccgaaggcgagggcgagggggccaaagacgagcgctttttcgtgcccgcctgcctgcctgctggtcattgccgctgctcacgagcctcccgccccgtgccgccctgccctctacggctctgccccaacgagccccaggggagccaggaaaaggagccgtcaaaagccgccgccgaggagagcgcgcagggtaacgaagcaccatctcctctccttgcccttcttcgattaggttggatcccagccgccgtcgctgcaggtgggatctcctccgtttttgcttcctctcagtcgttccttcgctcgggccgtgtgtagatctgcacgttccctgtagaattctcctggtcggttccattcctctccgtcatattctcagtagatactacgtttcatgccttgtccgggtattagattatgcttcgaaaggcaatttggtctaggtgtgtagctcgatttgttagtgatggcaaataggaatggtggcctcattttcaatagagttggcaagtcaggcaagttagggaactcaatcatatgatctattttgttgaacgattcacgttatagatcacctgcttgatacacgtttcattcttggctcttactgcttctaaatccagttcttcaagatatcctctgtcttgaattatcttctgcctcacctgcatatgtgcctgacggaactttgttgctgcagtcaggcatggcatcaaccgttaccttcaacccagtgagcgcccaagctgcgctgatccaaaagccaaggaaccttggagccataagctatgctggcttaaagatgccggcatctgttagctctggctcagagtcgtcattcctgggctggaatgcatcccttcgggcagctgttactccaaggattgtgcccaagacaaagtctggatctcagatatctccacaggcatcttacaaggtggcagtgctgggtgctgccggtggcatcggtcaacccttgggcctgttggttaagatgtctcctctggtgtccgagctgcatctgtatgatattgctaatgtcaagggagttgctgcagatctcagccactgcaacacgcctgctcaggttcttgacttcactggaccctcagagttagccaactgcttgaaaggtgtggatgtcgttgtcatccctgccggggtcccaaggaagcctgggatgactcgcgatgacctttttaacatcaacgcaagcatcgtcaagacacttgttgaggctgttgcagacagttgcccagaggcgttcatccatatcatcagcaacccggtgaattccacggtgccaattgcagctgaggttctgaagcagaagggtgtctacaatcccaagaagcttttcggggttaccaccctggatgttgtcagggccaacacatttgtggcgcagaagaagaaccttaagctcatcgatgttgatgtcccagttgttggtggccatgctggaatcacaattctgccactgttatcgaagaccaggccatctgtcaccttcacagatgaggaaactgaggagctgacaaagaggatacagaatgccgggacagaggtggtggatgccaaggctggtgctgggtctgctaccctgtccatggcctatgccgctgccagattcgttgagtcttctctccgtgcgctggctggcgatccggatgtttatgagtgcacatttgttcagtctgagataactgacctgccattcttcgcatcaagagtcaagttgggcaagaatggtgttgagtccgtcatttctgccgacctccagggaatgactgagtatgaggccaaggcacttgaggcgctgaaggccgagttgaaggcaagcattgagaagggtattgctttcgtgaacaaacagcgggaagctgctgcatctgtttgaggcgaagcaagtgaaacagaaggaacaatcgtcttgaatggcttttaagttttgcagcctagagttttttgttgtcggcatgtaggaagatgttccagatggttgctgtttgtttctaattgctacatgggggctgaacatccatcccccaagttatcgccggtttctgaaccaggccttatttacacataaattttgccccttctgtatcgtggttctgtttgtagcttgttggagtctacaaactacaaagaggctaataaaccacttttattgg

SEQ ID NO: 118949 - DNA, 1814 bp, Zea Mays
cacgcgcccacgggcacgggcggggatctcctccgttgtttcctaggccgcacgccgcccacgccgcctccgtctccgtccgttcgtcgggcgcaatagagacaccacggcacgcgccgccgctcctgccctgcacttttctaccaccgaaggcgagggcgagggggccaaagacgagcgctttttcgtgcccgcctgcctgcctgctggtcattgccgctgctcacgagcctcccgccccgtgccgccctgccctctacggctctgccccaacgagccccaggggagccaggaaaaggagccgtcaaaagccgccgccgaggagagcgcgcaggtcaggcatggcatcaaccgttaccttcaacccagtgagcgcccaagctgcgctgatccaaaagccaaggaaccttggagccataagctatgctggcttaaagatgccggcatctgttagctctggctcagagtcgtcattcctgggctggaatgcatcccttcgggcagctgttactccaaggattgtgcccaagacaaagtctggatctcagatatctccacaggcatcttacaaggtggcagtgctgggtgctgccggtggcatcggtcaacccttgggcctgttggttaagatgtctcctctggtgtccgagctgcatctgtatgatattgctaatgtcaagggagttgctgcagatctcagccactgcaacacgcctgctcaggttcttgacttcactggaccctcagagttagccaactgcttgaaaggtgtggatgtcgttgtcatccctgccggggtcccaaggaagcctgggatgactcgcgatgacctttttaacatcaacgcaagcatcgtcaagacacttgttgaggctgttgcagacagttgcccagaggcgttcatccatatcatcagcaacccggtgaattccacggtgccaattgcagctgaggttctgaagcagaagggtgtctacaatcccaagaagcttttcggggttaccaccctggatgttgtcagggccaacacatttgtggcgcagaagaagaaccttaagctcatcgatgttgatgtcccagttgttggtggccatgctggaatcacaattctgccactgttatcgaagaccaggccatctgtcaccttcacagatgaggaaactgaggagctgacaaagaggatacagaatgccgggacagaggtggtggatgccaaggctggtgctgggtctgctaccctgtccatggcctatgccgctgccagattcgttgagtcttctctccgtgcgctggctggcgatccggatgtttatgagtgcacatttgttcagtctgagataactgacctgccattcttcgcatcaagagtcaagttgggcaagaatggtgttgagtccgtcatttctgccgacctccagggaatgactgagtatgaggccaaggcacttgaggcgctgaaggccgagttgaaggcaagcattgagaagggtattgctttcgtgaacaaacagcgggaagctgctgcatctgtttgaggcgaagcaagtgaaacagaaggaacaatcgtcttgaatggcttttaagttttgcagcctagagttttttgttgtcggcatgtaggaagatgttccagatggttgctgtttgtttctaattgctacatgggggctgaacatccatcccccaagttatcgccggtttctgaaccaggccttatttacacataaattttgccccttctgtatcgtggttctgtttgtagcttgttggagtctacaaactacaaagaggctaataaaccacttttattggaa

SEQ ID NO: 118950 - DNA, 1810 bp, Zea Mays
cacgcgcccacgggcacgggcggggatctcctccgttgtttcctaggccgcacgccgcccacgccgcctccgtctccgtccgttcgtcgggcgcaatagagacaccacggcacgcgccgccgctcctgccctgcacttttctaccaccgaaggcgagggcgagggggccaaagacgagcgctttttcgtgcccgcctgcctgcctgctggtcattgccgctgctcacgagcctcccgccccgtgccgccctgccctctacggctctgccccaacgagccccaggggagccaggaaaaggagccgtcaaaagccgccgccgaggagagcgcgcagggcatggcatcaaccgttaccttcaacccagtgagcgcccaagctgcgctgatccaaaagccaaggaaccttggagccataagctatgctggcttaaagatgccggcatctgttagctctggctcagagtcgtcattcctgggctggaatgcatcccttcgggcagctgttactccaaggattgtgcccaagacaaagtctggatctcagatatctccacaggcatcttacaaggtggcagtgctgggtgctgccggtggcatcggtcaacccttgggcctgttggttaagatgtctcctctggtgtccgagctgcatctgtatgatattgctaatgtcaagggagttgctgcagatctcagccactgcaacacgcctgctcaggttcttgacttcactggaccctcagagttagccaactgcttgaaaggtgtggatgtcgttgtcatccctgccggggtcccaaggaagcctgggatgactcgcgatgacctttttaacatcaacgcaagcatcgtcaagacacttgttgaggctgttgcagacagttgcccagaggcgttcatccatatcatcagcaacccggtgaattccacggtgccaattgcagctgaggttctgaagcagaagggtgtctacaatcccaagaagcttttcggggttaccaccctggatgttgtcagggccaacacatttgtggcgcagaagaagaaccttaagctcatcgatgttgatgtcccagttgttggtggccatgctggaatcacaattctgccactgttatcgaagaccaggccatctgtcaccttcacagatgaggaaactgaggagctgacaaagaggatacagaatgccgggacagaggtggtggatgccaaggctggtgctgggtctgctaccctgtccatggcctatgccgctgccagattcgttgagtcttctctccgtgcgctggctggcgatccggatgtttatgagtgcacatttgttcagtctgagataactgacctgccattcttcgcatcaagagtcaagttgggcaagaatggtgttgagtccgtcatttctgccgacctccagggaatgactgagtatgaggccaaggcacttgaggcgctgaaggccgagttgaaggcaagcattgagaagggtattgctttcgtgaacaaacagcgggaagctgctgcatctgtttgaggcgaagcaagtgaaacagaaggaacaatcgtcttgaatggcttttaagttttgcagcctagagttttttgttgtcggcatgtaggaagatgttccagatggttgctgtttgtttctaattgctacatgggggctgaacatccatcccccaagttatcgccggtttctgaaccaggccttatttacacataaattttgccccttctgtatcgtggttctgtttgtagcttgttggagtctacaaactacaaagaggctaataaaccacttttattggaa

SEQ ID NO: 118951 - DNA, 1227 bp, Zea Mays
aactccaagtcttgcgcggaagcaacggcctgtcatgtacctcgcccgaaatcgccgagagcctcccctcagtttacgccgcacgaaccgacgcactagaccgacccgcgaatcccccgcgcgcgcgccgtgcggtcaccgtccgaggccacggcaccgccggcccccgcccccgccccggccgccaagagcaaaggcaaggccgacgcttcctcctcgtcgtcctcctcctccactccaccgaggtcgcgccgcgcgcttgccgtcgtgatggccgcgtcgctgctcgtgctcgccgtggcgttcttggttggctctggctccggggggatcgatgggggcgcagcggctcccgtcgaggtggagggcaccgaggtggcctacggtagtgtgatcaagctgatgcacgagaagacgaagcaccgtctgcactcgcacgatgtgccctacggctcaggcagcggtcagcagtctgtcaccgggtttcctgaaggcgatgactcaaatagctactggatcataaggcccactccagattcatcgtctaagcaaggtgatgccatcgaaactggtggcatcatcaggttgcaacacatgaggacacggaggtggttgcacagtcacctgcacgcttcaccgttgtctggtaaccttgaggttagctgtttcggcggggatgaattgtcagatagtggtgaccattggaggctagaaattgaaggaagtggaaaagtatggaaaagagatcaaaaggtgcgacttagacatgttgacaccggaggttatctgcatagtcacaacaagaagtacaatcgccttggcggtgggcagcaagaggtctgcggtgtccgagagaagcgagctgagaacatttggttgacagcagagggtgtttatctcccagttaacgggagcaagtgaaaaagcactttctagcatttactatttttaatgttaatcagtataggatcagatattttgccagctttcattcgtccttgtcttaagaaaaacgaacatgggacctgaccccctagtgatatgtttaagttggaatgttggatatcgatgatgtcgacaagaccaggacagcgcatgcttgtaattgatatttataatccatatatgaccgtgtagatacccagaggccagagatgcatgtgatgtgacactttgttaacaactagagatgcggatcatcgtccagatgtgacagacattcgtggc

SEQ ID NO: 118952 - DNA, 120 bp, Zea Mays
ctattctgttcaaatcctccttattacagactctttatacgaaaacgttgggccggctaaacctaggcccaaatacacgagattactgctaatgacttagctaaccaaagcccaacacag

SEQ ID NO: 118953 - DNA, 789 bp, Zea Mays
tactgacgcgcggaacgacgacgagatcgtgtccgagtgaattttatgacgcggactggggaaggacttggcgataacaatgagctggagcgttggtgagcttgaaaattcaatggcgaaatcggcggcgaatagagagcttcgcgcgtggccaacagagaatttgcgcgcagaggaacgacaaggctgagcgcgcattagggagaaacgccggctgaagacagaaccgagctgggacttccacggaacggcacgtgggtggattccatggccagagcgagcactgctgaaggggaccgagctcgacaaaggcgcgagcgagcagagggcaaaacgcaggggaaaactggaggggagcttggcggccatggctggagcaccgcagcgcgcgacgctgggagatcggcatggcgcaggcgcgcagggaacttcacggctggaaggagaccagagagagagacgcggtgcagggagcttcagggaagaacggcgccatgggagcttcgacggcggctatggatagcgaaagctgtgcgcggccagccaaggagcaaggacgactgcggtctggcgagctggaggccaaggtataaccagaggagcttggcgagggcagagcttcatggctgcatgatgctgaaacgaccaggcgaggtcgaccactgcaggggcggcagccaagcacgacgagcagggaagtacgcccaagaaaagctgagcacggagggagaagaactggagcgtgctgaggaggaactgttgcgcgcctgccgttcggcatggtgaaga

SEQ ID NO: 118954 - DNA, 1342 bp, Zea Mays
tttttgcagcagttcgaatatattggttcctgattattgtgtctcgtcatggatttattgcgttcattgaaccagaaaattgcatcgcagtgtctacatttgtattctagtttaccaagatctttttgttggagggttcacagtttttagacatcttcctctttctaatcctttcaccgcgtcttattttactctcttctccaaaaaagttactgctctgtaagacttgctcacttctttttcttttcgtagggtggtcaatatcaatgccttgtttatgacttcttattattttccccatgtctatatcctatgtgatggatgcatgggtccaaaaagataaaatgaaaatatactgttagtaaccaatgaattgtacaaaaaatattatatgcaatgactatacattgaaatgcacacaactaaattaaagctatagttacatgcatagtacaattgaatgttacaaatactgcttttattagccagtgttatgtctttatttatactaatgctattcacatactatggagatttagaccattggaaatgcactttgtaatacttaacttggtgttctaaaacataagataggtgttctgaaacataagatatgaaattgcacttggtaatacttagtgtggtgttctaaaacagaagagaggtgttttgaaatagaagagagggtacatatttgagcatatgtagagcccaggtacctcgctctacaacatcaaggattatcttgtcattcataagagttaaaggccctttcttcagtctttcactattaagacacaatttcatgttgcaaagatcttcaatggatgatattgatgacgatatataagggatatcactcttgagccacataagcttgatgaagagattgttgaatctaatcttgagcttgaagcagactttgtacaatttaaatatgatgatcgatcacaaaagatgggaaatggacataaacagtgaacatgaagaagggtgtgctagatggaaaggaaaccggtcaagctgattgaataagaagaagtctcttaactactataaatccatccatgaaatggagaagattaatgctaagccacttcaagaaaaaaggttgggtctagtcgttgttgtctctatactggcaaagggaatgcggagatacatttcgagaagaaaaaggcaatgatatggaggtgttttgtctttcattgataaaaaattagaaatgagcaggtgatgaatgtcacatgaatatatttagctatttcaaatggaaaccaactttgttattgtactggcttttgttcataataaaaacacagaaggcaatggaaaatctaca

SEQ ID NO: 118955 - DNA, 1430 bp, Zea Mays
tttttgcagcagttcgaatatattggttcctgattattgtgtctcgtcatggatttattgcgttcattgaaccagaaaattgcatcgcagtgtctacatttgtattctagtttaccaagatctttttgttggagggttcacagtttttagacatcttcctctttctaatcctttcaccgcgtcttattttactctcttctccaaaaaagttactgctctgtaagacttgctcacttctttttcttttcgtagggtggtcaatatcaatgccttgtttatgacttcttattattttccccatgtctatatcctatgtgatggatgcatgggtccaaaaagataaaatgaaaatatactgttagtaaccaatgaattgtacaaaaaatattatatgcaatgactatacattgaaatgcacacaactaaattaaagctatagttacatgcatagtacaattgaatgttacaaatactgcttttattagccagtgttatgtctttatttatactaatgctattcacatactatggagatttagaccattggaaatgcactttgtaatacttaacttggtgttctaaaacataagataggtgttctgaaacataagatatgaaattgcacttggtaatacttagtgtggtgttctaaaacagaagagaggtgttttgaaatagaagagagggtacatatttgagcatatgtagagcccaggtacctcgctctacaacatcaaggattatcttgtcattcataagagttaaaggccctttcttcagtctttcactattaagacacaatttcatgttgcaaagatcttcaatggatgatattgatgacgatatataagggatatcactcttgagccacataagcttgatgaagagattgttgaatctaatcttgagcttgaagcagactttgtacaatttaaatatgatgatcgatcacaaaaggtacttcattctgttgccacaaacatgtttagcgacaaggagatgtgctgctaagtctgtttttacatggaagatgggaaatggacataaacagtgaacatgaagaagggtgtgctagatggaaaggaaaccggtcaagctgattgaataagaagaagtctcttaactactataaatccatccatgaaatggagaagattaatgctaagccacttcaagaaaaaaggttgggtctagtcgttgttgtctctatactggcaaagggaatgcggagatacatttcgagaagaaaaaggcaatgatatggaggtgttttgtctttcattgataaaaaattagaaatgagcaggtgatgaatgtcacatgaatatatttagctatttcaaatggaaaccaactttgttattgtactggcttttgttcataataaaaacacagaaggcaatggaaaatctacatgcaaatgttttgct

SEQ ID NO: 118956 - DNA, 531 bp, Zea Mays
tcaggtaccaatgtcaagatagctgccattccttcaagcgtcgtggttctgacttcagagacctttgactcaattgtccttgatgaaaccaaagatgtccttgttgagttttatgccccatggtgtggtcactacaagcatcttgctccgatttatgagaagctggcttcagttttcaagcaggacgacggtattgtgattgccaatcttgatgctgacaagcacactgacttggctgaaaaatatggtgtttctggtttccctacattgaagttctatcctaagggaaacaaagccggtgaagattatgatggtggccgggacttggatgactttgtcaagttcattaatgagaagtgtggcaccagctgggatacaaagggccacctgacttcagaggctgggcttgtgccaagcttgaatcctcttgtgaaggagtttctcaatgctgctgatgacaagcggaaggaagtcctctctaaaatagaagaggatgttgctaagctcagcggttctgcagccaagtacttt

SEQ ID NO: 118957 - DNA, 1378 bp, Zea Mays
caaaactttagttagagttgggttacttaactttatttaattttccttttaactcaagcttccttttcaatccaacattatacagcaaaggtattgctaaaaaatgttgaatttatacataccaaagtgctgtatgtgccttcggaagcagtccgtgtcttcattagatttctctactcttcacggtatggatgctatctactcattcgtgtagatagttcactgtcctctaattctctaaagatcatatttcatcccaaacagtttacagtgactgaagttgatgaagacagtgcagattcttcttctgatgatgatgacttttgatgtgtgcgtgcatctttcagtgagaaacagatgcactgatttatttgtttggtgaaggtttgagcaggaacagatgaaggagcacgctctgcatttgcttgtactctcccacgtcttctcggtgccgtctctgaagacggtctgcgtcgaccaactcgagaggggcttcctcgctcctgacaacgtggtagacatgctgcagcttgccaggctgtgtgacgcgccccgccttgcgctcgcctgtgtccggatggtcatcggggatttcaagaccatctctctgacggatgggtggaaagtgatgagacgggccaatccaagtatggaacaggagctgctcgagtctcttgtcgaagctgatacgagaaggcaggaaagagctaaaaagatggaagaaaagaaagtgtatcagcaactgtacgaagcaatggaggcgctggtccacatctgccgggaatcaaacatatatgaaaacaatcaaacatatattggactgactgaaatcccattgttcctaaggaacggaaattggtattgatgcaatatataaagcatgtgcttgctgaacgtcttttctattcgtcatcacatttcttttctgcttctctaattttctcgaatgcttctttgcaaatacaccatggattaggattacctgtgggtttcaatctttttttgtaggttacgcctaatctttacggcaatttggtggctaacacgactgcatgtattgttggagggatgggcatcatgcctggagactttgtggcatatggaacttcttggagctttttgctatggtcttcatcaagttttctaccaatgacttatctcccgctaccccgacccgctcatcaaggccaacgacaccatcaagatcgatctggagaccaacaagatcatggacttcatcaagtttgacgtcggcaatgtggtcatggtgactggtgggaggaacaccgggcgtgtaggagtcatcaagaacagggagaagcacaagggcagctttgagaccatccacgtggtgcttggagctttttgctatgtctag

SEQ ID NO: 118958 - DNA, 489 bp, Zea Mays
atggccaagaaggagaagtccaagcgccatccagggagcaggcgctggggcagagaggagcgcggatgggcggaactccggttgggcgcgcgccggcgagggagaagctcggctggggagggtaagcaggggcgtggtcaggcgagcaccaaagacgagccagggaccgcaggaaagggagctcggcggacagccatggaagcagggcaagggcgcggccagcgcgaggagctcggcgcgacgcaggagaaagatggggggagagaagcgcgcgtggaggagagccgctcggcagagaggagaacatcgggagagagcgacgttgggggccgagcgcgggagctggaggcgcgccatgggaggaagacgcacgcgcttgaggaagatgaaggcggccaggtttctctattactcgagcggatgaggctgggcactggaatcggcggcgcccaggaatatcagacgagggaggcggtggagagaaggtaa

SEQ ID NO: 118959 - DNA, 1032 bp, Zea Mays
atggtgccggcatcatggtcgctctaccacatgacttcttcaaagaggtcgcaaaggatgctgggttttgagctacccccaccaggcgagtatgctgttggaatgttttttatgccaacagatgaaaagcgtcgtgagaaaggcaaagctgagtttaagaaggttgcagaatcactgggacatgtaatactcgggtggcgtctggttccgactaacaactcagacttgggtgaatctgcactcgagactgagccagtcattgagcaggttttcattaccaagagctcaagatcagatgctgagtttgagcaacagctatatatccttaggagactctcaatcacctctgttcgagcctctctgaacattaagcgtggtggagagagggatttctacatgtgctctctatcttctaggactattgtttacaagggccagcttaaaccgtcccagcttaaggggtactactatgcaaacctaggtcatgaaaacttcatgagttatatggctctgagtccagctgcagttctgctatggccgactgctatgcccgactcatcaggatgtgacctccgattaggtggtgggaaggaaatggcggcggtgggcatgctgctcggcggcgaggacatgcataggttcccggtgcgctccccgcggatggactgcggcgacctcatccgcagtcccgtcgcgcgacagatcgtgtccaactacttcagcatgtttgggccggtgcaggacgtgcgcatcccataccagcagaagcgcatgttcggcttcgccaccttcgtgtatgccgagacggtgaaggccatactgagcaagggcaacccgcacttcatgtgcgacgcgcgcgtgctcgtcaagccctacaaggagaagggcaaggtccccggtaggttcaggaagctgctgcacgcgcaccatggcggagccgagttcgtcggttgcgcgtcgcccaccggattgctggattccagggacccctacgccctcctgcttctttcaggtgcccaggttttctcctag

SEQ ID NO: 118960 - DNA, 2051 bp, Zea Mays
cgtagcagctttgagtatttttttgtatatatttcaagtcaattatcagcaactatggtcttcttagtttgattttaatatcaaatgacgattgtggctttcaatacataaccatggaccaaaactaactacctgatacctcaccatgtcgcctaaattccctccatacctcacctcatcgcttgcagagccgagaccagataatacagttcacttcagggagaaaacagaaacaaataaacgcagacaagagggcgaccaatctggcggagctgctggagcttgctgcagtgaccgcatggcgggagaccaagacgcgtcgagtggtgacgcggttctgagcctgcagttcagggcagctggaggagagccagcgctccgctacaagagacagcgcgtgcaggcggaggatggtcgacgcgggcatagcagcggcgtttgtgggggagaggatgggattcctggcgacggcaacgacaagggggaagaggatggcactggggctctagcagttgctgttactcatcattgtcgacaccgacgacaaaaaataaaaggaaaaaaaaagctttggatgacagtggtgacgccgtctctctccgagaagaagggcgcgagggaaaggatggaggcgacggtcgacctcaagtacgagccgctgttcccgaacggcggcgtgtcatcggcgaccaagaagacgaggctcagggtggcggccggcggagagacgtgggtgtaccgcgagtgcctcaagaaccacgcggcgagcctgggaggtcacgccctggacgggtgcggcgaattcatgccgtcgccggaggccgaccgggcggacccgagttcgctcaggtgcgccgcgtgcggatgccaccgcaacttccaccgccggctcgtcgagctgccactgccaccgcctctcctcgccttgccgccaccactggcgccggcgccggctgtcgcgtcgcacgtaatgcgtgacagccgccgcacgatgcgcggcgaggaggcgcgcctgccggccgcattcgacgacgaggcggaggagtcggacgcgagctcggatttctacgaggaccgcccgctgtcgccgatgccggcgcaggcggcaattgtgtcgcccggctaccgccaggccacgacgcacacgctcctcgcgctgatcatcggcgcgccgagcccccaaacccccgcagcggcgccgcggccgcccccgcccacctccgtgggcccgatgccggcgcccgcgactgctcccggtgccgccgccgccgcggcggcggcggcgaggaagcggtcccgcacgaagttcagcccggagcagaagcagaggatgcaggctctgtcgtcgcgactgggttggcggctgcagaagtgcgacgaggcggcggtggaccagtgctgccaggagatcggcgtcagcaagggcgtcttcaaggtctggatgcacaacaacaagcacaacttcgtgggcggccacagcgcgcgccgcagcgcctcagcctcagcctctgctgccgcggccaacccggccatgcagcaaaggtccgacgccgccgctgtctacccttcctcccacggcgatggcgccccagcagcagccgtcgttgcccacccatccgctccaccgcccgtgcctgtccactctaacttcaacatcgaaggcaccgccgccgatgacttccgcgtccaaccgtcgacggcgagtggcggctcgccgcagtcctagtcaagttagtgctaatcagtcatggttatttgtagcctcgtgtctaattaaccaaccctaatggagtcctagcaatgttggatgcatgggactatgggggagttctagtgaagcctgctggtctttgttaatggtggagcccaaagaaggatcttagaaatgtgggcttttaggatctgatgatgtaatgaactaatgatccaggattagtgcttatgagtacagtagcagcgagtggtactacgtactagtagactgttagagtaactccaatagtctaattatagtcttagataaatttagagttagagttctatgaggattt

SEQ ID NO: 118961 - DNA, 1279 bp, Zea Mays
gcaacaacgacacagaaaaactacgtcgcgaggagaagctcattagtattccattgacgaatagatagcgcgcgagtcacaatgggaaagagctcgacgcgtcaaagcatgcgaaggcacgatcggtgatgttgttgtacatgatgcggagatgtacgacggttacatggatagtgttgggaatggccgagtccacgcagagctccaaatcgacgaccaccaggacgagctgggacaatcggacctgacgatatcagctagctggaacgctgggaagctcggcagacgtgaccaagaaaattggcgagcgtacgcggggcgagctccatgctagcaaggccgacacgaccaaccggaaagagcttttggaatgcggttaggactagagacggacgcacggctagagacccaagtatccgagatcgacgaacggcaacgcgaggagcaaggcgagctctacagtatcggcaacggcatggcatcgacaagaacaccgtgcgcaaccatgggcgacttgggcgagctgggcgacgacgcgcgagcatgggcaagcacgggcatgggagggacaccgagggagctcgacatggccgagctcggactaaagcacgcgcggcaagacctgcacgatgtcccgatggtgttttctggtggccgcaagatgagcaagagcgccggaggtgcttggggcagaagcagggtcgagcagggagggatccacgaccatgggcgtcaagagccagcggcgttcgacgtcgaggaccgaggaggggcgggcaagcacgaagaagacgagcttgaggcggacaccaccggcgagaaaaggggcattagagggattcaccgagaggagctcagggctggagtggagggaggacgcggccatggcagggagaggaggaagctgcggccaacgaaaggcaggggcgcgcggcgatggaagctcagggaggcgagcagagatggctggaagatgaaagcgccgcgcggtgaagaagacaccgcgagggagagaaaggagagaccgcggcagagaaaggaggtcagggcggtggatatttctgcaaagatgaggggcgaacgaaaaaaatctccacgcccgtgggcggcagtaaaatatcagagggaagataagccaggcacgcatcgcaagaaaaagatccagcgcaggatattttcaggggagagagcggtagaaaaatcaagccgaagaaaatatccgcggcagaaactcatgtgctcggatatggacaaggaacggagagtcggtgggaaatag

SEQ ID NO: 118962 - DNA, 678 bp, Zea Mays
cagcaagaggatcggagtgagaggatcagataacaggcaatgatgaagaggatggtgatcgtgaggcggtgccacccgccgccgcctccaccggtgctcctcttcggcgggtgccccagcgccgggggcgtgcgctacggggagtgccggcggaaccacgcggcgagcatgggcggccacgccgtggacgggtgccgcgagttcctggccgagggggaggagggcaccgccgccgtgctccactgcgcggcatgcgggtgccaccgcagcttccaccgccgcatggtgcagcgctcctgctgcttctgctgcgacagcgccgacgttgccgttgccgcagccgcagccgcagccgcagccgccgaacggtgggacgacgactgctcgccggagtcctcggcatccagttccacacccaggtagaagccaaaaaaaaaaagaatcagcacgcgcccggcgcccgggcaattcgatctttctctcactagcatagggctcgaccatatctgttgcctagttattgctattgctttgctcttggaatattgtaacgtacaaccaattcatcacacactccccgtgtctgtatgccctctcttccatttttttgtactatgagattattgagttcgtaggatggatttatgtgacatacgacataagacgttttgcactaga

SEQ ID NO: 118963 - DNA, 147 bp, Zea Mays
atggccgcgtggtggatggcggttcctagcaccacgccgccgcacttgagaaaagtcacctggaacatggatatggggctgttgttcgcctcgccggactcccctaacggcacaaaagtgttcctgatctccgacgacggctcgtag

SEQ ID NO: 118964 - DNA, 109 bp, Zea Mays
tattcctatagcatgcactttctggttgtcgatttcccaaattgtctctatcaaagttgtttaatatataagtgttgttcttataaatggcactcaagttttcataaaa

SEQ ID NO: 118965 - DNA, 1515 bp, Zea Mays
atggttttgtttatctaccaagcagctacaaacttcttgcctatctttggggctattgtgtctgatgcactattgggacgctttctcacaatctcactcacacttttcgcatgcacgattggagctgttcttctctggttgaccacagtagttccaacattggtcgcagaagattgttcaaatgaagaccagagttgtcactcaccgacaacactacaattttttgtcttgctaacttctttattgttcttgtcaattggcgcaagtggtgttcgcccttgcagccttccttttggtgtggaccagtttacccactggagcggcgctccaaaggaccgtgcgctcaaagttctattcggctggtattacgtatcaatgggtggctcagcaatcatttctataactctcatcgtgtacttgcaagacaaattgggctggaagatcggttttgccatttctatggttatagcggcatttgctgcaattttaaacattgttacatcgcccctttacatcaaggtgaaaccacagaaaagcacgtggattagtttagtgcaagtggttttcatcgctataaggaatcgacacattcagcttcctaaagcagcaggtgagaatgatctgcattactgcaacgttggaggactggcaatggttccatcaagcaaaatgaggttccttaacagagcatgcgtattgagggcacatgtagaaagttctaacactgaagtgcttaattcatggagtgtatgcacagttgagcaagtcgaggacatcaagcgtgtactaagtgtcatccctatgtggtcagctacgattacaagtttgttgatccaaacggcttcgttcagggtgctacaggcagaaacgatggaccgtcatgttggtagcacaaggttccaaatgcctgctggttcagtcgcaatatttgaaggcattacattcacattggtgtcaggatgcattacaggaagagaaaaaacgcttagtcacaagcagaaaatgggcatcggcgtgctcttttccattgcatgtgctctttcggcatcagtggtggaggccatccggaggaagcaagcaacaaggcagggcctagaaaataatactgatgatggtggggttgtaaatatgtcagtgctgtggctagcccctcaatgtgtttttgctggcctcattagtgcgtttggatccattggacagatcgaattctactatgaagtgctaccaaagtcaatgagtagcttagcactggccctcctccccctagcaataggtgtcgcaaacattgcaagtacagtggtcgtcaagctcgtcaaagtgattacatgtagtggtggaagagtaggatggcttcttgataacctgaaccaaggccattatgactacttctattttgtgctagcaatgctcggtattgcaggttttatctattttgttgcttgttgctattggtttgaggaaccatcaccaaaccagcttgttcaatctaatgaagatgaaccaaatatgagatga

SEQ ID NO: 118966 - DNA, 98 bp, Zea Mays
gacaatcctgggtgcaatccctctgataacataatgggcaatgatattcctctaatcatggataaaattgttcaagaacttgttgatagtgaaggtga

SEQ ID NO: 118967 - DNA, 1947 bp, Zea Mays
tttattctactgcatcatcagcaacacgccatgatatatttgtccacgagctaataacaccagcgtcgcctagaaacgggctcacgcaggcgtcgtgcctccgccgtttggccatctctatatacagcggaggatcaggcaataatcgcaaatcccacaccaaccagagccaccctgccgtcgtaggcgcacgcgccgtagataggaagcttattaagctagcgcgtgtcgctgcgccatcctgccatggaggatcaggcgctggcgccgctgctgcagccgctcccgctcggcgaaacgggggccatcaaggggcgcgcgaggcgggcggcgctggagtggtgggtggagtcgaagaagctatggcacatcgtgggcccggccatcttccaacggatcgcgctgtacggggtcaacgtcgtcacgcagtccttcatcggccacctcggcgacctcgagctcgccgccttctccattgctgccaccgtcgtcgggggcttcaacttcggtttcctgctgggaatggcgagcgcgctggagacgctgtgcgggcaggcgttcggcgccaagaagcaccacatgctgggggtgtacctgcagcgctcctggatcgtgctcctcatcttcgccgccgcgctgacgccgacgtacatcttcatggaggacctgctgctgctgatcgggcagtccccggagctgtcgcggttggcggggcagatgagcgtgtggctgctcccgcagcacttcgccatggcgatgctgctcccgctcacgcggttcctgcagagccagctgaagaactgggtgaccgcgatcaccgcggccgtcgcgctcgccatccacgtcgtcgccacctacgtgctagtgcgtctcctcgacttcggcatcgtcggggccgtcgcctctgcggacatggcgtggtggttggtcgtgctgggccagtacgtctacgtcgtcggcggctggtgcccgctgtcgtggaaggggttcaccatggaggcgttcgccgacttctgggagttcatcaagctctcctcggcctccggagtgatgctctggttcgtgttgcattgtcgtcgtcgccgccgtccatttcgtagcttaattagtttctctagcttcatgatttgctcacctgcttgcagcttggagaactggtactaccgagtgttggtgttgctgacagggtacctggacaacgctgaaatcgctgtggatgcactctccatatgtcagacgatcaacggatgggagatgatgatcccgttcggcttcttagcagcaaccggggtgcgagtcgcaaatgagctcggcgcagggagcggcaaaggtgcgcgcttcgccatcgtggtgtccatcacgacgtccgtggtgatcggcctcgtcttctggtgcctcatcctctacttcgacgacaagatcgcgcttctcttcacgtccagcgcggtcgtgctcgacgccgtgcaccacctgtccgtgctgctcgcattcaccatcctgctcaacagtgtgcagcccgtcctctcaggggtggccgttggttcaggatggcaagcactggtcgcctacgtcaacgtcggcagctactacctcatcggagttcccttgggtatcatactcggttggccgctgcacttgggagtagggggaatctggtccgggatgattggagggaccgccgttcaaacgctcatactggcatacctcactgccaaatgtgattggcacgaagaggcgaagttagctagtatgagaatgaagaagtgggccgacgagtcgaaataaacccactccactgctgcgctttgtttgttagccaggcacacaggggaacggaacccctgaagctaagataacttctggtaaaaataaaatacgcatcatgcttaggagttacttatctgtaaaaatgaatcaaaagcgcaacacgactaaggaaacaatgtc

SEQ ID NO: 118968 - DNA, 2326 bp, Zea Mays
tttattctactgcatcatcagcaacacgccatgatatatttgtccacgagctaataacaccagcgtcgcctagaaacgggctcacgcaggcgtcgtgcctccgccgtttggccatctctatatacagcggaggatcaggcaataatcgcaaatcccacaccaaccagagccaccctgccgtcgtaggcgcacgcgccgtagataggaagcttattaagctagcgcgtgtcgctgcgccatcctgccatggaggatcaggcgctggcgccgctgctgcagccgctcccgctcggcgaaacgggggccatcaaggggcgcgcgaggcgggcggcgctggagtggtgggtggagtcgaagaagctatggcacatcgtgggcccggccatcttccaacggatcgcgctgtacggggtcaacgtcgtcacgcagtccttcatcggccacctcggcgacctcgagctcgccgccttctccattgctgccaccgtcgtcgggggcttcaacttcggtttcctggtaatcttgccgttgttaccttttgcatatcctatgctaactcatttctgtttgtggagctgtgggggcacatgaagcaacgcctgttacccctacactacaatctgtgaactagaaaatgatacggtcaaccatctggccatctactggatgcattttacgagatctgggaatggcgagcgcgctggagacgctgtgcgggcaggcgttcggcgccaagaagcaccacatgctgggggtgtacctgcagcgctcctggatcgtgctcctcatcttcgccgccgcgctgacgccgacgtacatcttcatggaggacctgctgctgctgatcgggcagtccccggagctgtcgcggttggcggggcagatgagcgtgtggctgctcccgcagcacttcgccatggcgatgctgctcccgctcacgcggttcctgcagagccagctgaagaactgggtgaccgcgatcaccgcggccgtcgcgctcgccatccacgtcgtcgccacctacgtgctagtgcgtctcctcgacttcggcatcgtcggggccgtcgcctctgcggacatggcgtggtggttggtcgtgctgggccagtacgtctacgtcgtcggcggctggtgcccgctgtcgtggaaggggttcaccatggaggcgttcgccgacttctgggagttcatcaagctctcctcggcctccggagtgatgctctgcttggagaactggtactaccgagtgttggtgttgctgacagggtacctggacaacgctgaaatcgctgtggatgcactctccatatgacgatcaacggatgggagatgatgatcccgttcggcttcttagcagcaaccggggtgcgagtcgcaaatgagctcggcgcagggagcggcaaaggtgcgcgcttcgccatcgtggtgtccatcacgacgtccgtggtgatcggcctcgtcttctggtgcctcatcctctacttcgacgacaagatcgcgcttctcttcacgtccagcgcggtcgtgctcgacgccgtgcaccacctgtccgtgctgctcgcattcaccatcctgctcaacagtgtgcagcccgtcctctcaggggtggccgttggttcaggatggcaagcactggtcgcctacgtcaacgtcggcagctactacctcatcggagttcccttgggtatcatactcggttggccgctgcacttgggagtagggggaatctggtccgggatgattggagggaccgccgttcaaacgctcatactggcatacctcactgccaaatgtgattggcacgaagaggcgaagttagctagtatgagaatgaagaagtgggccgacgagtcgaaataaacccactccactgctgcgctttgtttgttagccaggcacacaggggaacggaacccctgaagctaagataacttctgatacagcgctatgcatattccggccttcagacgccgttccctgcagcttgctacagtaaaatgaagccccaggtttctgacgatggtgtacggaaagctcccatagtggaattgcgtaccgcgcgtgtcaaaatattgttccactatagctaatatgggacaggacattcatcgtttttttttcttctcatcatcgtattgttccactataggcatgcctggctctcactaggtcaacaaggctacacttgtcctaattgagtacatacgacacaaaatatttggttgtcgtaaggataattttaaagtacagtttcggtgtcaaaatattgttctactatagctaatatgtaacaggtcattcatcgccttttttcttgtcatcgtcg

SEQ ID NO: 118969 - DNA, 2046 bp, Zea Mays
gcctagaaacgggctcacgcaggcgtcgtgcctccgccgtttggccatctctatatacagcggaggatcaggcaataatcgcaaatcccacaccaaccagagccaccctgccgtcgtaggcgcacgcgccgtagataggaagcttattaagctagcgcgtgtcgctgcgccatcctgccatggaggatcaggcgctggcgccgctgctgcagccgctcccgctcggcgaaacgggggccatcaaggggcgcgcgaggcgggcggcgctggagtggtgggtggagtcgaagaagctatggcacatcgtgggcccggccatcttccaacggatcgcgctgtacggggtcaacgtcgtcacgcagtccttcatcggccacctcggcgacctcgagctcgccgccttctccattgctgccaccgtcgtcgggggcttcaacttcggtttcctggtaatcttgccgttgttaccttttgcatatcctatgctaactcatttctgtttgtggagctgtgggggcacatgaagcaacgcctgttacccctacactacaatctgtgaactagaaaatgatacggtcaaccatctggccatctactggatgcattttacgagatctgggaatggcgagcgcgctggagacgctgtgcgggcaggcgttcggcgccaagaagcaccacatgctgggggtgtacctgcagcgctcctggatcgtgctcctcatcttcgccgccgcgctgacgccgacgtacatcttcatggaggacctgctgctgctgatcgggcagtccccggagctgtcgcggttggcggggcagatgagcgtgtggctgctcccgcagcacttcgccatggcgatgctgctcccgctcacgcggttcctgcagagccagctgaagaactgggtgaccgcgatcaccgcggccgtcgcgctcgccatccacgtcgtcgccacctacgtgctagtgcgtctcctcgacttcggcatcgtcggggccgtcgcctctgcggacatggcgtggtggttggtcgtgctgggccagtacgtctacgtcgtcggcggctggtgcccgctgtcgtggaaggggttcaccatggaggcgttcgccgacttctgggagttcatcaagctctcctcggcctccggagtgatgctctggttcgtgttgcattgtcgtcgtcgccgccgtccatttcgtagcttaattagtttctctagcttcatgatttgctcacctgcttgcagcttggagaactggtactaccgagtgttggtgttgctgacagggtacctggacaacgctgaaatcgctgtggatgcactctccatatgtcagacgatcaacggatgggagatgatgatcccgttcggcttcttagcagcaaccggggtgcgagtcgcaaatgagctcggcgcagggagcggcaaaggtgcgcgcttcgccatcgtggtgtccatcacgacgtccgtggtgatcggcctcgtcttctggtgcctcatcctctacttcgacgacaagatcgcgcttctcttcacgtccagcgcggtcgtgctcgacgccgtgcaccacctgtccgtgctgctcgcattcaccatcctgctcaacagtgtgcagcccgtcctctcaggggtggccgttggttcaggatggcaagcactggtcgcctacgtcaacgtcggcagctactacctcatcggagttcccttgggtatcatactcggttggccgctgcacttgggagtagggggaatctggtccgggatgattggagggaccgccgttcaaacgctcatactggcatacctcactgccaaatgtgattggcacgaagaggcgaagttagctagtatgagaatgaagaagtgggccgacgagtcgaaataaacccactccactgctgcgctttgtttgttagccaggcacacaggggaacggaacccctgaagctaagataacttctggtaaaaataaaatacgcatcatgcttaggagttacttatctgtaaaaatgaatcaaaagcgcaacacgactaaggaaacaatgtc

SEQ ID NO: 118970 - DNA, 1696 bp, Zea Mays
atgatacggtcaaccatctggccatctactggatgcattttacgagatctgggaatggcgagcgcgctggagacgctgtgcgggcaggcgttcggcgccaagaagcaccacatgctgggggtgtacctgcagcgctcctggatcgtgctcctcatcttcgccgccgcgctgacgccgacgtacatcttcatggaggacctgctgctgctgatcgggcagtccccggagctgtcgcggttggcggggcagatgagcgtgtggctgctcccgcagcacttcgccatggcgatgctgctcccgctcacgcggttcctgcagagccagctgaagaactgggtgaccgcgatcaccgcggccgtcgcgctcgccatccacgtcgtcgccacctacgtgctagtgcgtctcctcgacttcggcatcgtcggggccgtcgcctctgcggacatggcgtggtggttggtcgtgctgggccagtacgtctacgtcgtcggcggctggtgcccgctgtcgtggaaggggttcaccatggaggcgttcgccgacttctgggagttcatcaagctctcctcggcctccggagtgatgctctgcttggagaactggtactaccgagtgttggtgttgctgacagggtacctggacaacgctgaaatcgctgtggatgcactctccatatgtcagacgatcaacggatgggagatgatgatcccgttcggcttcttagcagcaaccggggtgcgagtcgcaaatgagctcggcgcagggagcggcaaaggtgcgcgcttcgccatcgtggtgtccatcacgacgtccgtggtgatcggcctcgtcttctggtgcctcatcctctacttcgacgacaagatcgcgcttctcttcacgtccagcgcggtcgtgctcgacgccgtgcaccacctgtccgtgctgctcgcattcaccatcctgctcaacagtgtgcagcccgtcctctcaggggtggccgttggttcaggatggcaagcactggtcgcctacgtcaacgtcggcagctactacctcatcggagttcccttgggtatcatactcggttggccgctgcacttgggagtagggggaatctggtccgggatgattggagggaccgccgttcaaacgctcatactggcatacctcactgccaaatgtgattggcacgaagaggcgaagttagctagtatgagaatgaagaagtgggccgacgagtcgaaataaacccactccactgctgcgctttgtttgttagccaggcacacaggggaacggaacccctgaagctaagataacttctgatacagcgctatgcatattccggccttcagacgccgttccctgcagcttgctacagtaaaatgaagccccaggtttctgacgatggtgtacggaaagctcccatagtggaattgcgtaccgcgcgtgtcaaaatattgttccactatagctaatatgggacaggacattcatcgtttttttttcttctcatcatcgtattgttccactataggcatgcctggctctcactaggtcaacaaggctacacttgtcctaattgagtacatacgacacaaaatatttggttgtcgtaaggataattttaaagtacagtttcggtgtcaaaatattgttctactatagctaatatgtaacaggtcattcatcgccttttttcttgtcatcgtcg

SEQ ID NO: 118971 - DNA, 1576 bp, Zea Mays
cacgacatatatttgtagtagttgtacaacatttggctactcgcagttactaattaataatgctgcaagcgcagtaaaaatggaagcacgtgcgcaatcagccatggtaaaaaaaacagtttaattaacttgatgatgtacctagctgggaatggcgagcgcgctggagacgctgtgcgggcaggcgttcggcgccaagaagcaccacatgctgggggtgtacctgcagcgctcctggatcgtgctcctcatcttcgccgccgcgctgacgccgacgtacatcttcatggaggacctgctgctgctgatcgggcagtccccggagctgtcgcggttggcggggcagatgagcgtgtggctgctcccgcagcacttcgccatggcgatgctgctcccgctcacgcggttcctgcagagccagctgaagaactgggtgaccgcgatcaccgcggccgtcgcgctcgccatccacgtcgtcgccacctacgtgctagtgcgtctcctcgacttcggcatcgtcggggccgtcgcctctgcggacatggcgtggtggttggtcgtgctgggccagtacgtctacgtcgtcggcggctggtgcccgctgtcgtggaaggggttcaccatggaggcgttcgccgacttctgggagttcatcaagctctcctcggcctccggagtgatgctctggttcgtgttgcattgtcgtcgtcgccgccgtccatttcgtagcttaattagtttctctagcttcatgatttgctcacctgcttgcagcttggagaactggtactaccgagtgttggtgttgctgacagggtacctggacaacgctgaaatcgctgtggatgcactctccatatgtcagacgatcaacggatgggagatgatgatcccgttcggcttcttagcagcaaccggggtgcgagtcgcaaatgagctcggcgcagggagcggcaaaggtgcgcgcttcgccatcgtggtgtccatcacgacgtccgtggtgatcggcctcgtcttctggtgcctcatcctctacttcgacgacaagatcgcgcttctcttcacgtccagcgcggtcgtgctcgacgccgtgcaccacctgtccgtgctgctcgcattcaccatcctgctcaacagtgtgcagcccgtcctctcaggggtggccgttggttcaggatggcaagcactggtcgcctacgtcaacgtcggcagctactacctcatcggagttcccttgggtatcatactcggttggccgctgcacttgggagtagggggaatctggtccgggatgattggagggaccgccgttcaaacgctcatactggcatacctcactgccaaatgtgattggcacgaagaggcgaagttagctagtatgagaatgaagaagtgggccgacgagtcgaaataaacccactccactgctgcgctttgtttgttagccaggcacacaggggaacggaacccctgaagctaagataacttctggtaaaaataaaatacgcatcatgcttaggagttacttatctgtaaaaatgaatcaaaagcgcaacacgactaaggaaacaatgtc

SEQ ID NO: 118972 - DNA, 347 bp, Zea Mays
aaccaccagcactggtgcgcgcaccaagaagctctgggttgtgacctcgcccggcaaagtctgccagatggcacgcaccacgggcaccccggtcgcggggccatcctctccaccctgctcggctccgaagtggtgacccctggtgctctctctctgcgctcgatcatggtggcgaccagagcgcgcttcttcctctccccaacccgtacacgaatttctggagcctcggtaccactggatgtgggtagggctcgcgtacagatgatcgtggagaactctgcaaccacattttatggaggaggtcgaggtcgcgctgagctaggagtttgttgcggccatgcgagatc

SEQ ID NO: 118973 - DNA, 998 bp, Zea Mays
accaacttgccaagccttgcacagacacaaaacctatacgaactttcggtttttggaagcactatgaaagtatggaaactcccatgagaaaactcagtttacatgggaacgagcaaacctcaacaagcgccacttttactgtcactaataacaaaaaagtccaaaattccaagaaaggtgatcatgcacactggaggtctagaagcgctcatggcacgacacctgctgccatagctggagcagcagcaggcttgctcgtttctacagcgagatgatagtctgtcaatctcaaaggcaccaacgagtgccttcaccttgctcttcctcgccttagcgactcgatcatgttgttgaacagccctaactcctactttttcgtctccttcccatcctaccaccaccgcagcacgacgacctcggcacccgcgtctctcgctacagcatcgtcgccactcctcctacttatgatcctgccacatctgctcctggatgtcgcgtctgccacgactatggaaggcctgaatcggagccattttggggtgctgccactgctctcttcagggttcagtactttgccccgccggaacgtcaacttgcgaggcgactgcgcttgtagcaccgtagcagggtgctcaagggggtcaccggcgcaggctttggcctccttgcagtgtcgattttttcagtgtcgattttttttttgttgggtctgatctctttagtccctagtttccgcactttcggtgaagccgtcttcaaaattctctatttagcatccttagcatcaatactataattttctgttccagaaacctttttgctgctaatgcttgggggatcaattttctcttttctaactgttcaaaaattgatgtaggatcaattatcgcttccctataggataattttagaaagcaaatcagaatgcaatcaccagacaagatttgagagcacatgatattatataccaggtatagaaaccaactatcaagaaaaac

SEQ ID NO: 118974 - DNA, 1136 bp, Zea Mays
ctgtccttgagctacttactagcgagggacagaggaaagatgagaagtaagtgcgccatggccatatcatcctccacctcgcgaacacaagatctggtgccattgctgtgtctgttgctaatggcagcagcagcaccacagcatagttgtgcgtcgccgccgttgcctgtgacactcccagggtgccccgacaagtgcggcaacataagcatcccctaccctttcggcaccaaggagggatgcttcaaacccgacttcgaggtcctctgcaacgacagcttccatccgcctcgcgccttcatccagatggcgggagcgaagatcaccgtcgacgacacgtactacaagaccaacgaggacggcatgccggacaatgatatcggaagttctgaatggccgatcgagctcgtcgacgtgtcggtctcggaggggaaagcgcgggtgctcggcgccttcagctacgactgcaagatgaacgacacgtaccacgcggtgaggcggcaggagatcgacttgggctactggatgccgttctccatgtcggacgccgatgatgtgctcatgggcatcgggagcaacgtcgtcgccaagcagacatccggaccgcagtgccagtcctacctcttataccagctctccaccaggaagaccgacgaccccgtcaacgggtcttgctctgggcagggctgctgcagcgccaaccttcgctctggtggcatggccgccaccgaggtgacaatccagaagaacaccaaagacgacggcggcttctacggcgacggtgtctcctgctcgtacgccatgatcgtggacaagtcctggtacaacttctcgtcgccggatgtcgacagcgacgctttcctacggaggaacgccgcgggggtccccgtcgtcgtaaacttctccttcggcgtagatggctgtcccaacgccagcgaaccaacgccagatgacttcgcctgcgtaagcaactacagcacctgcatcgagcgaccacccgtcctcgacaatgtgtccataccgtacttctgcagttgctcggctggatacgaagggaatccatacatccatggaggttgccaaggtatatattatcgaataattagggagtttctatattaaattatgcatataca

SEQ ID NO: 118975 - DNA, 1308 bp, Zea Mays
ctgtccttgagctacttactagcgagggacagaggaaagatgagaagtaagtgcgccatggccatatcatcctccacctcgcgaacacaagatctggtgccattgctgtgtctgttgctaatggcagcagcagcaccacagcatagttgtgcgtcgccgccgttgcctgtgacactcccagggtgccccgacaagtgcggcaacataagcatcccctaccctttcggcaccaaggagggatgcttcaaacccgacttcgaggtcctctgcaacgacagcttccatccgcctcgcgccttcatccagatggcgggagcgaagatcaccgtcgacgacacgtactacaagaccaacgaggacggcatgccggacaatgatatcggaagttctgaatggccgatcgagctcgtcgacgtgtcggtctcggaggggaaagcgcgggtgctcggcgccttcagctacgactgcaagatgaacgacacgtaccacgcggtgaggcggcaggagatcgacttgggctactggatgccgttctccatgtcggacgccgatgatgtgctcatgggcatcgggagcaacgtcgtcgccaagcagacatccggaccgcagtgccagtcctacctcttataccagctctccaccaggaagaccgacgaccccgtcaacgggtcttgctctgggcagggctgctgcagcgccaaccttcgctctggtggcatggccgccaccgaggtgacaatccagaagaacaccaaagacgacggcggcttctacggcgacggtgtctcctgctcgtacgccatgatcgtggacaagtcctggtacaacttctcgtcgccggatgtcgacagcgacgctttcctacggaggaacgccgcgggggtccccgtcgtcgtaaacttctccttcggcgtagatggctgtcccaacgccagcgaaccaacgccagatgacttcgcctgcgtaagcaactacagcacctgcatcgagcgaccacccgtcctcgacaatgtgtccataccgtacttctgcagttgctcggctggatacgaagggaatccatacatccatggaggttgccaagacattgatgagtgcgctcggccacacatgtatccgtgctacggtggcaaatgcaagaacacgccaggagactacgaatgcagctgcccagccggaacaaaaggaaatgcaaaacaagcgccatgcaccgacttgtttcctctgcctgcaaagatatccgtaggtgagatactacaaagaaaagaaaaaaaacaaactatcaaggggaaatgcaaaattaattga

SEQ ID NO: 118976 - DNA, 2446 bp, Zea Mays
ctgtccttgagctacttactagcgagggacagaggaaagatgagaagtaagtgcgccatggccatatcatcctccacctcgcgaacacaagatctggtgccattgctgtgtctgttgctaatggcagcagcagcaccacagcatagttgtgcgtcgccgccgttgcctgtgacactcccagggtgccccgacaagtgcggcaacataagcatcccctaccctttcggcaccaaggagggatgcttcaaacccgacttcgaggtcctctgcaacgacagcttccatccgcctcgcgccttcatccagatggcgggagcgaagatcaccgtcgacgacacgtactacaagaccaacgaggacggcatgccggacaatgatatcggaagttctgaatggccgatcgagctcgtcgacgtgtcggtctcggaggggaaagcgcgggtgctcggcgccttcagctacgactgcaagatgaacgacacgtaccacgcggtgaggcggcaggagatcgacttgggctactggatgccgttctccatgtcggacgccgatgatgtgctcatgggcatcgggagcaacgtcgtcgccaagcagacatccggaccgcagtgccagtcctacctcttataccagctctccaccaggaagaccgacgaccccgtcaacgggtcttgctctgggcagggctgctgcagcgccaaccttcgctctggtggcatggccgccaccgaggtgacaatccagaagaacaccaaagacgacggcggcttctacggcgacggtgtctcctgctcgtacgccatgatcgtggacaagtcctggtacaacttctcgtcgccggatgtcgacagcgacgctttcctacggaggaacgccgcgggggtccccgtcgtcgtaaacttctccttcggcgtagatggctgtcccaacgccagcgaaccaacgccagatgacttcgcctgcgtaagcaactacagcacctgcatcgagcgaccacccgtcctcgacaatgtgtccataccgtacttctgcagttgctcggctggatacgaagggaatccatacatccatggaggttgccaagacattgatgagtgcgctcggccacacatgtatccgtgctacggtggcaaatgcaagaacacgccaggagactacgaatgcagctgcccagccggaacaaaaggaaatgcaaaacaagcgccatgcaccgacttgtttcctctgcctgcaaagatatccgtggcataggtggacttttcttaatagcactaatggtattcgtagttcttattcgtaacgagaaaaggaagatggcagaatttttcaaaaagaatggaggccctacattagagaaagcaaaaataataaagatttacagaaaggaggagctgaccccaatcttgacacgaagtaattttattggacgtggtgcttttggtgaagtttacaagggcctgcttgacaatcagttagttgcagtaaagaagccaattgatggcaatgtagcacagaatgatcaatttgccaatgaagtcattattcaatcacaagtgatccacaaaaacattgttaagctaataggttgttgcctagaagttgataaaccaatgcttgtgtatgagtatctctccaaagggagcctggatgatattcttcacggaagcagtggcgttctattaactttggagcaacgtttaaatattgctgcagaatcagcggaaggtctagcttatatgcattcgaaaacaggaaaaataatattgcatggtgatgttaaaccggccaatatacttttgaacgattgcttcacaccaaagatctctgactttggcatatcaaggctaattgttatagataaagaacaaacagatcatatcattggtgacaggacttatatggatccagtatatctacgagatggcatactaactgataaaagtgatgtctacagttttggggttgtgctcttggagctcataagcaggaagaaggccacgtattctgacaacaatagcttggtaaggagttttctcgatgctcacaaaaatcaaaaggaggcaacagagctatttgataaagaaattgcaaaaccagatgttttaaagattcttgcaagtgtttatgagattgcagtgagttgtctaaatcttgatgcggacgaaagaccaaacatggcacaggtagaagcaagtcttctgaagttgaaggcagatcttggtatgataaattgataaatctcatctaccagtggttagatttatatatatgttacagtttgaggttgcattataatattatattgtatttctcaaataagtaactattagtgtgatctgccactattggacttatatatattagagattgaggctgagttagtgtaataaggtaaatggtactacttattagtgtgattgtgtctacatctactgttaaaacaaaa

SEQ ID NO: 118977 - DNA, 1401 bp, Zea Mays
gtccttgagctacttactagcgagggacagaggaaagatgagaagtaagtgcgccatggccatatcatcctccacctcgcgaacacaagatctggtgccattgctgtgtctgttgctaatggcagcagcagcaccacagcatagttgtgcgtcgccgccgttgcctgtgacactcccagggtgccccgacaagtgcggcaacataagcatcccctaccctttcggcaccaaggagggatgcttcaaacccgacttcgaggtcctctgcaacgacagcttccatccgcctcgcgccttcatccagatggcgggagcgaagatcaccgtcgacgacacgtactacaagaccaacgaggacggcatgccggacaatgatatcggaagttctgaatggccgatcgagctcgtcgacgtgtcggtctcggaggggaaagcgcgggtgctcggcgccttcagctacgactgcaagatgaacgacacgtaccacgcggtgaggcggcaggagatcgacttgggctactggatgccgttctccatgtcggacgccgatgatgtgctcatgggcatcgggagcaacgtcgtcgccaagcagacatccggaccgcagtgccagtcctacctcttataccagctctccaccaggaagaccgacgaccccgtcaacgggtcttgctctgggcagggctgctgcagcgccaaccttcgctctggtggcatggccgccaccgaggtgacaatccagaagaacaccaaagacgacggcggcttctacggcgacggtgtctcctgctcgtacgccatgatcgtggacaagtcctggtacaacttctcgtcgccggatgtcgacagcgacgctttcctacggaggaacgccgcgggggtccccgtcgtcgtaaacttctccttcggcgtagatggctgtcccaacgccagcgaaccaacgccagatgacttcgcctgcgtaagcaactacagcacctgcatcgagcgaccacccgtcctcgacaatgtgtccataccgtacttctgcagttgctcggctggatacgaagggaatccatacatccatggaggttgccaagacattgatgagtgcgctcggccacacatgtatccgtgctacggtggcaaatgcaagaacacgccaggagactacgaatgcagctgcccagccggaacaaaaggaaatgcaaaacaagcgccatgcaccgacttgtttcctctgcctgcaaagatatccgtagttttggggttgtgctcttggagctcataagcaggaagaaggccacgtattctgacaacaatagcttggtaaggagttttctcgatgctcacaaaaatcaaaaggaggcaacagagctatttgataaagaaattgcaaaaccagatgttttaaagatt

SEQ ID NO: 118978 - DNA, 323 bp, Zea Mays
atacttgacagcattgcgaaggtgactggcatcataaagtttgatctgcatgttgaaccggaaagtggtatgaaagaaattgaagcgggaggaaatttacaaggcatatatgacctgggacctagtagatttggttcagaggcgatttttgttcccaagcatctaggtgtgtctggagaataagatgacagatatttgatattctttgtacacgacgagaacacagggaaatctgaagtaaatgttatcgatgcaaagacaatgtctgctgatctagttgcggtggttgagcttcctaatagggttccttatggattccatgc

SEQ ID NO: 118979 - DNA, 105 bp, Zea Mays
attgtgtttgccacatcatttgtggcactaggacctccttcaaccttcagggggaaaaacatttcagatggactaagattacaaggatggattaagaaagagagc

SEQ ID NO: 118980 - DNA, 766 bp, Zea Mays
gtcccatctctctggatcatcgtcatttgaatagatttcgtcgtcaatagcaataatatcaggacatcgtatgcttctggaccgtcgatcttggaatgcaagtcatgccatggttctcttgggccgcgagcatcttcaacctgagagtaaattatcggcacatgaggatctaacaaaatcgcaacaagcttcctgtctcctgataaaggaaaaacaaaatggaacaaagttccagaacaacaaggatggaattcttttgtggccattgcataaggttcttagtaaattcagtttgatacggtaaatgtggaaaactacgctcaccgcaaaatttgggttgtagtagtcttccttgtgaaatgtctgaagagttcgaaatagagtgtgctttggtgtatcatatcggcctccacatagatcaagtcctcccatgaaagcaacgatcttccttctatgattcccagcatcagcatccaagatcactgtcttctggtgatgagtaaggatagtgcctgtttcctggaaacaatggttattacaatcaatgcagattccagattgcagtgtgcttatgtggttgtcagacatcacaatagtttaagctgaagtataagacctgttgcttcacccagctgtgcctcttccctgcagatcgtgggcaaagcagtatctggactgaagagtgcttgaaaaatctccgggtctcctcatcccttgtgcccatgtaaccttcctacaggcaagaacccaataagcaaacaggctt

SEQ ID NO: 118981 - DNA, 1153 bp, Zea Mays
atggtcgggcgtcgtcgtgttgccttggacttatgcggtgttcggcacaccagcatttcgaaactggctaccggattgagtggtttcattgcgcagaagaggaggacagtgtgtgtgtttaagctgtcagaggtaaggctcggcaactgctaccggcacggccagtgccggcgcgacgtctacgatgccatatgccaggcccagaggctcatctacattatcgggtggtccgtgttccaaaccatccacctactgcgcgatgaccacgacgacatggcgctcggcgacctgctcaggaggaagtcgcaggagggcgtgcgggtgctgctgctcgtgtgggacgatcccacgtcccgaagactccgtggcatcaagatggaaacaggcactatctttactcatcaccagaagaaagtgatcttggatgctgatgctgggaatcatagaaggaagattgttgatttcatgggaggacttgatctatgtggaggccgatatgatacaccaaagcacactctatttcgaactcttcagacatttcacaaggaagactactacaacccaatttttgcggttgaagatgctcgcggcccaagagagccatggcatgacttgcattccaagatcgacggtccagaagcatacgatgtcctgaaaaactttgaggagcgctggttaaaggcatcaaagcgtagtgccgctaggaaactgtcaaaattgtcgaggtcgcataatgattcgctgctgtggatcaacaagatacctgatattattgctattgacgatgaaatctattcaaatgacgatgatccagagagatgggacgtgcagaatcttgtttgtgggaaaaatgaactgattgatatgagcgtgcatacatcatatgtgaatgccatccgaggatcagtgtattatctcttccataaacctttagtcatgtaccaaccccagcatacatgggcaaatatgctttctgctcctcgtggacagaacaacatgggaagaagtggtgatgacagtccatcgccgccaagaggtcacaagagaagaactcgcagcccaagtcctcgtggtagttatggaggccatggcaagcgccccacaactaatcttatggtgacgaatcttggtccggattgtaggtaagattctc

SEQ ID NO: 118982 - DNA, 858 bp, Zea Mays
gcaaaccctggcgaagggggccttgatagcggccggtcactctggccgcgtcaaccggcgcgtccaatcacatctgccgatccacgatcagacggccagtggctcgcgggacgcctcccaaacgccggatccatccacgcgttcggcaatgctcgcctttcctgcaccagtcgcgacagtccgcctcctccattcccgctccggctgtctcaattttggcgtaccaccgcgtgcgctttcccgaaatactttcgccatctccccgatacaaagcacgaagtggagagggcgcggcacagccaggcagccgcacggcacaactgcaccgcactctgcctcctccgcccgtcctccccccttgtcctcctccgctcggcactgccgcattctgctcttttagccaaacacgcgcaccagcccaccgcccagccggaccagagaggcggagactacagcgccggcgtcgcacggcaggagagggagacgcagccggaaaaaggcgcagactttgacttgctggtgtccggtgggagtgagatacgccggtacagagccatggcaccgagctgctacgacgtggccgcgtccatgctcctctgcgccgaggagcacagcagcatcctgtgttttgaggaggaggaggaggagttggaggcggtcgggagaaagagaggccggtcgccgggctatggggacgatttcggcgtggatttgttcccgccgcagacggaggaatgcgtggccggtctggtggagcgggagcgggagcacatgcctagggcggactatggccagaggctgcgcggcgacggcgtcgatctctgcgtccgccaggaggccatcgactgtatttggaag

SEQ ID NO: 118983 - DNA, 573 bp, Zea Mays
atggcggggcggctgcgacgaccaggcgctcgatccacaggagggaggaaggaggagaagggctcacccgcgggatggagctccggggacggacgacgattccggacgggtgacgcggctccaggcagcggcgctgctgcacgggcgggctgcgcggacagcgggctctggcgaacgacgcaactccagtgtggcatgatgtgtcctagggtggtatctccatacgcgagctcctacacacctgctgctacatggctcgaggagagaggtggcgtgagggagaggatctgggtgagtatggcaaggagaggcgctgagagttttctcaacttgggtcggcatgggcggttccacgaacaagtgcaacgtgagcgccggatggagtggacgaacggttggagaagaagtcggggctggtctggtaggtggggctcgggttgcagcggcagcgggcaccgcgccggactggcgctgggtgtttacgagttgggccacaggggaaaaccaagccgggactgggagctgggtcgtgtggctgagctggcgctggtcacgcgcggggtggatatctaa

SEQ ID NO: 118984 - DNA, 999 bp, Zea Mays
caggcttccaacgtacgaagcctgtcgtcttcctccccacgccatttccctgtcgacgctccctcctagcgtcttcccccttcctctgccagcgctcaggatgctcttcgcttcagccatggatgagactcctacgtgccactgctccagctatggacaccggggcgcccttctctggcccatggccaccagggagcgacagctcttccactgctccctcacgccagcagcagatcactagcgccctttcttccacctccggcccgcagggatctcctccctctcccatccatggtcccccaaatctccaaccggagctccgaaggccgcctccctggtgcacctcgccagcagcagggatctcttcccttccccaggcgcagacgagctcctacctgtccctacgacttccatggccgccggcccctgggagctccatgctccacgcgccctcaaccatggcgcgatgtctctgctcctcccatccatggcgtccgacctcctctccgtctcctcaagcaggtcgggaaccttttcctggcgccctcctctaccggccagcctcccccttccctgctctccccttggatgcgacctctctgcccagcgccacccctcccttcctccctttctgtggcgagcgcgggttccccaagcctcgacgctcggcactctgaacagggacgcccagatccttgcctctctgttccacgcacctggccctacctctccatcaagctgctctccaggccaaatgtcccccatgctgccagctctgcacccatggcgagcagccctcccggcagcgagctcctctgtcggcccccatcccctagcagcaggaagcctccctgggcgcttgtttccccgacgctcgccccgtcaacagacgtcgacctcgcacagcagcagcgacgcccttcgttgcgtcgcgctcgccagaacgggcctcatgtcgtcgatctacgcagcgtctgcgcgtcgtcgtcgaaacccgcg

SEQ ID NO: 118985 - DNA, 1388 bp, Zea Mays
caggcttccaacgtacgcagcctgtcatcttcctccccacgccatttccctgccgacgctcccacgccattgctctccctcctggcgtcttccccttcctctgctagccctcaggacgctcttcgcttcagccatggatgagactcctacgtgcctctgctccagcgatggacactggggcacccttctctggcccatggccaccagggagcgatagctcttccactgctccctcaagccagcagtggaccaccagtgccccttctaccacctccggtccgcagggatctcctccctctcccatccatggtgccccaaatctccagccggagctccaaaggccacctccctggcgcacctcgccagcagtagggatctcttcccttccccaggcacagacgagctcctccctacccctacaacttccatggccgccggcccctgcgagctccttgctccacgcgccctcaaccatggcgcgatgtctctgctcctcccatccatgccgtccgacctcctctccgtctcctcaagcaggtcggggcccttttcctggcgccctcctctaccagccagcctcccgcttccctgctctccctttggatgcgacctctctgcccagcgccacccctcccttcctccctttccgtggcgagcgcgggctccccaagcttcgacgctcggcgctctggacagtgacgcccagatcctcgcctctctgttccacgcacccggccctacctctccatcgagctgctctctaggccaaatgtcccccatgctgccagctctgcacccatggcgagcagccctcccggcagcgagctcctctgtcggcccccatccccaagtagcaggaagcctccctaggcgcttgttcccccgacgctcgccccgtcaacagatgtcgacctctcgcagcagcagcgacgcccttcgctgcgtcgcgctcgccagaacgggcctcacatcatcgatctgcgcagcgtctgcgcgtcgttgtcgaaacccacgcccttgtgacgtcatgcctcgcgcatcgctcgtcggcaaagagcccaaactaatgacatacatgcgcgacgcgattcggccaggttgttcgccttgaatgattcgcgatttattttatttacgtattcggtcgatgatgtgtctgcatgtttatatgtgtgtgaaaataaaattgtatgaatggacacgtgtaaagaagaaaaggaagtagaaaagaactcagatgtttttatattttgataggaaaattatgcgatgcgttgtttgatgcgaaaactaagttacaaaatgcggattatgttttgggaaatgcatcgatatgtgtttatgtgaaaagtgtaattgttttatacaatgtgatggtgttcgtgatt

SEQ ID NO: 118986 - DNA, 84 bp, Zea Mays
atggagcaagcaagtagtaatagccacatttcggaaaacctagaagcggccatcatttttctacgtactatatacatgttgtaa

SEQ ID NO: 118987 - DNA, 1282 bp, Zea Mays
ccccccctgcccatcatctcctctcttaatttttgcagcaaccaaaccctagcccccccccccctcaatcccctcctcccaaggtgccaatccttgccgctcggatcgtcgtctcgtggagcgtttctccaaccgttttggtggagggaagaagggaggaaggaaagggggagaacccaaggtggtggacttccggatcgttcttagggatttggcccaaacttcggtgaaggcaagtaaactgtgatggttattccgtctgtcagatgaggagtcttatacttgtttttgttgtgctaacatgttcaaattcatattttcttttgagtaccatcatttgaaaatgttcatgtttcatggatttcgtatgttgagtttgaggtttgattatgttactcaagtggttattatgtggaatggttggaagtaaatgcctagcacatttttatttgggaagaacttatgatgttgtcatgcataatgcactcatcatccattgcattgaagtttcgtcgcgatcttatggtccgaccgtaccggtacattgagcatcatatgttgcccgaggaggggtatggtgcagcttcatatccttagagatatggaggcagaagtcattattgcatttgtagccatgtgcattcatgggagaggtgttgattctattatgtggatgtggataatttggacttgtgcatggtgattctacttggcgttgagcttttagttacttgtttacttgctgcaatttactattcaaaagaaaagaaagaagtcctgaacacgtggttgtgtaagcacagttgatttacaatgtcctatttgttgttgttatgtttacttgctgagatgtgttatctcacatcttgcattgtttgatgcaggcacctaatttctgctttgggaatagagggatgtagcagcacggccactacacctttaataaaggaaccaccatttaataatgttgttaatcagagttggacaagtctagtgaattgctttgttcttggttgagcgtttattttggggtgggctgagtttcttatcccatttgttttgcttcagttgggtcataattaagttttaccacttttgcatttcagtttctactatgtgaattatatgtctttatatcttgtatgagcttcatgtttcccctccttgttatgctagttttcaaaggaggtgctgccggattttgctatatattctttctttattacttctcttgtgttgagtaagtttggtgggtggggtttgtggtattatccattgtatg

SEQ ID NO: 118988 - DNA, 748 bp, Zea Mays
gagttcatacaaatgactttattgattcgttgtgttaacttgtcttatggaaagataaacattgaggagtattttttggggttcctgaaggtggatgacacatctggtttaggcatttttaatatattgattgatgctatggagtcatttggatatttccttggtcaccgctgcctacagacttcggcttcttccctcacgtccctctcttcccaaccgctccttccagccctcacctcgccggtctggcggtctctagcacctcggcgttgtctctgtctcagccggccgctcgaccctagcatctgctcgcttgccttcactctgtccccagcttgccccgaggtctgtcctctatgtgtttcttcaagctcgccatggctggcttcggatcctgctcgcgagtttcctcagcgccgtcagcttgccggcctccagctcgcctgtatcatggtcgtcgcgccgtctttgctcgttgggtcttgcgttgccgcgcacacgtgccggacacccctgcttctctgttggctgcgcgcgccggactacgtccttcgcagctcgctggctttagctgcaggacaccaccagccgtgccttcctcgactcgtccacagcgtcgctcgtgaggtgctcgacgtaatggcggaattacgtaatggcggaaatgaaaatcgtagctgtgctcgtgacctttgagataaattaaattattggtgagctatcatcgctctcgctcttcgttttaata

SEQ ID NO: 118989 - DNA, 646 bp, Zea Mays
gcccaagcccttcttcttcctcaagccagcacccttccctcccttggattccctgctcgccccaacaagggaccatcgcgcagagcgccatcggcctcttcagcgcgctctccactgccccggtgtttccccctgctatctcctccccatggtcgcccgcatttccttgctgcggctccttaccaaggccagcgcccctctcctgcttggctccctctccgcagcagcagctctggatttctgtatgccgacgtggaactgcgcagtgccccatggtgctagcagggtgctcgacaaaatgcgcagcagccctgacatctccgcgcgctgccagctcgctgttttgtggaggcaacgaacagcacgtcgggttgccccttcccgggttttcgctgtttttgcgcagccccaacatcgacgacgttcacccccggtgagaccacgacgattgttgttcgattccacatcgacattgttttcctatgattaattatgtatgtgtgctgctttgttttatttttgtggaggagagaaccccgtgttttgcgtggagaaggaaagccgctcgacgctcgtcgatgttcgtagtgatgcacaaatcggaatcgccatcgtcctcacaaacaccgattgggtttgtttatgg

SEQ ID NO: 118990 - DNA, 877 bp, Zea Mays
gagagcctccctgccagtgccggactgccagtgtactgtgactgcgagggatcacctccgactccgactcagatccaaccccgaccgatgcgagcgccggcgatgcaccgctgggccgcggcggcgctcgcagcgttcctcgttgccttgccggctgccgccttctacctccctggcgtggcgcccaatgacttccacaaaaaagatccacttttggtgaaggtgaataagctgacatcaacaaagacacaacttccctactcgtattactctcttcctttttgcaagccaaacatgatagttgacagtgcagagaatcttggagaagttctgcgtggtgatcgcattgagaactctccttatgtgtttgagatgggggagcccaagatgtgccagattatttgcaaaacaaaaattgatgataaacaaacaaaggagctcaaggaaaagatagaggatgagtatcgggtgaacatgattcttgacaacctcccactagttgtttctattgcaaggcaggataggggtgctactgtttaccaggctgggtgtcaagggccaatatgctggtaacaaggatgagaaatcctttatccacaaccacttgacatttttagtgaaataccacaaggatgaaactacagatctctctagaattgttggatttgaggtcaagccattcagtatcaaccaccagtttgaagggccgtggaatgataaaaccactcgtttaatcacatgtgaccctcatgccagcaagcttgtggtaaactcagatactcctcaggaggttgaagctggaaaggaaatcatatttacctatgatgtgggcttcgaggtgatatttctcacatctgcttctctttttgtgctctaa

SEQ ID NO: 118991 - DNA, 495 bp, Zea Mays
atggccagggagctcggcacagtgccggagccggaggccgagcggggagagagcgccatgggagatagcagggagagcgcgcgacgcagaggcgagcagggcacgaactgggcagagtcaagccagggagcttcggatggggtcttggcgagagagctcggccggctggcagaagctgggaagccgcgacgccggaggagcaggggatatgggcgcgcgcgcacagagcacatggagatgggcgccgagcaggaacgcggcagggaggagctggggggagagctccgcgcgtggagagcagagaggacgactgcggcgctggaagttgggcgcaaaccaagctcggcgagcagggaagacgcacggctagggaggggaagcaggggcgcggccaggcgagccagggagctcgacggtggccgggcagagggtcttgcggcagcacgcgcagggagctcggcaggaagatggcaaaaaaatcccagttgtggctga

SEQ ID NO: 118992 - DNA, 1278 bp, Zea Mays
gaatgtcaccttctgttttgcagttccttcaaatgccagatagcccactggagacaaggtcacaaagatgaatgtcatccaccaactgttaatactaggcccgatgatgaaggaaaggctgaagagggaagagctgcccaagagaatgtatcagttggtgttaaacaggtttctgaaatgaacaaaccagctgttggatcagaaacttctgatttaaaccataatttgaagagctcaaatggtaaaagtaaacatacgctttcagaagcagtatgtaccagtgcaaaggttcctggaggtcatcagtccaacagcacggtcgaaatttctgaaaatgttccagtgtctgttgacagtagtaagatgggatcaagtatgaaacatgcaaatgcaaattttggtgaagatggttcttccaccaaggacttaaatggggtgtcaccatgtaagtctcagtcttctccatcaaacataaatggtcatagcagttttgtaaacgatgaattctgcaatcattccaaggaacaccaaagagccaaggatggcagtgttgttgatgattgtcttcagacaagcagtaccagagagcttgaagacagtagcattccccaagcagctgcatatgctgtcttggagcccaaaagttctaggactcctattcatgtagaacttgagaggtctaaaacgaaatctgttggtaatgacagcattcagagcatgaaacctgtgccttctgcattgactgttgacaaagccacttcagttcgtgggaattgttctattacacttaattcatctaaagtagcagataatcttcctgatagaaattttgaaccttcagataggtcaggttcaacagcgaataaccttgcaacatctctgaagaaaatggtcaggcagcaaactgcaccaaaagttgtgaggcattatccatcagaatctacactcttcccatatgaactttttgtgaggctctatgtcaaggttgagttgcgcccgtttggtcttcataacctaggcaacagttgctatgcaaatgctgttcttcagtgtttgatgtttactcgaccactcacaacatatcttttggaagggcttcactcaaaaaactgttctcaaaacggatggtgcttcatgtgtgaatttgaaaaactcattgtggagggcaaacggcgcaagattgccttgtcaccaactgggatactctctcatttgaatgacattggcagtagctttggtcctggtaaacaagaagatgctcatgaatttcttaggtga

SEQ ID NO: 118993 - DNA, 1755 bp, Zea Mays
gtctgtttgtaatgtttggtttggtccaacttggactcttctttccttcttaaatataatgatgcacatttctcctgcatgttcgagagaaaaataaaataaaatgtggcatgtttttgtgatgggtaaacaaaaaaacttagttgatcttagctatcttatttatgtgggagttctttgattgagcaacaaacttgatctgaatagaacaaaggcactgcccctacttttattgaaagaacagtacctgttctgtttacaggtatgcaattgatgctatgcaatctgtatgcacgaaggaagctagaaaaggaggtgttcttcggtcagcggaagaaacaactcttgtccaattgatatttgggggctatttgcgatctaagatcaaatgttcaaggtgccatgttagttctgaacaatgtgagcccatgttagatcttactgttgaaatagacggtgacattagttcgctcgatgaagcacttgtgcgctttacatccacagaagccttggatggagaaaacaaatatcactgcagcagatgcaaatcttatgaacgtgctaaaaagaagctgacaatagaagaagcgccgaatattctgactattgcactgaaaagatatcagtctggcaagtttggaaagatcagcaaagccatcagatttccagaaaccctcaacatagtttgctatatgaatccagatactgatgacatatcgccagtttacagcctctatgcagtggttgtccatcatgatgtcatgaatgctgccttctctggtcattatgtatgttatgttaaagatacacatggaaagtggttcaaggcagatgacagtcaggtgaaacctgtatctctggacaatgttatgtcaaagtgtgcttatatgctgctgtatgcaaggtgttcaccgagggcaccgagctctgttaggcaggctatttcggacccagcacgcccgaagaaggccaaacagaaggtggttccaggaggaacaacatggcgaggaggttctttcaacaggcaccaagatggtcagcggcatagcaaccacacggcagatgaccttacccatgcatttgacgaatataggaatgcaccatattcgccttcagattctccgagtcctagtgagagttcatccctctttagcaactctgatgcagggtcgcacagcactgtaagcaccgatagcagcgagagcacgaggaactcgaccagcaccgaggagtatgagtatgtgttcggagctgctgatcagatgtacccaggaggccccatgggaggagcacctgtggagagtgatcaaatgtacccaggaggccccatgggaggagcacctgtggagagtgactattctacgtattcccgatccaggtccagcttgaataccagctcatcaggccgggatgcatacagtgcggctagctctgccgaccacaagcatcaggtcgtcggttccggtgggcaggttgagggcgatgagagcacgtccttgttgtatactgacagaagtaatcagcagttgagcagtaagttaacagaccaatataggcagttagatgggagcggacatgaccctggagaaaccaggggcggtgtcttattgagaagaccatctagggacaggaccgctcaaacattttattgatgtgcagggtttgggctgtagagaaataatgtaatgtagcctgtaatattatctcgctgcattgtgtaaaaagagaagagagatgtcgtagtccataaaagtt

SEQ ID NO: 118994 - DNA, 1498 bp, Zea Mays
atgactcctagggtctggaaacaaaccatggagccatgaccactctgtgaccgaggggaccggcagcggcgtaaggagtcttcctctctaacgctggcaacgtcgacaccgctggcaagcttctctccggtttgatcctttctcatctgctctctacccctctctctatctttctacgtccagttgctgcacatccacatcggctcctagatcccgaccaccgccctgctctccgacggcgtcggcgaggccgcgcagatctactgtgagctcgcccgcctcaggttcctattccatctcgaattcggagtcttctctcgtccctatccccctccagcaccgccacagccgaaacctttgcccgacaacgcgacaagcagcttcaatccagttccttggaggtcgcgttagagcgtggttgaatctgacgaagttgaaagaccccctcactcgcgccgcctcctcgtccgtgaaggtcggcagcctggacccgacgttcttcctcatcaccggagggtagtccccgaacaccataggatgcatgaaccatccgatgtggaaatcgtccatccttgcggctaccgcgacatcgttgggagtctgagtcctaggatcgtaccaccaaccaagcaaggtcagtccaatccgtcctccttgctcagcttggtacttgtctctgtacagggacactgtacacgcgtgcacaagcaagcggtggtgcgccgctacgtatggctccatggtggagttgccttcctcgcagccgaagctgaagggggacgagcatcgccgtggtggcaggattccttgatcgtacccaccgatcgtctcgacgttgggctcgttgatggtgctccagtacttcaccctgtcgccgaagttgctgaagcacacgtctgcgtatgccgtgaagtcctctctgcgtcatcaagattgaaagtggcaagatgagtactatcttagcttaggaggccacgggaactgtgaaataaataagtacatacatgaatcatccgatcttctgatgatccgctgcaactttgaaaactaacgcagcgctgtttgttagataactctggctagtccctatcatttgagtttcagtctgagccaagttagtcagttagctagtgttcagttaggcgtcatttagtcagttagcgttcagccggaggttgttcgagctgagcgaatcacatggagaagagtgaccgtcattcagtcagttagagtctctgtgtttcagtctctgtgttttgttttcctagtattaatagagttcagaaaacgctgttacttttgagcagcaacaaaactcgtctctgtcagtgcgctctctgttctttgtttcagtgagttctgagagccgtgagatcctgtcgatctttgtttcatcactgttgacccccaactccaacgattgtccctgctccagtaagagtaggcgaggacgagcctcccccatcttgggtgttggtgcctgacccattttctcaag

SEQ ID NO: 118995 - DNA, 972 bp, Zea Mays
atgactcctagggtctggaaacaaaccatggagccatgaccactctgtgaccgaggggaccggcagcggcgtaaggagtcttcctctctaacgctggcaacgtcgacaccgctggcaagcttctctccgattgtccctgctccagtaagagtaggcgaggacgagcctcccccatcttgggtgttggtgcctgacccattttctcaagttttgctatggatatgagcaatagagatcaccttaggaggagggaggaggatgatgatgacctcttccttttgattctcccttccctacatctcttgggctatcttggacgtagtaaaaagaaattgaggcatacatcagcgctgaccggggaggaaaaggttcgagagctacttgaaggccatatcaagaactgcagggtatcatttagaatggaaccttacattttcaaatccttggccaactatcttagaatggaaggattggttaaagatacaagaatcaaagttgaggaaaaacttggcttcttcctatacatgattagccacaatgcgacatttgaagatctccaagtcttttttggtcatagcaatgatacatttcaccgtgtcatcaaacatttcttcgacattgttatccctggccttagcatgtggttcctaaagcctccttccaatcaagttcatcctaaaattcatggagacaaccgattttatccatacttcaaggtgacttcttttaactcttatgtgtccatcttagaacatcctcaatattagatcttagaagatcgtttctttttttttgcagaattgcataggttctgtcggtacccagaaactagggtaccccttactactgtgtaaagacacagtacccacgcggctttctttagtcgcgtggtaaaagagctgtatgtgggactaggccataactcgcccgagcatcgagcgactactctgggccagcaacagcgcctgaccc

SEQ ID NO: 118996 - DNA, 674 bp, Zea Mays
ctttaatccctggagttccatctcccgtagctgtacttggtcttatccgtgtacagagctcgttcatttctccaacacgacatccctctccagctcattccagcgcactccaccagttgctctctgccgcgcccctggcccctctgtccgagctcgttccatagccggcttcgagctcgccctgctcggtcatggcgtggacaccagacgagctccctggtgctcgcccctctccagccgagctcctcctatctctccctcgcgtcttcctctccctgccatggacgccggagttccgctgctcggccatggccgctgtcgagcttcctgctcgtgcctatctccctccatggctgcgcttcatcaagctctctgcgcgccgtgaagcccctgcgcgtcgcggtctcccaagctcgccatggctgccggacgagtctcttccgtctctgctcgacatcttcgagcttggttcctgcgcgcgcgctgcactgctcccatggcgtgttcctacgcccggctggatttccctgctgagctcggtcacatgcctgggcaccgtgttctgcacgctcgccggtttcctcgcctccatcagccgcggcaacatgctcttgctggggcccctagtcgcaactcaagttgtcttttcggctggccaccagcgtgtcgtctag

SEQ ID NO: 118997 - DNA, 207 bp, Zea Mays
taccttcagagaatttttgtgtcttgtatgagctatgcaatcatgacatgggcaaacaaaatccttggacctttgctagttgtcctctataacccactaaaaccagctttttccaccgacctctcaactatttttcttggtgccccagtttacacaggaaggtttggttccgctcactgcccaataattatcctaaatgtgattttc

SEQ ID NO: 118998 - DNA, 2041 bp, Zea Mays
gctgcggcctagctctctatccaaggcccaagcgcatccccgggggcccatcgtagccgtcctcgatctccctcgctccgcagcacaccactcgtagccgccggcaaggcgactgacctctttcctgctgccgagcgccatcgtctcctcggaccatctcacctcagagctgctgcgaccgccggccaacccgtctaggtcttgtccctgccgcttcctgagcctagaacatctttgcattttggagagtctccactcggagctattgtacagtctccatccctttcaacgagatggcacgtcagtctgctctctcgcttgtgagggatcgagcaaagacgggagcgctgaagcgtctgactctgagttcatcgaagacggctgggaggaactcgtctgggcgcatcacctctttccaccgtggtggaggggccaagaggttgcagaggaaggtcgatgtgaaacgcgacgcctgttccacgggtattgtggagcggatcgagtacgacccgaatcgctcctcgagccttgctcttgtgcgatgggtgcaaggggtgcatttccgccgccccaagagtccacaagaactcagtgccatgtctcaaatccaacaatctgctacagctgatgtctccggccggttttcccttgctgcattatctagtagagtgcataaagataaggaagcttctgcactgtactctgctctgggaaatggagatatttctgcatctcttaaatctggtgcgtcatcgagcttaccgaggatagctgtagctggtgccaagcccacattctttgctcaagccaaagcggatgaagaaggaaaacatacattttcctttactgagattcagaaatgggcaacagatgatgtgctttgggcacagagaatgaagcgtcaagctgcactctcctggcagaatgaactgaagaagaaacatttgcttaagacacaagctaacagcttcagtagcttggcagcaaagactagtggtacgagtaaagggccaaagggaaaggctgattgcataccagtgtcttatatattggccagtcaccagtgcatgccaggtagtacagtgatgaactataattcctcgaagccttctaagagttcagcctcttcaccatattccttggaaaatcagttcgatataattgatctcaactcaaaggttggaaattgtataccattagccaatgcacgaattggaacctgggtgcataatattgaatgtcgtcctggtcagggtgggaagatggttcgagcagctggtacatatgctaaggtagtccaggagccaggcgccaagtgtgtcctgcgccttccctcaggtgctgagaaggctgttgattcaagatgccatgctacaattggtatagtctccaacccaagccatggtacacgcaagctaagaaaggcagggcacagcaggtggttaggcagacgccctgttgtccgtggtgttgctatgaatcctgtggatcatccccatggtggaggcgaggggcgtactaaaggaggcaggccttcagtttctccctggggaaagcccaccaaagcagggtaccgatcaccaagtgtggccagtcggaaagcgtttgctggaacaaagctcatacagttcagaaaataaagaatatgtgtttgtggcagagggaactgtgataatcgacttgattctggtgcagcagaagaaatggttgttatcactccaatcgacaacacagaataaatgttttcactccaatggttgttatcgctacttttccccttttgtcattctgcagaaactagctcttcatgaaacctgattagtgaatttcttcctgtatttcttttgcttctttaacacttggcaaatttggctatggttccacggctctgattgagaagggatgctcttacctttttggtcaaggcctgtccaaaactaagaaacacatgttggtagtatgatttttctctctatatttcgcatgctgtctgttaagttattgtttacattttattgtggctatgagcgtgattggatgc

SEQ ID NO: 118999 - DNA, 1733 bp, Zea Mays
ttaaattcgttgatcacggatcacggtccacatattcttgggtgggcctctcctctcgtttgcctgcgccgccgcgatcgccaatcggcatggctcttcccaaaccccgcccgccaacgccgacggcgtcagcggccacgggcacctcctcgtcgcgaatagactcgccatcgctaaaggccgcgctcgcaatggctctcatccactacaaccgcctccctggcaaagccaacgccaccgcgggcacatcacccccgtctctcctccactggaagcgcaaggtcccattcccctagcagcaacaaccctcggattcaaaccctacctccgcctctgacattagatctccttctcccgcccaggccaaggaccggaagcgcgaaatcctccgcctccgcgaggagctcaaggtcctccaagatggggtgcgcggggaggagatggagcccccggttgcgtcgtgccggtgccacttcttcgacgggtgccgggaccttcgaccgcagcagggtggcggtggtggggagcactgggttgacgaggtgctgaggaggaggtttctcagactggtgcggtggaaggagaagcgacggcgagtggatcgatctcttccaagttctagtttgatcgatttcaacagtgaggatgagatgcagcagctcagcatgtcgactgatttcctggtggagctatcagacggcatttttgccaaaagtgaagctggccactcatttgctacattttctcaccaagcagtagatttcattttggctacactgaagaacattctttcatcggaaagggaaaaagacttagttggggagataatcgatagtttagtgactcgtttgatgaaaaggatgtgcactgttcctgaaaagcttgtcacatcagattcaggatcaactggctgctcagatgcccagttctcagtgcagcacttattccgtaagttgggaaatgatgaattcattggtcagcgggtaatccttgtagtttctcaaaagatatccaacgtatctgaaagattgttcttggctgatccgtttgctgatgctttccctgatatgcatgacaatatattcatcatgattcagttacttgagttcctcatatctgattacatgaaagtttggctatgctgtgagcatattaacaaaagactttttgaagaatgtaccagatctattctcaaggcacgcaatgatttgcaaatcctggaaaacatgaatgggctctatgtggtgtacattgagcgtgtggtcggaaggttggcaagggatgtggctcctgctgcacatcaggggaagctggacctagaagttttctccaaactgctgtgctgagagtgccttgcatatgacattccaagcctgacccggcctgttatatgcttaggttgattcaaaaccacgacaccattggtccacttagactatgcatagttacatttctgtttgaaagacaaactttagaatttggtagtggatctacttgtatggcctgttgtttcatgtcaccattgatagttgattagtttcattttgctgacttaacccctatacactgtgagttgctgtagacatgctttgttactctgcaaatttaggttgcatccgtgaataatagtaacttctgcgcgccctgcgcgcacaaaaaacgttacacaatatgtagtgtaaatgacatatttatacttagttatatatgctaatgcggtgaatttggcttgg

SEQ ID NO: 119000 - DNA, 1652 bp, Zea Mays
ttaaattcgttgatcacggatcacggtccacatattcttgggtgggcctctcctctcgtttgcctgcgccgccgcgatcgccaatcggcatggctcttcccaaaccccgcccgccaacgccgacggcgtcagcggccacgggcacctcctcgtcgcgaatagactcgccatcgctaaaggccgcgctcgcaatggctctcatccactacaaccgcctccctggcaaagccaacgccaccgcgggcacatcacccccgtctctcctccactggaagcgcaaggccaaggaccggaagcgcgaaatcctccgcctccgcgaggagctcaaggtcctccaagatggggtgcgcggggaggagatggagcccccggttgcgtcgtgccggtgccacttcttcgacgggtgccgggaccttcgaccgcagcagggtggcggtggtggggagcactgggttgacgaggtgctgaggaggaggtttctcagactggtgcggtggaaggagaagcgacggcgagtggatcgatctcttccaagttctagtttgatcgatttcaacagtgaggatgagatgcagcagctcagcatgtcgactgatttcctggtggagctatcagacggcatttttgccaaaagtgaagctggccactcatttgctacattttctcaccaagcagtagatttcattttggctacactgaagaacattctttcatcggaaagggaaaaagacttagttggggagataatcgatagtttagtgactcgtttgatgaaaaggatgtgcactgttcctgaaaagcttgtcacatcagattcaggatcaactggctgctcagatgcccagttctcagtgcagcacttattccgtaagttgggaaatgatgaattcattggtcagcgggtaatccttgtagtttctcaaaagatatccaacgtatctgaaagattgttcttggctgatccgtttgctgatgctttccctgatatgcatgacaatatattcatcatgattcagttacttgagttcctcatatctgattacatgaaagtttggctatgctgtgagcatattaacaaaagactttttgaagaatgtaccagatctattctcaaggcacgcaatgatttgcaaatcctggaaaacatgaatgggctctatgtggtgtacattgagcgtgtggtcggaaggttggcaagggatgtggctcctgctgcacatcaggggaagctggacctagaagttttctccaaactgctgtgctgagagtgccttgcatatgacattccaagcctgacccggcctgttatatgcttaggttgattcaaaaccacgacaccattggtccacttagactatgcatagttacatttctgtttgaaagacaaactttagaatttggtagtggatctacttgtatggcctgttgtttcatgtcaccattgatagttgattagtttcattttgctgacttaacccctatacactgtgagttgctgtagacatgctttgttactctgcaaatttaggttgcatccgtgaataatagtaacttctgcgcgccctgcgcgcacaaaaaacgttacacaatatgtagtgtaaatgacatatttatacttagttatatatgctaatgcggtgaatttggcttgg

SEQ ID NO: 119001 - DNA, 312 bp, Zea Mays
atgcaagcgtcaaagttggagtcgccgctcgagtccagggcactgacgccgtggaggaggcactgcctctccttcgcggagagtttcgcgacaacgcggtcaaggtcgtctggctgcttcttctccgcgacccgcacaggccctccactgccgacacggggcgacgacctggagcagcaggatcgcgaggagcgccagggtgacaccgcgtgttcacatggtcaagatctgcaacaaccaaaggtggaaccaatgacgggcggacagatgagggctgctgtgggaggaggaaggtatatttgtcaagagtag

SEQ ID NO: 119002 - DNA, 519 bp, Zea Mays
ttttggtaggataaaaatatatttacatatgactcatagccatcgatgatctagatccaaacaaaacaataagcaaaacaaatatccatatgcagcaagcccttgcatcttcatagtgttctaggttcagaactgaaaaaatgaagaccagaaaatataacaggttaatatataccaaatgaaaggaataagtaatgcaaagtagagaagagatgtgcaaatatcacctttcaaagaagggaaaaggaaaatattatagcgcataaatcagtataccatataatatgttgagtaatctgcatatacaagacaaaacatacatatacaaaggacgagggatgagcaataccagaaatccctacgcctcattcataccatttgtgctctttaatgtcttttttgaggaaattttcagatttggggaattcaactactgaatcggcttagcaaaggacacagttcacacatgacatactaatgcatcatacctacagttaataagactttcccaacgtggag

SEQ ID NO: 119003 - DNA, 114 bp, Zea Mays
attttaataaataaaatgatacgaagtagactaaaagactttgtattgttgttcaattcctcactttacacattttttgtgcaatttagcatccccaactactatgctttagtt

SEQ ID NO: 119004 - DNA, 674 bp, Zea Mays
cccagctctttgtccccccacactgctccagctttcaccacgcctatgcgctgctactctgccacaccgtttcctccattcctactcgagctcccaagcgcttgctcatggtgtttccagctcgtggctgccctggttgtgctctgcatcacagttctcccagccgttgtctacctagcaccagcatgaagccgctcggacgtcaccttcctcaccccgagctcgcacggcctcgtcgggactgcgccgtcgtctcctcttgtggctgaacgtcgcattgtttctgctccttgccgcggcttccactggcatgctcggactcgtccgggtgccgacctcctccacgcggtgctcgggacttcgtcggtgccgtctggccatgctcgtcccgctacacgtcttcatgttcctctgcgtcgatctcgcttcgccgaagcaacagcaacaccagcgtggtctcctagcttgggttcgtgaatttcctcgtcgaaccggcattatgtcgtcatccggtagtgtggtgctctttattcgtattttggtgatttatattcttgtgtatatgttgtaggtgtattcccttcggggttgtgtattacgttacactcgattaattctgttcggttaaccacgcgcgcctgatgttcgaaaaaaatcgcctgaactagaaatca

SEQ ID NO: 119005 - DNA, 1982 bp, Zea Mays
ggagattttctccttcgcgtctccgacgccctccatcttcatctcctcacggcgcgttcctgcgtcctggtccgagtctccagctcgcgcccagccgcttcatctcccagcctctcctccttgcttctctctccctctcgcgtcttactcccatggcgcgctctctgctcgctcgcgctttgccgagctccttcccgatctccgccccactatggcgctggccgccgcacctatgccggttctctgctcggccatggaagtcgcgaccccctagcttcctctaccgactccggccggagctccctcccatggcagccgctcgtctgtctccctgatgctcgtcgcgtgcgtccctgcctctctgttcttttctcctcctcaaactcgccttccagttcgctcgacctccttcccctggagctcccacacgccgctgtcctggtccaagctcccgcgcgagcccctcccctcttctcactagtgccgctctctacttttccctcctcttcttcttccccgcgcacccagacattccggcatccggcccagctcggtcgctcctccctaaactcgccccaaccatggccacgcccctgcacgtcttccccacgcgtgcctgctccccatggccggctgccagcccttgttcctccatcggactgcgcttcggcccctcccatggcgctcggcatcacctctgtctcccctgcgcgtcgtgtttcttttcccaccccatggcggcttcccatggcgccccagctccctggctcaccggccgtgcagctcggccccgcccatccgcgctcctcccggctccagccccctctgcccggtcgccgtcgagttccctgcgcgcgctcgtggctcggcagcaacaccagcgaacttagtccctgcatcctccctgctgttgcgtccatggcgcccagctcggatttttgcttggttgcctgccgtttcccggtgccgtggtctcgcccggccatgtcctgtcaaggttgttcctgcacgcgcgtcctgatacccctgcttgctatcaggccgaccgtcagcagctccccggccatgtcttcatccataacaccgtcaaccggtgtatctccttcgatgtcagcacaacccctccgcatcgtcgggctcatcggcacgctgctcgttcacacttcacgcgtctgcgacgtcgtcacatgtctcctcgccagcagtgaacgcctaggagaggaaattcgagaaggtttgtatggtaaggacaacccctatgctgtgatgcctatctagtgttcgatgatgcatgaactagtgaacgttttggttcttgcgaaaatctaagttcaacttagtctggtgagctaattcgttgctctagctaattggtttaaattaatggatcggatatacagagcagtcacgctggtccttatagtttagcaagagcgatgtgtagtggtttagtcgcatcgtatcgaatcgacagtttgtagagtatgtgaataatgctctggtggatgcatatgtcgattaggtttaaactggttctttgttgtggagtgaggagaagtagtagcgagaagaattaaatcggtgctttgtatctggtgagtggtcaaagtaacgttatggaaagtaggtcctgtgtttgtgtttctagtgttagtcgaagtatagcatgtggtgggtttcgtctattgtatggagtcgatgccctgctgtgatatccatgatgcttaatgcttgttaagtgattctaatgcttggttttaagtgtttcatcctttttagtgtagattatctatcttatactctttatactcgtgctcatacatgtgcatcgtgcatctcatgaggtacgataaataatcgtgtgatgcggaagacgagccaagtcgaccccaagcgcgggctaatccgcaagatgatgctgatggacgaaccgaaagatggataatctaaacaagtgccaagccaaaggatgctcgccaagt

SEQ ID NO: 119006 - DNA, 531 bp, Zea Mays
atggcgccccagctccctggctcaccggccgtgcagctcggccccgcccatccgcgctcctcccggctccagccccctctgcccggtcgccgtcgagttccctgcgcgcgctcgtggctcggcagcaacaccagcgaacttagtccctgcatcctccctgctgttgcgtccatggcgcccagctcggatttttgcttggttgcctgccgtttcccggtgccgtggtctcgcccggccatgtcctgtcaaggttgttcctgcacgcgcgtcctgatacccctgcttgctatcaggccgaccgtcagcagctccccggccatgtcttcatccataacaccgtcaaccggtgtatctccttcgatgtcagcacaacccctccgcatcgtcgggctcatcggcacgctgctcgttcacacttcacgcgtctgcgacgtcgtcacatgtctcctcgccagcagtgaacgcctaggagaggaaattcgagaaggtttgtatggtaaggacaacccctatgctgtgatgcctatctag

SEQ ID NO: 119007 - DNA, 538 bp, Zea Mays
tacacgctgcgatgacttcttgccacaatactggtgtactgtgagccatgtgacgtggcggcagaaacacctagatgctatgtcagaggactatcaacataggagtcagagtaaaactcatgttgagtagatggtattgattgacattaggaacatgctgcagtcaatgggaaaggatataatgacattccatcttcctcttatcatcgacgcgtatgacgatgcaattgatactgctagggaggtttatgaggaggaaagtatcgaaccggcagcgggagatgtggctctcaaagactctcttaacgaggaacagagagccgcctatgataagattctatctgtcattggcacttatgagggcggattgttctttgtggatggatctggtggcactgggaagacctatctatatcgagtgctcctcacgatgctacgtagccaaggcaagattgcagtggcaacagctacatccggtgttgcggcttccacaatgcttggaggaagaactgcccattcacgcttcaagatacctctc

SEQ ID NO: 119008 - DNA, 1014 bp, Zea Mays
atatgaacatctcaccaaagaagcgcatgggcttgtcccttgccagcttgccatttgtgatagctgagaccacgatgcaaaccctcacaaatcctaccacacacgtgccctataaatactcgagcactgacacaaaccatcaccacagacaactcagatcgtttctaatcattccatctcaaagacaggagttcgtctccttgttaggcaaagaccggtagcaaaatgatcagctccaagaagctagctcagttgtccaagaagatgcagggaatgggtgcagttgggcgaagaagggtcacagtagtgagaaaggaaatcaacccatcttgcagcagcatagttgcagggaagggcaactgcatcgtctactcttctgatgggaagcggtttgagatccccctttcttacctccacacggcagtgtttgtagagctcctgaagctgtcgcaggaagagtttgggttcacaagtgatgggaggatcacactgccttgcgataaagcagtgatggagtatgtgatgtgtttgctaaggagagaagcctctgaggatgttgagaaggcgctcctcagttccatagtgatgtcttgccaccacacaaacaggatggtgcaaccaccaagtggagtgaaccaccacttcgctgtgtgcagctcctgaagatgaagatatccatggcttggagcttgtttcagcacttccctgtgtgcagctcctgaagatgaagatatccatgtcctggagcttgtttcccttctttttttcgcttccatcttttttcccagaagtaccttggagcacggtttttgtgcgatgtttttccaatggtacactgaggatgtacagatggatgcgtgattagaaaagaaggaatcaagattgccactgagacaataaagtagtgttgatttagaacctaccgaagaagataccatgatgtttgcactgtaaaaccagagctgccaaatggtctagtactgtagcgaatagcatctttcctttttccttaga

SEQ ID NO: 119009 - DNA, 486 bp, Zea Mays
atggcgctcgcctggctcgccgcgcgcccaagcatccgctcacccctgcgcgtgcttcttccccatggcgagctcacccatcctctgctcgttcccatggccgtcgtgtgcagccgcgagctccagtcttcttccctgccccgcaatccatggcgcctggttgaagctccttcctgctcggcgcgcgcccgcctccctgctcccctcgagctcatcctgcccaagtccggttgtctactccttctctgctcgacgccgcggcagatgatgccgcagtccggctggacgtcaagatccagtggaacctcgtggtggcggcgctggcggtcggcgcgctgctttcgtgattcagcaacggccgatgcccagccccaatttcagcttccagctcgcctccctctatccccatgccgagctcggtcctgtccatctcgccacgctcggtctctagctgcctgtgcgcacatcggtttatggtcgtggtga

SEQ ID NO: 119010 - DNA, 197 bp, Zea Mays
ttgttgttttcaagcgctcgcccaggtcgccgtcgtcaagtccctgtgcacgcagccatgtccctctgttcgccgtggccggttcgctgctcgcgtcgtggtctcccagctcgtcagcacttgttcagtcgtctcggctcgctcggccttaatccccatcatgtcatcgacctcgccagttgtcgtcattcgtcgtt

SEQ ID NO: 119011 - DNA, 644 bp, Zea Mays
tccacttttctttccatggatcacacagtgagcgtatttggtatttggatattatccgtatcaatgacctggtgaatcctcttactcttaattaatcattagacaaaattaataaactagaaaagatcgatatcaagataaaacttgcacattttccattctgaaatgttccatagtaggtgaatcactttaactaattaaaaattctcaaaattagtggacttcctcttcgaaatagaaattggctatttccacatagggaaagtcgtgtgcaatgaaaaatgcaagcacgatttggggaggggttttttctattgtaacaaggaagaattatctactccatccgactagttccgggttcgagtcccgggcaacccatatggaaaatagaaaagagcaatctgagtttttcatttttattaacttcatttcccaaatttttggatttggtaaatgaagttatacgaaaatccaatcgttggggctggcttggttgacattggtatatagactatgttatactgttaaataacaagccttctattatctattttctttctagttaatacgtgtgcttgggagtccttgcaatttgaataaaccaagatcttaccatgactgcaattttagagagacgcgaaagt

SEQ ID NO: 119012 - DNA, 600 bp, Zea Mays
agccccttctccagccgacgtttctcccttccaatggcgttcgaccctgctcgcccccgccctcagccgcgccttggacttcctccgcggttcccagctcggtcttcttcctggcatccgactagaactccgtattttctccctcagctcccatggcacccagcagagctctctcttcccatcccatggccgccgctctgacttctctggcgcgccctggcgtctgcgtccagctgagctcctctagctcgcgaccctctccctctccctatgtcctcgcacgcgccggctctggctcagccactcctcttcctcctcccgttccctactcacccatggaagatgcgacagctcctctgctcagtgctggaatttctgtgggctctctttccatagccgagctccctcattgtcgcctctccgtgctggccgaccagcccaccatggtggcacacgcccctgctccttgtttccggctcgctgctctggttttcatctcttcacgtcggtattgctgttcaagcgctcacccaggtcgccgccgtcgagtccctgtgcgcgcagccatgtccctctgttcgccgtagccagttgcctgct

SEQ ID NO: 119013 - DNA, 678 bp, Zea Mays
aaacatgtccagtgacactgatatgagtaaggtgtttgaagacagaacgtttgtgtcatctattcttaattcgcttcctggtgttgatcccaatgatccatctgttaaaggtttatgtattgtgatgcaatgaaattcatgttgcctctagactatagcattgttcagcttcaccttgactaaataagaataaatatattatctgtcaccaaatcttcacatgaactgatatcctgtatttacgaatcttgactagtctagtaatgtatttatgtggaaatatgaaggtttctttatttatcttcttaaacaacaagagaagaaggaagacaagtcagacaaaacagaagacaagaagaactgatgtagccatgttcatgcttccactattgaaatgcatattcaacatagcttggtcagctcctatctgctgtttcaacattgatttaaaagaagagctggtagttgtaggcttttgaacaatagctggagtgatatgaaacattagtgatgtagttgtgggcttttgaactgcttcaagatggagtgatgtcgatgtggtgctattgtgactgatcatctctgtagcttttgtgaatgatctagctagctatctgtaaatgatctagttgtgaatgatattataattgtgatgcttttgtgaatatataattgtgg

SEQ ID NO: 119014 - DNA, 339 bp, Zea Mays
atggcgatttccccttggattcctccctgctcgcgctcctctctccatggctgtcgtcgcccccaagcctgcagtcttgccaagctcgccagagctccctgcgccgaccgtccctaccccctcctgcaactcggtgcctctcccagctcgctggtcatcgagcccctctcctccctagcgctcgcccctgcccctctccatggcattgtcgtcttggctcccagcagctcctccctggcactcggcaaactccatggtttcagccctcaagccccagccgacctctcccatggagcttttagtggaggagagaaagatcctaggtttttggttggataa

SEQ ID NO: 119015 - DNA, 973 bp, Zea Mays
atgattcagcttgattcgttcagtacttttgattcgggtgacagtaaaggaactatcattgacagcgggacaacactggcatatcttccgagggaagtttataggactttgctgactgcggtatttgataagcatccagatttggccgtacgtaattatgaagacttcatctgtttccagttttccggaagtttagatgaagaatttcctgtaatcacctttagttttgagggagaccctacactgaatgtttacccacatgattaccttttccagaacgggaatgatttatactgtatgggattcctggatggtggagtacagaccaaagatgggaaagatatggttctcttaggagacctggtcctctcaaataaactagtagtttatgacttggaaaaacaagttattggatggacagactacaactgctcctccagcattaaaattgaggatgacaagactggctcagtgtacactgtcgacgcacaaaatatctccgctgggcggaggtttcaatggcacaagtccttaattctgttgttagtgacatcaatctggagctgtctgatgttatagcccagccctggaatctaggactaaaacatggggaaatgtattctctttaacaaaaatagctgagttcagaagttcaacaaagagtgcaaaaatattatacagattgccccttgtgacttgcacgtaaattatagcaacctatcgagctaccaaaatgacttgaacttaagttggctgatgtcaggttattttgcagcttttcttttctaccagacatatcatcaggtgtaacgtgttattgtgcaagtgcaatctagcatctgtgaggagaggatttctgttgcgtaaatgtagttgttgactcatagaaactcagctttgtttctttcagaatcttttgtaactgatggagatagagctactgataaaaagaaataaatagatgttaaatttg

SEQ ID NO: 119016 - DNA, 242 bp, Zea Mays
cattgagagtcgccatcgatgagcaaagaagggcgtgcgtcaccaccgtcatagggatcgaacgtgactacacctctgtccatgaatgagggccccagagcatcactcgtccatggcacaacttctcggggcggtcggactcacgggggaccaacggggtggccaaaattcctccccgtcgctcatgcaccaccgctgaccagacctcgccatggcttgtgtcgcctgcacactgattgatg

SEQ ID NO: 119017 - DNA, 2010 bp, Zea Mays
tctattgggacactttgtgataaactgaagcaaacagatccatataaatcagagcttgagacaatgctggtccgacatgtctttcctgaattcagcagtcgtgttggacacctgcgagcaaaggcagcatgggttgctgggcagtatgcccatatcaacttttcagacccgaacaattttcgtcaggctatgcactgtatagtttcaggaatgcatgatccagatcttcctgtgagggttgattcggtctttgcacttcgttcttttgttgaagcctgcaaagatttaaatgagattcgacctatacttcctcagctccttgatgaattttttaagctgatgaatgaggttgagaatgaggatcttgtgttcaccctagaaaccattgttgacaaatttggtgaagagatggcaccttatgcattaggtttgtgccagaatttggctgctgctttctggagatgtatggctagttcagaagctgatgatgaagctgatgattccggtgctttggcagctgttggttgcttgcgagcaatcagcacaatccttgagtcaattagcagcctcccacatctttttacgcaaatagaaccaacattgctgcctataatgcgcaggatgttgacatctgatggccaagcctggcgcgacgccgcactcgtccaagctctgcaggccgagcatgaggcgaccctcgctgcccaggaacacgacacggttgctgatcgcgcccgcgtcgcccttgagcgtgtggctcgtgcccgcgccatctctgcgcaggatgatcctgacgacgcccattacatcctctccgatcaggcggatgtttatgaagaagtccttgaaattgtttcctatatgtcattttactcgcctacaatttcactggacatgtggaccttgtggccagtgatgatggaggcgcttaatgattgggctatagatttctttgagaatattcttgttccattagacaactacatttctcggggaactgatcactttcttgcatgcaaagatccagattaccagcaaagcctgtggaaggcacttcaatctattatgatggacgaaaacatggaagattctgatattgaacctgctcccaagctcattgaagttgtttttcaaaattgtaaaggcaacgtggatcactgggttgagcactatctcaggattacaattgagcggttacgtcgagcacacaaaccatacctgaaatgcctccttgtacaagtgtgctgttgtgttttattgagcacaaaaaccatgtggagtgtcttcctgtctgatgagttgatcgtggtgttcttggatctggttcttggcctttccatttacttctatgataactggaaaaaaattaaaactgttgaagtgagggagcatgataagaaagtttgctgcttgggcttgacctcccttattgcgcttccagctgctaagattccagcagatgctttggatcggatcttcaaagcaacacttgagctgcttgttgcttacaaggaccaagttgcaggtggagtgatccatgtttttagttgtgcttgtgtttttttccctggtgaatacacagaagctaagaagcaaaatgaagaggctgctgatgatatggatggttttgatgctgatgaagaagatgatgacgaagttgactctgataaggagatgggtcttgatgatgaagacggggatgaagtaagcagtcttcagctgcagaaattagccgcagaggctagaggcttccaaccagccgatgacgatgactcagatgatgatttcagcgacgatgagctacactcaccaatagacgaggtggatcctttcattttctttgtagaaactgtccaaggtttgcaggcatctgatcctgccaggttccagaaccttatgcatacattggatttttcttatcaagcgcttgctagtggcattgcacaacatgccgagcaaagaaaaaatgaaattgagaaggagaaatctgagaaggcaaatgcacagtga

SEQ ID NO: 119018 - DNA, 2288 bp, Zea Mays
tctattgggacactttgtgataaactgaagcaaacagatccatataaatcagagcttgagacaatgctggtccgacatgtctttcctgaattcagcagtcgtgttggacacctgcgagcaaaggcagcatgggttgctgggcagtatgcccatatcaacttttcagacccgaacaattttcgtcaggctatgcactgtatagtttcaggaatgcatgatccagatcttcctgtgagggttgattcggtctttgcacttcgttcttttgttgaagcctgcaaagatttaaatgagattcgacctatacttcctcagctccttgatgaattttttaagctgatgaatgaggttgagaatgaggatcttgtgttcaccctagaaaccattgttgacaaatttggtgaagagatggcaccttatgcattaggtttgtgccagaatttggctgctgctttctggagatgtatggctagttcagaagctgatgatgaagctgatgattccggtgctttggcagctgttggttgcttgcgagcaatcagcacaatccttgagtcaattagcagcctcccacatctttttacgcaaatagaaccaacattgctgcctataatgcgcaggatgttgacatctgatggccaagatgtttatgaagaagtccttgaaattgtttcctatatgtcattttactcgcctacaatttcactggacatgtggaccttgtggccagtgatgatggaggcgcttaatgattgggctatagatttctttgagaatattcttgttccattagacaactacatttctcggggaactgatcactttcttgcatgcaaagatccagattaccagcaaagcctgtggaaggcacttcaatctattatgatggacgaaaacatggaagattctgatattgaacctgctcccaagctcattgaagttgtttttcaaaattgtaaaggcaacgtggatcactgggttgagcactatctcaggattacaattgagcggttacgtcgagcacacaaaccatacctgaaatgcctccttgtacaagtgatcgctaatgcgctctactacaatcctgcgctgacccttgagattttaaataagctcggggttgcagctgacatttttaaccattggtttgctatgctacgacaagttaaaaaaagtggggcacgtgttaatttcaagagggagcatgataagaaagtttgctgcttgggcttgacctcccttattgcgcttccagctgctaagattccagcagatgctttggatcggatcttcaaagcaacacttgagctgcttgttgcttacaaggaccaagttgcagaagctaagaagcaaaatgaagaggctgctgatgatatggatggttttgatgctgatgaagaagatgatgacgaagttgactctgataaggagatgggtcttgatgatgaagacggggatgaagtaagcagtcttcagctgcagaaattagccgcagaggctagaggcttccaaccagccgatgacgatgactcagatgatgatttcagcgacgatgagctacactcaccaatagacgaggtggatcctttcattttctttgtagaaactgtccaaggtttgcaggcatctgatcctgccaggttccagaaccttatgcatacattggatttttcttatcaagcgcttgctagtggcattgcacaacatgccgagcaaagaaaaaatgaaattgagaaggagaaatctgagaaggcaaatgcacagtgacgtcataaagcatttctggttcccttcgattgttttgccattttgccggtatagcattggtggacggttaatttcctgcgatttgcaggccgcaggtaagagtttttgcagccttagccaaagtgtaggacaaattcaatcttgtgagatagcatcttggataacctgtcacctcgaccatgttcgtcgtggccagttgtagacgtcttggttgtgcaagaaagtttctctcgaggacagttgctcgttttgttagggccatcaatttttttgggcggcttgtaagttatttgagaatcccacctcaggttgaggggttgtattctcgagtcgtcaaagtttagtaccggtgcggtgtagattgtatatggtttcagttgtctagaacgttgtggcttcatggacgggctgtggtataagtttttattattttttaatttttttgtcaacaagacattgtaattggggtttgtttgtttggtaagagcaagaaaggtcggcactgttatttcttcggtatc

SEQ ID NO: 119019 - DNA, 1455 bp, Zea Mays
aaaatagaaaaggtggaaatttaggaagcaaacaaaagctccgctgccttgtctgcaatggcgtctggcgcttttcccacgagcgccccctgcccttctcgctctcctccataggcagacgccgcgctcccccaacgccgctccgccgaccccagtcatatctcccgcccccagctgaggcaatggggtcctcgtcctcgccgtcgccgccgccgccgcccatgatcgggcgggccgggaacctcaccgtcttcatcacgccgccgtctcctgctagcacgccgcggggcgctttgcgcacgccgccgcccgagtctccgcgctcggatttctctacacccacccgacagaggatagccccgtcgccctccccttctccctcgccgcagaaacacgagagcccgttcgcggcgcctgcggtggtgttcaccccgcccccgccgtcggctcctgtgaaggtcgcgccgccgccggtgcaggtgccgccgccgcagtacgagaaggcgtccgcgggaggcaagcacgacggatcggcgtttggcttcttctgggacgccgtcgcgcgcgtccaggaagcgcacgccagcctcgacgagtacatggctacctggttcgggttggatcagtccaagtaccagtgggcgctcaacgactactacgaggccacaggcaaggacgtggattgtgtaaagggtagtaagctgaaggagcttactactaaagtgcagaaagtctgaaaaaaaagcaactttgttttgtgttgaagaggtgtagcttgtagcgtatgtctggagaagcatgttccattagttacattttggtgggggccttcttgaaaagtggccatctctgcttcgccaggcagttggacaactggaggccgcggttgaatcaaaggagcggccgttgtttcgttccggtgtttaggatctgctgtaatcctaaggttatgtcaaaacacagaatgggtcttatttgcaatggttctaatctggatgctgtccgttgcttaccgccacaccctcgtcttttctcttatctagatagcaaaagcacgcccataacttgatgtggcaggcgatggtacacaatcatcacttcgtttccgccagacctggctcagggttgtagatcggaggcgcttcccttctggctccttgttgtaaagctgaagagctcacgaattacgatcgtacactgcgttcccttgttgcttgtccggaccggctttggcatatgctgaattgcatgggcgaacacagcagaaatccagcgtcggtgttcagggtaatgcatgtactagtctgcatccaggtttatattcatcatttgttgtatgcatggactctcatgtagccttgcagtttctaaatcagaattacgttataaggctatttttagcaacttatccccatccctcatttgaaactccactctaaaaaaacatcacagtct

SEQ ID NO: 119020 - DNA, 1038 bp, Zea Mays
gaaatttaggaagcaaacaaaagctccgctgccttgtctgcaatggcgtctggcgcttttcccacgagcgccccctgcccttctcgctctcctccataggcagacgccgcgctcccccaacgccgctccgccgaccccagtcatatctcccgcccccagctgaggcaatggggtcctcgtcctcgccgtcgccgccgccgccgcccatgatcgggcgggccgggaacctcaccgtcttcatcacgccgccgtctcctgctagcacgccgcggggcgctttgcgcacgccgccgcccgagtctccgcgctcggatttctctacacccacccgacagaggatagccccgtcgccctccccttctccctcgccgcagaaacacgagagcccgttcgcggcgcctgcggtggtgttcaccccgcccccgccgtcggctcctgtgaaggtcgcgccgccgccggtgcaggtgccgccgccgcagtacgagaaggcgtccgcgggaggcaagcacgacggatcggcgtttggcttcttctgggacgccgtcgcgcgcgtccaggaagcgcacgccagcctcgacgagtacatggctacctggttcgggttggatcagtccaagtaccagtgggcgctcaacgactactacgaggccacaggcaagggaacatctaatggatggtggtacaacatcaatgacgtggattgtgtaaagggtagtaagctgaaggagcttactactaaagtgcagaaagtctgaaaaaaaagcaactttgttttgtgttgaagaggtgtagcttgtagcgtatgtctggagaagcatgttccattagttacattttggtgggggccttcttgaaaagtggccatctctgcttcgccaggcagttggacaactggaggccgcggttgaatcaaaggagcggccgttgtttcgttccggtgtttaggatctgctgtaatcctaaggttatgtcaaaacacagaatgggtcttatttgcaatggttctaatctggatgctgtccgttgcttaccgccaca

SEQ ID NO: 119021 - DNA, 1903 bp, Zea Mays
aatatgaaaagaaggtttgttattgtggctccgtcagcgcctcactttcagccagacatggcagtctcaaatctccccaccaaggccattaccttgttcttcctctcgtggataggtttgcccctgccctcctctgtagcttcattgctcctcctttcatccttcctccacttctgtgctaattccatggttatgttctccttagttttggtattttcttgcgctatcaactcatgttcaataaaatcatctcttaactcagttccactggcagcttcttttagtacaatttcacagtcaacttgtattagcttggcttcatctttagcttcctttggttcggtttcactgacagcttcgtttagttcagtccgacctacagtttcatttagctcagatgcacaggcatctttattcgacccaggtccatcaacagcttcctccaactcagattcatcgactgcttctttagggatgtttgtatcactgtttctgtttccagcagaagcactgtcgcctgtgctgaggtcttcattgtcctttccaccctgtttctcccccaaaatgccccctgtgttgtctcgattcttgtgttcctccggacaagaggatgtcttgctattgagatccgcagatttcatatcaacagggtcagggagtcgttcatgcaagtgctcctctatggaagaggtgcttatgctctccgtctcatcaaactctatcaacaactcaacgtctcgttccaccattttcggtgtctctgtttgtcttaccggcacacttgttgtcctctggatggagacataattctcggctcccattcttttctttgttatagcgccaggagcacgagtcgaagctgcagcttgagttttttcaggtcctactactgttttctgagatttcagctttacagaagacgctgccgccgccttctcaatgccgggccttgtagagagattattactcttctgcatggtggatggtgatttcgttgctctggtgatatccttagacgaggtgcttggaactgcaagggctggaggccacacagatgtggcaccaggcctttctgcttttcttctcactgtgtttccctgccttgcaccagcagccatggacgaagcagagtacagtgtcttgctgtgacttgaagaggctgagctagatgtggaccgggatgaggtcgtccgactgttgaatgatgatgtgggtcgacaggtgttggatgagattgaggcgggggatggggggataatctgcgaccaggagaggttgggacggaccttgcacgccgtagcccttggccagactcactgggtttgagccctgggaatatattctggatgccccggttgagactagcgttctgctgatggtccctccttgatgctgccattgcctatgagctcttctgcgaacaattaacaaaatgcataaaataatgatgctcttttacgtctctctttctctctctctctctgcctctgggttataaactgcagccattttgatgccatcgtctgaaaaacttccatctaagagagaaggcaaacaactgtggaaaattgaccgcaaagcacaaaaggaggatggataggaaggaaatggcatggttcaaaggtaaaattatgctgatgatcatttgaaagcacataatactttttttacaaggggctctcactaattaactgcttattttctagtattctgccaaggaagaggcatacctgtgctgacctccgagctgttcacacggactccaaaagccgatcaatctctgcgatccatggtcaccaatggaatatagaaggaaggggaatgcttgcattgatgtgccccactttctatggcctgcctccttcacctcgagagtctaggcggtcgctgtgttcaaatagtc

SEQ ID NO: 119022 - DNA, 406 bp, Zea Mays
atctttctagaaggattttgcagaaggattttgcttggcatcaaggaacagtgcaaactagaagaaacccccgtcatcagcgacctctccccaacggcgccgacgatggcgcaacagcagacgcagctaaccactggctcgggcatcctggatgccgtcccgctcttcgtcgtcatcctcctcgcggcccacgtcctggccctcgtgttctggatgtacaagctggcttccgagaagcaaccaccccggaggaagacacagtgacggcgccgatctacgccatcggcgatccttcgctagcctctttatcgctgcaattcctgggatcttgtccgcctcccccattcttccacggttcttccactgccttatctctgttgaataatctacaacttttgcagccttt

SEQ ID NO: 119023 - DNA, 552 bp, Zea Mays
atctttctagaaggattttgcagaaggattttgcttggcatcaaggaacagtgcaaactagaagaaacccccgtcatcagcgacctctccccaacggcgccgacgatggcgcaacagcagacgcagctaaccactggctcgggcatcctggatgccgtcccgctcttcgtcgtcatcctcctcgcggcccacgtcctggccctcgtgttctggatgtacaagctggcttccgagaagcaaccaccccggaggaagacacagtgacggcgccgatctacgccatcggcgatccttcgctagcctctttatcgctgcaattcctgggatcttgtccgcctcccccattcttccacggttccattttcatgtgaaccagtaccctccagaacattcaggccgtcaattattcagagatatccatatagtctttcaatttgttttatttatacttattgcattttgggtattgtttgataacaacttagcgatattctatgaatcactatccgtttgggtgataaataaatgttcctagttttagaccatctccaa

SEQ ID NO: 119024 - DNA, 544 bp, Zea Mays
atctttctagaaggattttgcagaaggattttgcttggcatcaaggaacagtgcaaactagaagaaacccccgtcatcagcgacctctccccaacggcgccgacgatggcgcaacagcagacgcagctaaccactggctcgggcatcctggatgccgtcccgctcttcgtcgtcatcctcctcgcggcccacgtcctggccctcgtgttctggatgtacaagctggcttccgagaagcaaccaccccggaggaagacacagtgacggcgccgatctacgccatcggcgatccttcgctagcctctttatcggttccattttcatgtgaaccagtaccctccagaacattcaggccgtcaattattcagagatatccatatagtctttcaatttgttttatttatacttattgcattttgggtattgtttgataacaacttagcgatattctatgaatcactatccgtttgggtgataaataaatgttcctagttttagaccatctccaatcatatcttttatattctttctttacggatccctg

SEQ ID NO: 119025 - DNA, 1363 bp, Zea Mays
aaactagcccaaagaatgacaaattttgcggagggggaaattgccaattttctcgtttcattcctcctcgggtggcccgtcatcgcgttcaccctagttctttctttcctggcagcgacaactgcgcagcggcgccgccaccggacgtcagatctccgttgggtgtttgatggcgatgagcacctgtcaggtactctaaggccactttctctcattaaggtagtactgagttcattgcatgactatgacttctgaagatggagacattttggctcttctgtctgagccaagcctaaaggaagagcaacttgaggcttctgaatctgatgctatgttttctgcaattatgaaagccattgaatcaaataagaatgtagttgaagtttcacctgaggaagctgcctgggcagattcatgcttcgtgcagacttctgaactgtcatatgatgactggggagcgatgaggagtatgctgcttgatgccctcgaaaagccaacagaaagtcccagtgatacttcagaaagtgcacataatgcaatctcagaggcaaaacctcactcccttcctgctgaaaacatttctgagcatggcgacatccacatggagcaaataaacaataccgatgatgacaaggatggtactgaagcttttgaaattgctgatgtaatcagacgtgtagacgataatggtaagcaaattgatagttatgtagcagacgctggtgatgagttggtccttgagcagacccagtcaacaggttctatatttaaggtttgggacctggaactgccattttctgatgatgatgatgatggcgagcttgaactcgtcaaggatctgaagaagcttctcaaggagaacagccttccagaggatatatatccaactcttcctccagatgatgcagccaaacccttgagccagataagcatcaatgaaattgtggcgggcttgagcgatttatcaatacagcaagcccatgagtgactattatttctcaaatagctgtggcacaccttggtcgtccaggcgatattttgttttgtgcaaatcacttgggtggtttaaacagcaggtttaggctaactgttgtgctgtctgttttttctgtatactcgccgttttgatttctgcttaacttgaaatcagctaaaaatgaagatgctttggtagaattcgcgttctggtatttccccgtctatcgttgtactcgtgcttctgtctgtctcattttttcctttgctttcttcagcaatgacaacttcgtcaggaagtttaggtttaggacctgtttggttcctttagtacagggactaaagtttagttagaagactaaagttttgtcactaccatgtttggttc

SEQ ID NO: 119026 - DNA, 375 bp, Zea Mays
gacctcgtcgccgccgctgtgcagcgcgccgccatggtcgcaggaaccccgctgtcgtggaaggtcgtaatccgccgtctgggctaacccgtgccggcctgggagtttctcctcaataccctgctggtgttcgcggcttcttcaggcaaaccttgtggccggggtggagtgaattggacaccggaggaaaagctccaccgtgtgcccgctcctcaccatggtcagggcactgggctgcatacatctcgaagagcctgtgactgaggatcctggtgaccaacagatagaagtagctgagcaggagctcattgaaggcaagttgtgcccttgaccactttttacccaataatgttctttaatatcatttattcatgc

SEQ ID NO: 119027 - DNA, 108 bp, Zea Mays
cttaagtgtcccatatattttccatttccatcatttctttagctacctatggaaggtaaaatgcaaatattggcaaaatgcgagttgctaaatatgataggaaacaag

SEQ ID NO: 119028 - DNA, 2961 bp, Zea Mays
atggcatccaacacaggagcatcaggatggctcaggggtaaggtgaaggctgtgacatctggagattgtctactaatcatggggagctcaaaagctgagatcccacctgagaagtccatcaccctgtcctaccttatggccccaaggctggctcgccgtggtggagttgacgagccctttgcatgggaaagcagagagtttctaaggaagctttgtatagggaaggaggtcacattcagagtggattatacggctcctaatattggacgagaattcggaactgtttatctaggtgacaagaatgttgcgtactcagtaatttctgctggatgggcaagggtaaaggagcaaggcccaaaggggggcgaacaaaattcgtaccttgccgagctgttgaggttggaggaagttgccaaacaacagggtgttggtcgttggagcaaggaacctggtgctgctgaagagtcaataagagatcttccaccatccgcaattggtgaaggaagtggttttgatgcaaagggttttgcggtttccaataaaggcaagagtttggaggccattgttgaacaagttcgtgatggcagtactgttcgtgtgtatttactccctaatttccagtttgtgcagatatatgttgctggagtacaggctccatcaatgggaagacgtccatcggtacctactgtaattgctgaaactgatgataatgctaatatcgcgaacgctgaagatcctgagggaacacctgcgcaactgactacagcacaaaggctagttgcatctgcagcttctgctgaaattccaccagataggtatggaagagaagccaaacatttcacagagactagagttctcaacagagatgtgcgtattgtggtggaaggcacagacagctttagtaatataattggttctgtgtattaccctgatggagagactgcaaaggacttggcccttgagcttgtcgaaaatgggctggcaaagtatgttgagtggagtgccaatatgcttgatgttgaagtaaaaataaagctgaagaatgcagaacttcaggctaaaaaggatcaattgagaatctggacagggtttaagccaccagcgacaaactcgaagcccattcatgaccagaaatttaatggaaaagtggtagaggttgtaagtggggattgcattattgtggctgatgattctgctccatatggaagtccttcagctgaacgtcgggttaatctgtcaagcattagggctcctaagttgggcaatgctcgtacagatgtgaagcctgaccattttgctcgtgaagctaaggagttcttacgcacgaggttgattggcaaacaagtggctgttgaaatggaatactctcgaaggatcagcactgtagatggacagagtgctgctccaacagcaaacatggctgatacaagagttttagattatgggtcagtttttctgggttcaccatcacagactgatggagatgacacatcttctgctccgagctctgctagccagcctggagttaatgttgctgagcttttgctctcacgaggctttgctaaaacatctaaacacagggattatgaggaaaggtcacactattatgatgctttattagcagctgaatcacgcgctgagaaagcaaagaaaggcgtgcattctcagaaagaatctcctgtgatgcatataacagatttaacaactgtatctgcaaagaaggccaaagattttcttcccttcttgcagcggaacagaaggcattcggccatcgttgaatatgtttttagtggccatcggttcaaactaacaattcccaaggagacttgtagtatcgccttctcattatctggtgtccgttgtcctggtaaaggcgagccatactcagacgaagctattgctttgatgaggagaaggatacttcaacgagatgtggagatagaggttgaagcagttgataggacaggaacgttcataggttctttgtgggagtccaagaccaacatgggctctgtgcttctggaagctggacttgccaagctgagttcatttggcttggataggacctcagatgcttatatcctaacaagagctgaacagtctgcgaagcaacagaagattaagatatgggagaactatgtcgagggtgaaaatgcttccaatggatccacacctgaatctaaacaaaagcaaattctcaaggttgttgtcacggaagttcttggtggtgggaagttttatgttcagacaatgggtgaccagagggtggcttcaattcaacagcagcttgcatctttgaaacttaaagatgcgccggtcattggtgcttttaatcctgtgaagggagagatagtcctcgcacaatttagcgttgacaactcctggaacagagctatgattgttaatggacctcgttctgttgaatctccggacgacaagtttgaagtattctatattgactatggcaaccaagaggtggttacctacagtcgtttacgacctgtagacccatctgtttcctcgtctcctgctcttgctcagctatgcagccttgctttcataaaagtgcccagtcttgaggatgactttggtcaggaagcagcagagtatctaagtgaatgtttgctcagtagctcaaagcaataccgggcaatgatcgaagaacatgatacttctggggggaaatcaaaaggacaaggaaccggaaatgttctcattgttactcttgttgatgcggagacagaaagtagcataaacgctaccatgcttgaggaagggcttgcccggctcgaaagaagcaagagatgggacactagggagaggaagacggctctccagaacctggaacagttccaggacaaggcaaagaaggaaaggctgcggatttggcagtacggagatgttgaatcggacgaggacgagcaggccccgcctgcaaggaagcctggaggtcgtcggtag

SEQ ID NO: 119029 - DNA, 309 bp, Zea Mays
atggacgagcagacacgacatggagggtgcgagtccgccaaggacgtgactgtcggagcgccggtagagaagggagatgaacctagtcgagcactagagagcgagtggacaagggagcaggcgcggctgggctgggcgacggcgaccgacggctatatggatggggcgagcccgatagggaacaacagggcgagcgacgctagggagctcggcatggtggagcacgcgaccaaggtgttccctatcgcgctccatgacacgacgctgctgagcgcgttacagaggcgaacggcaatgatgatggagtag

SEQ ID NO: 119030 - DNA, 1312 bp, Zea Mays
gctcttttagctttggcagccaatcgcctcttgtcctgtcgtcgtctcttcctttcgcgtgagcagttcaggcgttcttgccctttcctcgctcaggtcaggtggggataggatcgtgacgtcgtcatcgccaccaccacccccagcatcccgagctgctgctggcggtggggcaaccgcgtgcgttgctagcttgctcgatctgcctctcctctggatcccctgtcctgtccctgttaatcgcgcgcgcttgcctatttacaaggcgaaacaagcgcgcagcagtggccatgtcgtccgacgcggtggccgccagcagcaggaagggccggctgaagcagcgctacgacaacgagttccgcctcgtcgcagggtgcgtgccgtaccgggtgaacaagaaagacgacgagggcggcaacccgtgcagcagcctcggcgacgacacggcggcggaggtggaggtgctcatgatctccacgcctaaccgggccgacatggtcttccccaagggcgggtgggaggacgacgaggacgtctaccaggcggcgtgccgcgagaccacggaggaggccggcgtcaagggcatcatcaacagagctgcgctggggcactgggtgttcaagagcaagagcagccagaacagcaccaccagcaccagtggagcctgcaagggctacatcttcggcatggaggtcacggaggagctcgagtcatggccggagcaggacacgcacgaccggcgatgggtctctccggccgaagcctaccagctctgccggtacgactggatgcgggaggcgctcaccgcgctgctggagaggctgtcggtgctgcagccggtggcagcggcggcggcggcggccacaccggaactggcggccgaccaatctggcatgtacatgatgctccaggcgtcctcggacggaggagcggtggcgctgtgctagctcattgatggtggacgacgctgctgttgctaactgtccaaactgcacgctccacgttcagttcaaagcaagtgcaacaaattcagaccctctatctaattgctcgtttagtcccttcggttttcagctagtcatgagtcttcactcttcagtgtgcctgcaattaatgcaacattggtgttggttggctagtttcagaggtcaggacaaagcgactgtcccctcggcccttgcatgatgatctatatatacgattactgagtgttcctgtgtcatctactgtggtgttcatgtaatatgtgaaaaatgttatggcgtttgtgaatgctaataataatactcttacatcgagttttgttcggcgg

SEQ ID NO: 119031 - DNA, 786 bp, Zea Mays
ctccggacctctctctttctctctcgtgcgtgcgtgaccgaaaagctgacatatgcccgccgccggcgtgcctgccattgccagcgcgcagcagtggccatgtcgtccgacgcggtggccgccagcagcaggaagggccggctgaagcagcgctacgacaacgagttccgcctcgtcgcagggtgcgtgccgtaccgggtgaacaagaaagacgacgagggcggcaacccgtgcagcagcctcggcgacgacacggcggcggaggtggaggtgctcatgatctccacgcctaaccgggccgacatggtcttccccaagggcgggtgggaggacgacgaggacgtctaccaggcggcgtgccgcgagaccacggaggaggccggcgtcaagggcatcatcaacagagctgcgctggggcactgggtgttcaagagcaagagcagccagaacagcaccaccagcaccagtggagcctgcaagggctacatcttcggcatggaggtcacggaggagctcgagtcatggccggagcaggacacgcacgaccggcgatgggtctctccggccgaagcctaccagctctgccggtacgactggatgcgggaggcgctcaccgcgctgctggagaggctgtcggtgctgcagccggtggcagcggcggcggcggcggccacaccggaactggcggccgaccaatctggcatgtacatgatgctccaggcgtcctcggacggaggagcggtggcgctgtgctagctcattgatggtggacgacgctgctgttgc

SEQ ID NO: 119032 - DNA, 435 bp, Zea Mays
atggagcttcatcatcgagagctgggagtttggagaacagaattattagtagtgaagaggttcctaggagtagacctgagacgtttggtgccagaaccattaaattggagttctgatgtccgaggcactgcaatatcaggaagtattcctcctgtatcaagaactaataatagttcaacagttaatccaccagcaggattcaatcaccaaaacctcaccagacgccatcctcgaaatttgtcagaggagattggtcgtctatctagagcactctgtggccatcaacccccacgcttaaggtcagggtttctgttggagcgtcagaacgatggtgtttggggcgttccttcatcaacaagggctagagaaggaagaagattaatggaggtactttgatcggttctgtttgtcctcctgaagaacaaaaaacaaaaa

SEQ ID NO: 119033 - DNA, 854 bp, Zea Mays
ttcttgaatacttctgacagtttgtttctgaacagttggagtcttgaaccacttgatgagtgcaacgatgagtgatgttacttgctgcttccgcttcccaggacagctgaactctgacctatgcaagcttgcagtcaacctgataacgttccctcggctccacttcttcatggtcggctttgtgccactcacctcatgtggctcgcagtagtaccttgtgctcaccgtccctgagctaacctagcagatgtgggatgccatggtcgctatctcacagcctatgccaaattccgtggcaagatgagcactaaggaggttgatgagcaaatgattaatgtccagaacaagaactcgtcctactttgtggagtggatccccaacaacgtcaagtccagtgtttgtgatatccctccgcgtggcctctccgtggcctccaccttcattggcaactccacctccatccaggagatgttccgccgtgtgagcgagcagttcactgctatgttcaggcggaaggctttcttgcattggtacactgatgagggcatggatgagatggagtttaccaaatctgagagcaacatgaatgatctggtgtccgagtaccaccagtaccaagatgccactgctgacgaggaggcggaatacgaggacgaggaggccatccaagacgagtaagtgtggtttgggctctgccacatttgtacccttgtttcctttcattctggggcttgcctatggtttgcttattgtattcgctcaagttatgtggtatgtagtagtactttcatgcgtagcatgctatatgctaccacaaagactttgttcacctgcactggttgatatgtgtaaca

SEQ ID NO: 119034 - DNA, 445 bp, Zea Mays
tatcgtcgctagtgatagcttcgtatcgtcgtcgagtccgtcgaacctcgttcttccctgctcgatctcgtcgaacccgaagcccggacttcaaacaaaaataagcgaggtccctgtgcatcgcttatcaagtgctcggtcgaagactttgatcgaaggtcgtcatcatttcgtgcgtcatcaaggaatcccaagaatcggatgaagacaaagctattagcgtggtattccccaagtgctcgacacaagagcggaaccagaatccttgtcgtgttcgtggataacacgtcaaatttagaatggtacgttaaataatcgtgtgatgcggaagaagacccaagtcgaccccaagcgcgggctactctgcctgatcaagtgctaggacaaggatgatcgtcaagtggacgtcgcctaacaaacactaacctagtgttactcaggcaag

SEQ ID NO: 119035 - DNA, 549 bp, Zea Mays
atcagggtggtggcatggagattctgaacatggggtggagagcggacattggactttggttgctgttgcgcggtggtgggctcttcctcagtatgggaacagtcatataactgaagactttgaggaggtgcaggtgcagagccgatggtttgggatccttgacatgggctaccgctcataggtaaatctcttggcaattcagctctcaatctattggctctcaatctatgcattacactgctccatgaggaggattgggctgcttgtggcagcaacgtgttgcacaagaccacaaacaaagggaagagctgggtgtacgacaaggctgtcgccgccaacctctacactgtcaagcaacgacggcatgttgcttcggggtcttggctgaacgatcagacatcctatgtatatctatgtataacaaacgacatctactgctactactaccataaaatactatcgactgtgcttgcgttctctcttctgtaacacaaatgagtgtaaagagacatgtgctacttccttggaacttgaaaaccttgtaaactc

SEQ ID NO: 119036 - DNA, 228 bp, Zea Mays
caaaggaagttcctccagaaagaggcaaacggctcaacacaactagcaatagctccaaataacacatctcgccctcttgaatgagaggaagcccgaaagacaaaaatctcccctggatagaggaatcaggaaatctcaaaatctctcccccttgttgacaagtgaacttatcaagcacagataggggtagaaaggaaaacttccccttgacaagagaacccccctaag

SEQ ID NO: 119037 - DNA, 1819 bp, Zea Mays
atgaagtcgccgttgcgcaggctcaggggcttcggccaccaccaccccaaggagcggagggggcaccagccgccgccggccaagctcgacgagctcgtctgcgccgcccatgaggtggaagacatgagaaactgctatgatggcttgatttcagctgcagccgctacaacaaatagtgtatatgagttttctgaggctcttgaagaactgggaggctgctttctcgcaaaaactgcactaaatggtgatgacgatgatagtggtagagtgctgatgatgctgggaaaggtccaatttgaattacaaaagtttgttgattcttatcggtcaaatatcatttatactatcacaaccccatcagagtctcttctcaaggagctacagacggtagaggaaatgaagcagcaatgcgacatgaaaagagaggcgtatgaagctacgagggcatcctatagagaaaaaggaaggtcaaggcattccaaaactgaaacatactctgcagaacaactgcaaagtgctctcgctgagtaccaagaagatgcagcgctgttcatatttcgcttaaaatcattgaggcaagggcaattccatagccttttaacacaggcttctcgccatcatgctgctcagttaagctttttcaggagagggctgaagtgtcttgaggcactcgaaccccatgtaaaagctatagctgagagacagcacattgactaccagttcagtggtcttgaggatgatgaatctgacaatgatgattacagctccgaccaggatgattgcagcgaagacggagagcttagtttcgactatgaaataaatgacaaggaccaagattttcttgcttcaggaggttcgatggatttagataaaagagatgtgaagaattccccgcagccagtaaaagaaagcatgcaggaagaggtcaaacaaaccaagggaaatgttttgactccacgagtgaagccagagttgaatgcacactcaggcaatttacaggatccatctgagagattatggcaaatgaagccatcttcagccaagcattcgtacaaacttccaatgccagttgatgacaagcaggatcccagaccagtaggtgctcccagatcacatcattcccagcagttggaaagtaagcctcgtgtctcgatgaatccgtggcactcatctccactgacgaaagacttcaggccgggtggccatgtgaaaacggtatcgagtacggaggcgacatcgacgttctcccagtcggtttctggctacaagaagacgaagagggagtcttggtctggtccaataccaagcagaccagggctaagcaagccatcttctctgaacggccacaggtcaccacccatggcacatcttgtgacgccaggaaatctacagtgccactctcggcagccatccgtgtccccaaaagtctcccccaagatgctgccacatccaacgagatcaccaacgatcagtgagctgcatgagctgcctaggcctccagcaaacgtggagtccctcaggccttctggtttgatcggttactctggtcctctggtacccaagcgtcagactgaaatgcctgcagcatcacaaaccccctcgccacttccgctgccgcccgctaccctcactcgcagctattccataccctcgaatagccagaggataccaatcatcactgtggacagactgttggaggctagaaatagcagggacggcagtgacaacttcttccccaccacttactccgttgtcactggctgatttgtcccaacagcaaggaacaaaaacaagtacaagtcgcacaaggataaagggt

SEQ ID NO: 119038 - DNA, 1474 bp, Zea Mays
aagagcccaagaaggcagctagctgagagcctccagctcaggtagtgagcgagctcctctctgcccctggcctcttcttcgttcattcttgtccactcgaggactgcccgtttgacgactgctcgatcagtgtgctagctagctagagcaagagaagggctgtaagcgaggagatcgatcgagatggctttcctcaacatggagcagcagacctgggccttcacctttggtatcctaggtaacatagtctcactgatggtgtttctttcaccgctgccgacgttctaccgcgtgtaccgcaacaagtcgacggaggggttccagtcgacgccgtacgtggtgacgctcttcagctgcatgctgtggatcttgtacgccctgctcaagcccggcgccgagctgctggtcaccatcaacggcgtgggctgcgtcgtcgagaccgtgtacctggccatgtacctggtgtacgcgcccaaggccgcccgggtgctggcggccaagatgctgctggggctcaacgtcgccgtcttcggcctcgtcgcgctcgtcaccatgcttctctccgacgccggcctccgcgtgcacgtgctcggctggatctgcgtcagcgtctcgctcagcgtcttcgccgcgccgctcagcataatgcggcaggtgatccggaccaagagcgtggagttcatgcctatctcgctctccttcttcctggtgctcagcgcggtggtctggttcgcgtacggcgcgctgaagaaggacgtgttcgtggcgttccccaacgtgctgggcttcgtcttcggcctcgcgcagatggcgctgtacatggcgtacaggaagcccgcggcggcgctggtgataataccggagcagtccaaggaggaggtggccgagggcaaggcaagctgcggcggcgccgaggtgcaccccatcgacatcgcggaggtccacgacctgcagaccgtggtcgtcgacgtagacgtggagcctgtcacctacgccgctgcgtccggtatggtcgacggcagtgtcggaaggcctagggcgccggaggagctggtgatcaagcccgacatggtcaccgtcattgcggcggaggcgtaggttggttaagtagtagcagagtgagtcgatatcgatctgcctacctacagtacagccgcggcggccagatgtactggcagcgttcatgcaggctcgttgacttgaccggtcgagatggttggagtagccgggccgagtagcccagacgtactggcctgtgtcatgaaccggcaagctgataacgcgagcgagagggacgttggttcatcacattcagaagacggcaagctgatagtttctgtctctaggtctctctgtgtgtgtgtgtctgtaatcgactccatcagcttgccgcctttcctgtcctattctgattgttttcatccattgatgccgtcgtcgcagtaataaacttggaacgaacgattccacacta

SEQ ID NO: 119039 - DNA, 886 bp, Zea Mays
ccaagaaggcagctagctgagagcctccagctcagtgtgctagctagctagagcaagagaagggctgtaagcgaggagatcgatcgagatggctttcctcaacatggagcagcagacctgggccttcacctttggtatcctaggtatacattcattctgctgcattgtttccttctggctcccatgcccttggagataaatggatccgccgaaagccaaacttttagtgccggtggttagcccaaacaaaggaagcagagccgtcatgcgtcatacatgctacatgcatgtaccttcacgagaaccgtaccgtgcaacggcgcgtgtatatgatatgaggacttcaaccaattaagcaatttattattaattgactgctttgctttgctttgcaggtaacatagtctcactgatggtgtttctttcaccgctgccgacgttctaccgcgtgtaccgcaacaagtcgacggaggggttccagtcgacgccgtacgtggtgacgctcttcagctgcatgctgtggatcttgtacgccctgctcaagcccggcgccgagctgctggtcaccatcaacggcgtgggctgcgtcgtcgagaccgtgtacctggccatgtacctggtgtacgcgcccaaggccgcccgggtgctggcggccaagatgctgctggggctcaacgtcgccgtcttcggcctcgtcgcgctcgtcaccatgcttctctccgacgccggcctccgcgtgcacgtgctcggctggatctgcgtcagcgtctcgctcagcgtcttcgccgcgccgctcagcataatggtttcattcttctgttgccttttggtttcctttgtctgttattagttaaatggtttgtaatcgttcaataaactaactacc

SEQ ID NO: 119040 - DNA, 387 bp, Zea Mays
atggcgaggctcggacgcacgacgaaggtgctgcgcaggctcgccgcgtctctcctcctgatgacgacgtccgtgcatggtggggcatggtcggcgtgccgatggcgaggctgcacagctcctccacgcaacgaccgggcgcccgcggggaagcgtcggcgaggcatccgtgctagcgagccgcgcgggccaccacgttgggctagccgcactggctggccacgccgggccgccgcgcaggcgagccgcgctagccacgctggctgcacgccgcgggccgcaccggctgcgcgccgcgctggccacgctggctgctcgccgcgggcagcgccggctggacgccaggacgccgggacctggggctggggcaggacgaggcaggggtag

SEQ ID NO: 119041 - DNA, 517 bp, Zea Mays
tttttgtttatcatgcatattattcctggaaattaagattcagaatcaagggagctgttaactgcaatacacaagtttattcctctagaaaatgagacgacaattcttttggttagttccacttcgcacatcttcattcccacaacaaacaatcacgaccatcaactgtttctaagcaggaataccagaagtagcaaataaacaggtttatccaaaacacccttagatattccttttgataatcaactcccatacacgcagttcaatatcccagtgtcaaaacgtagtacccttgcatccagtgcacttcgttcaaatcttatgaggattctggcaaaaacgatttttcatagcacaggtgtttatggggttgagcaatatcctcagggcagaaggtcaccaaagggatgcggccaacacagagctgtcacttcttcgaggaaccaaacccaccaaaacccatcatggcagcgatgtcaggatcaacgtcctcaggttcatgttgggttgcctgttc

SEQ ID NO: 119042 - DNA, 375 bp, Zea Mays
atgaccacaaaccggagagccagcgagctcctttgcttgaggaggttcattcttttagcttacaagaggttatcagatatgcatatttgtaatgaactcttttccccgacaatatttggattgattcagtccattaacaggttcaagctctgcaaggtgatgtctgttctgtttggccagaaaggcatcccctacctgaacacctacgacgaccgtaccatccgctaccccaaccctctcatcaaggccaacgacaccatcaagatcgatctggagaccaacaagatcatggacttcatcaagttgtatttgccctttcatggacttcaccaagttatatacttagttaggctcaatgttagcacaaacagttga

SEQ ID NO: 119043 - DNA, 814 bp, Zea Mays
cctttattcaaaactgaaattgtggaaataatagtacataactaagcaactttaagttcataacttggcaactacctacatgacaaactacaaaccataaagatagttattgtgctctaagcaataatagtaggcagcccacaactagctattgtaggcatcctattataacatctagctattgtaggcagcccacatctcaagtgcggtctgatctcttagagcacttccatcacttgattctgtgtcattgagatagttgatatctccctctggaacatcaacatattgacttggagagatgtaatccggttggttgtcaagccatctttcgtctccattttgccctctaattatgttgtgaaatgcaacagttgcagctgcgatcttaatttggttctctatgggatgaaatgtgcctacttttagaatcgggaaccttttctttagaacaccgatggccctctctatatggttacggagaattgcatggcggtggttgaacaactctctgtagttcgcataaccactttgtgatgaacgacgcctcctaaactcgttgagatggtatcgaacccctctatatggtgcaatgaaggatgatgtatttgcataaccaccatctactagataaaactttccttctggcacactaaatcctttgctaatagcagatcgaagcacccctgaatctgaggctgacccctcccatccacatgaaacaaatgtgaaattaaggtcaaagtcgcaggctaccataacattgtatgaaagagttcctttcctgtttctatatggagcagctctatgttct

SEQ ID NO: 119044 - DNA, 1104 bp, Zea Mays
tttatggcaactaattcttagttatatgcgacatcacacatatgaacaactttttgtgtcctgaccaggaacaatagatatcataccaagaaaacatatgggcaaacaacttgaatcgttaagcagaggactaggaatgaagattccaatccaaattactcaagggagcaagaggccagagccacccattcaagctgctaagtttgcatcagaggggggaatcacattgaggcagcacattccaatatttcaccactggaaggagtacaataggaaagatattgaacctaaaataaaaaaaatattggaaaacatactgctcaattcaccatggacaatgatagcaaggcagtggaagatgcatgtctagatatgctaaaggttggacaacaccaaatgaggtatagactataacaaaagtatttcaatgggatacctgctaatcaagtgaggactacattgccgatttcaagcatgtctgatgaggactggagaaagttggtggagaagtggtctaccccaaaacacaaggatagttgtatgaagaataaacttaattgtgaaaaagtacaatatgaacaatgcacaggatcccagtcatatattgcaaaagcttatttactgaaacaagagaaatataaggatgttgaactgagtgcaatagatcttttcaaggacatgcattgcagtaagaagaaaggtttttctaaaaatgtaaataaagcaattgttgacatggaagcaatggtgataacaccagttgaggatggacaacagcagaagtctcctatggaagttgtttctgaagtgctagggggcttcaatttcattctacagaatgttggtctacaagataactccaagaaaagctccacaacaactgtttctgcaaaggttcaaggacttcagaatcaattagaacctgagaggatagaaaaagatggacttcaggaagaagtagaaaccttaaaggctcaggcacaggcctcaaaggagaccatggacaatatgaagagatcgatggaagaaaataatagtcttaagcctccatcaactgttgagcttcaatcgaagccaagcacccccatcttaagtctgctatag

SEQ ID NO: 119045 - DNA, 1940 bp, Zea Mays
cgtcgcttgcatctccccgccgccgccacgcgcccacgcttccttccgaacaaagctgtcgtgctgcctttcttgccgtccaactcaggcagccgtcctagtcctcgttggtcctcatctgctgcccttctacggtggaggagagaagaggagaggagcggagcggagatccagccgctttccggctgctttcttcttctaattgcggagcaagttccgtcaatactgcttgtggtgttgcgccaatttaagttcctgctgtccgcaaaaggagagcttccgcagctcctatggcaaagcctcccaatagcattggccgtagcagcatgccaagatcgaatgagggtttgaggctcatattttcggcagttataggtatcatgctgggttacctgtttgggatctccttccctacagtcaacataaccaagcttcacttcccttcgagtatcatatcctatattgaagacaggaactctggcatcacaacccagacattgttgaaccatgcttgggcatctgcaaacaatcgtaaaaagaatagctctgaatctaacactgatgaaattcccaagatttatgttcctacaaacccaaaaggtgctgagagacttccaccaggcattgtagtgtctgaaacagatctttatccccgaagactatggggtgatcctagtgaggaccttactagcgagccgaggtatcttgttacatttactgttggtattgggcaaaaggcaaatattgatgcagcagtcaaaaagttttcagacaaattcactattatgctgttccattatgatggtcggactactgagtgggatgaatttgagtggtctaaaagagcaatccatgtgagtgtcaggaagcaaacaaaatggtggtacgcaaaacgatttttgcatcccgacgttgttgccagatatgattacattttcatctgggatgaggatctaggtgtagaacatttcaatgcagagaagtacattgagcttgttcgaaagcatgggttggaaatctctcagcctggtttacaacctgataaaggactaacatggcaaatgactaaacggcgtggtgaccaagaagttcacaaagtaactgaggagagaccaggctggtgcactgatccacatctaccaccatgtgcagcatttgttgaaattatggcaacggtgttctctagaaatgcatggcgctgtgtatggcatatgattcagaatgacttggtccatggatggggtcttgactttgctcttaggaaatgtgtggagccggctcatgagaagattggagttgttgatgctcaatggattgttcatcaagcagttccttcacttgggaaccagggcaagtcagataatggaagagcaccatgggaaggggtaaggtggtacttgtactatgttatttggttttttcacagtatattatatttcaaatgcatgatttttactgctacggcatcaactatgtatccatttggattttctttaattgtctacacttaattgtccaccataggtaagagcacgctgcagaaaagaatgggggatatttcagacaaggctggctgatgcagagaaggcttattacttggagagaggcatcacgcccccgaattcaacagtagtttagatgaatacatgctcctcacatgccacggcaaggtttctgttgcgggaatctgctgcaaactggcatgttcatcgaagctgctgcaacccagggctacattaggggtcccacgaatcgccatgattgatcttagtgtcattcactttgttttaatgtcatttttttggttagtgagactagatgggatgtaagtaggagatataacagggactgtgatgacacccatttgtgtattgatgacctgatgcaatatggatgctgatagtccgtttctcagtaatcagtatgtaaattgtttgctg

SEQ ID NO: 119046 - DNA, 1818 bp, Zea Mays
cgtcgcttgcatctccccgccgccgccacgcgcccacgcttccttccgaacaaagctgtcgtgctgcctttcttgccgtccaactcaggcagccgtcctagtcctcgttggtcctcatctgctgcccttctacggtggaggagagaagaggagaggagcggagcggagatccagccgctttccggctgctttcttcttctaattgcggagcaagttccgtcaatactgcttgtggtgttgcgccaatttaagttcctgctgtccgcaaaaggagagcttccgcagctcctatggcaaagcctcccaatagcattggccgtagcatgccaagatcgaatgagggtttgaggctcatattttcggcagttataggtatcatgctgggttacctgtttgggatctccttccctacagtcaacataaccaagcttcacttcccttcgagtatcatatcctatattgaagacaggaactctggcatcacaacccagacattgttgaaccatgcttgggcatctgcaaacaatcgtaaaaagaatagctctgaatctaacactgatgaaattcccaagatttatgttcctacaaacccaaaaggtgctgagagacttccaccaggcattgtagtgtctgaaacagatctttatccccgaagactatggggtgatcctagtgaggaccttactagcgagccgaggtatcttgttacatttactgttggtattgggcaaaaggcaaatattgatgcagcagtcaaaaagttttcagacaaattcactattatgctgttccattatgatggtcggactactgagtgggatgaatttgagtggtctaaaagagcaatccatgtgagtgtcaggaagcaaacaaaatggtggtacgcaaaacgatttttgcatcccgacgttgttgccagatatgattacattttcatctgggatgaggatctaggtgtagaacatttcaatgcagagaagtacattgagcttgttcgaaagcatgggttggaaatctctcagcctggtttacaacctgataaaggactaacatggcaaatgactaaacggcgtggtgaccaagaagttcacaaagtaactgaggagagaccaggctggtgcactgatccacatctaccaccatgtgcagcatttgttgaaattatggcaacggtgttctctagaaatgcatggcgctgtgtatggcatatgattcagaatgacttggtccatggatggggtcttgactttgctcttaggaaatgtgtggagccggctcatgagaagattggagttgttgatgctcaatggattgttcatcaagcagttccttcacttgggaaccagggcaagtcagataatggaagagcaccatgggaaggggtaagagcacgctgcagaaaagaatgggggatatttcagacaaggctggctgatgcagagaaggcttattacttggagagaggcatcacgcccccgaattcaacagtagtttagatgaatacatgctcctcacatgccacggcaaggtttctgttgcgggaatctgctgcaaactggcatgttcatcgaagctgctgcaacccagggctacattaggggtcccacgaatcgccatgattgatcttagtgtcattcactttgttttaatgtcatttttttggttagtgagactagatgggatgtaagtaggagatataacagggactgtgatgacacccatttgtgtattgatgacctgatgcaatatggatgctgatagtccgtttctcagtaatcagtatgtaaattgtttgctgtataccagctgtgtgcaact

SEQ ID NO: 119047 - DNA, 1821 bp, Zea Mays
cgtcgcttgcatctccccgccgccgccacgcgcccacgcttccttccgaacaaagctgtcgtgctgcctttcttgccgtccaactcaggcagccgtcctagtcctcgttggtcctcatctgctgcccttctacggtggaggagagaagaggagaggagcggagcggagatccagccgctttccggctgctttcttcttctaattgcggagcaagttccgtcaatactgcttgtggtgttgcgccaatttaagttcctgctgtccgcaaaaggagagcttccgcagctcctatggcaaagcctcccaatagcattggccgtagcagcatgccaagatcgaatgagggtttgaggctcatattttcggcagttataggtatcatgctgggttacctgtttgggatctccttccctacagtcaacataaccaagcttcacttcccttcgagtatcatatcctatattgaagacaggaactctggcatcacaacccagacattgttgaaccatgcttgggcatctgcaaacaatcgtaaaaagaatagctctgaatctaacactgatgaaattcccaagatttatgttcctacaaacccaaaaggtgctgagagacttccaccaggcattgtagtgtctgaaacagatctttatccccgaagactatggggtgatcctagtgaggaccttactagcgagccgaggtatcttgttacatttactgttggtattgggcaaaaggcaaatattgatgcagcagtcaaaaagttttcagacaaattcactattatgctgttccattatgatggtcggactactgagtgggatgaatttgagtggtctaaaagagcaatccatgtgagtgtcaggaagcaaacaaaatggtggtacgcaaaacgatttttgcatcccgacgttgttgccagatatgattacattttcatctgggatgaggatctaggtgtagaacatttcaatgcagagaagtacattgagcttgttcgaaagcatgggttggaaatctctcagcctggtttacaacctgataaaggactaacatggcaaatgactaaacggcgtggtgaccaagaagttcacaaagtaactgaggagagaccaggctggtgcactgatccacatctaccaccatgtgcagcatttgttgaaattatggcaacggtgttctctagaaatgcatggcgctgtgtatggcatatgattcagaatgacttggtccatggatggggtcttgactttgctcttaggaaatgtgtggagccggctcatgagaagattggagttgttgatgctcaatggattgttcatcaagcagttccttcacttgggaaccagggcaagtcagataatggaagagcaccatgggaaggggtaagagcacgctgcagaaaagaatgggggatatttcagacaaggctggctgatgcagagaaggcttattacttggagagaggcatcacgcccccgaattcaacagtagtttagatgaatacatgctcctcacatgccacggcaaggtttctgttgcgggaatctgctgcaaactggcatgttcatcgaagctgctgcaacccagggctacattaggggtcccacgaatcgccatgattgatcttagtgtcattcactttgttttaatgtcatttttttggttagtgagactagatgggatgtaagtaggagatataacagggactgtgatgacacccatttgtgtattgatgacctgatgcaatatggatgctgatagtccgtttctcagtaatcagtatgtaaattgtttgctgtataccagctgtgtgcaact

SEQ ID NO: 119048 - DNA, 617 bp, Zea Mays
ctttattaatgtgatttcgactttagagctatatgcactactctcttttactctctatttaattatatagccggctcatgagaagattggagttgttgatgctcaatggattgttcatcaagcagttccttcacttgggaaccagggcaagtcagataatggaagagcaccatgggaaggggtaagagcacgctgcagaaaagaatgggggatatttcagacaaggctggctgatgcagagaaggcttattacttggagagaggcatcacgcccccgaattcaacagtagtttagatgaatacatgctcctcacatgccacggcaaggtttctgttgcgggaatctgctgcaaactggcatgttcatcgaagctgctgcaacccagggctacattaggggtcccacgaatcgccatgattgatcttagtgtcattcactttgttttaatgtcatttttttggttagtgagactagatgggatgtaagtaggagatataacagggactgtgatgacacccatttgtgtattgatgacctgatgcaatatggatgctgatagtccgtttctcagtaatcagtatgtaaattgtttgctgtataccagctgtgtgcaact

SEQ ID NO: 119049 - DNA, 116 bp, Zea Mays
caatttatttatttatttatatcattatttttctctgatacaaattttgggctttacatgggttcctggtgtcacggaacctcccaaggtattaggcccacctacatgcaggtgcg

SEQ ID NO: 119050 - DNA, 1254 bp, Zea Mays
atgcgccccctcctccgcgttaacctcccccgcgccctcggcaagcgctccatggcaagtgtcctctcccacatggcaatctccctcgatccgcggcaatctcggcgcgtcctcaccaaggacgtcgcggcaagctccctccgcgcccttggcaagctccctcccccgtgtcaatctcccccgcgccctcggcaagcgcgtccacctcagatccatgtcccatccatcttgcgccctagatccgcgttcgcatccacgctctccatggaagtcgtccgtgatgctcgcgtcatccctaaaccccgctcggtctccatagaagggacctccacctccgccccggatctgccttgccatccacaaatctggcctcaccctggattatgctcgcgtgaagggccagtactcgacgcaggcggcccagagcgcggcgctggtcacgtatcagtgcctcagcggcagccccaagaacctgcctccgctgctgaggccgacgaccaggctaccgagcccgacgacaagatgggcgaggagtggatttttgagacgtggttgacagcaatggatagtaggttgccattttccttgactaccgatgaaggtaagggaatagcagctgctgttgcaaaaggctccattcttgacaagtatggcctgagagaccataattggctgcagtcactgtatgaaataaggcacaaatgggttcctgcatacctaaccagcttcttcttcgctgagctttccttaactcacatagtagaaacagtcacaatgcaacattatgccgtcaaggttcaggacggatcatacatgaaatactacgttgaaagaaacggtgatcctcctactaggcacaccgttttctacgacgttgctgagaagaaggcctggtgcgagtgctgcaggtttgctttctcggcgatactgtgcaggtatgtccttagtgtattcctcttggccggtgtcatcatgcttccagagccttgcatcacaaaacgatggacaaagaaggctaagtcaaggcctgaactcatcgggcttaacgttggaaatggatgtggcagtgcagattctgtggcatcaagatataatgatctcgttcgtgatgcgatcaagtgtgcagagaagggagctgtatcgaccggcgcctttagagttgcaaaggaactgctgcgcaaagccttcatggatatcaggggtcacggggagaaactgtgcaaggatgctctgcactctgcatcaagccgatag

SEQ ID NO: 119051 - DNA, 257 bp, Zea Mays
cacatgccccgctctgccttcggcggccacaagcgcgacgccgaccagctcaccccacgcccagcaggccagtccagacaaaaaccgacaggaggagcaacaaccgacttcttcggttgaaccagacaacggcaaggctcctgcgcgagtttaccgtctcccagccggacgagaagccagcggccgcaacaggctcctctgacattctggccttcgcgccctccgtcgatcgggtggactctcgtctcgagtagcct

SEQ ID NO: 119052 - DNA, 677 bp, Zea Mays
ggttttagcacatggggaattcgaggtaccttgctaaaatactccataagcgcatacgtacagagcgcttgacaacgcgccgccagacagagctctgtcgcgtccgcgtgcctgccttcctgttccggcgaccgttcaggcgacggagacgaggcgacgtgagcagagggagcagtagaagcggcgtcggatgcggaagcagagcggaacgaagcagagccgcggcgtgctctccacgtcggccgctaccaccacgccgccgcagtacgggcaccgcccgggcacctgtatgatatatacaattacagaaagcttcggctttaggatgaaggcgtgtaatatgaggatacaacccgaaggtaacatggatgaacgccgaagctatggttaaaggagcttcgacttggcatgttaacgaagatgaaggacgaaaccgacctaagggagaaaagactacttagtccttgatagtttgcattatgattaagtgtagatatcaggggcatgggtgtaatcttatccaggctgcgtccagtgcctataaatagatgaacagtaacaccgtactgttcacgctgagctgtaatcgcacttgtgtcactcttgcattttcaccttctgacaagtcgaaggtaccaatgtaatataagtaatatgaatatttactcatatttatg

SEQ ID NO: 119053 - DNA, 276 bp, Zea Mays
gaaaatgaaaaccagagggaaaccatatttttcctagggaaatttggatccataccattaaaagatcaccactttggatccataccattactatctcacttacatgtaggtccacatgagtcaatgacatgtggggtccatggtatatatctaaagtttggatcttttaatggtatagatccaattgttcctttttcctagcatgcctaagttatgtagttcacaagaaaaatccgttgtcccatagtccagtgaaaagaaattgcactcacaatt

SEQ ID NO: 119054 - DNA, 222 bp, Zea Mays
atgcggcccttggacaagctgccctcgccggccgtgaccgaggagaagaaggacgtggaggtgacggaggtggcgccggccgacacggccaggttcggcttggtgaagtccagggtcaggctctggggctgcgccgcgccgacgggagccaccacgtgcgccacggggagaggcaccagtggcggctcgacgacgggcccgcagcggaagcgggcatggccg

SEQ ID NO: 119055 - DNA, 1766 bp, Zea Mays
atatgggaaatgtattttactcttcatgcttttccccttcgtgcaagcaaagctaaacaatacccgtcttgccttcaaatcgaactcctcccccgatcgatcccaatcgaacccaccaagccgataccctaaccctcgcccttctcgatgtcggccgccaccaccggcccagccccttcagtagccactccgatggcgccccctccgtcctacccggcctcctccacggcctcttcctccatctccgcgtccgccgaggaggaggaggacctctatggccgcctcaaatcgctccaacgccacatggagttcgtcgaaatccaggaggagtacgttaaagacgagcagaagaacctgaagcgcgaactccttcgtgcgcaggaggaggttaagcggatccagtctgtaccgctcgtcattggccagtttatggagatggtcgacggcaacaacggcatcgtgggctctaccactggcagcaactactacgtgcggatcctcagcaccatcaaccgcgagttgctcaagccgtcagcgtccgtcgcgttgcatcgtcactccaacgctctagtcgacgtgctgccgccggaggccgactccagcatctccttgttgggatcgtcggagaagcccaacgtcacttacaacgatattggaggatgtgacatccaaaagcaagaaatacgggaggcggttgaattacccttgactcatcatgagttgtacaagcagattggtattgatcctccaagaggggtgcttctgtatggtcctccgggtactggcaagaccatgcttgccaaagcagttgcacatcataccactgctgcttttatcagggtcgtcggttcagagtttgttcaaaagtacttgggtgagggccctagaatggtgcgtgacgtgttccgtttggccaaggagaatgccccagcaatcattttcattgatgaggttgatgctatagccactgctcgttttgatgctcagactggtgctgaccgagaagttcagcgtattcttatggagctactcaatcagatggatgggtttgatcaaacagtcaatgtgaaggttataatggcaactaatcgggcagacactctagatcctgctttgttgcgtcctggtagacttgacaggaaaattgagttccctctgccagaccggcgtcagaagaggcttgtttttcaagtttgcactgccaaaatgaacctgagcgatgaggttgatttggaagattatgtttccagaccggataagatcagtgctgctgatattgctgctatctgccaagaggctggcatgcatgctgtccgcaaaaaccgatatgtcatcctccccaaggactttgaaaagggctaccgaaccaacgtgaagaagcccgagacagactttgatttctacaaatgagtcaacccagagtgttgaactcgtttctttctgcaaatgagtcaacccagagtgttgaactcgtttcttgtttatcaattgattatcttttaccatcagctgagtttatggatagttgccattacaaatattcaagttcctcaatgatgatgtgtgttctgtaatgattttttggattgtttgcctgtcgttcatggtgatctgcttcatcagatttaaggggtgtttggtttatagagactaatttttagttcatctattttattatattttagtttctaaattactaaatatggaaactaaaactctattttagtttatgtattgtatttacgccctatttgatttctttagtc

SEQ ID NO: 119056 - DNA, 1625 bp, Zea Mays
gtattttactcttcatgcttttccccttcgtgcaagcaaagctaaacaatacccgtcttgccttcaaatcgaactcctcccccgatcgatcccaatcgaacccaccaagccgataccctaaccctcgcccttctcgatgtcggccgccaccaccggcccagccccttcagtagccactccgatggcgccccctccgtcctacccggcctcctccacggcctcttcctccatctccgcgtccgccgaggaggaggaggacctctatggccgcctcaaatcgctccaacgccacatggagttcgtcgaaatccaggaggagtacgttaaagacgagcagaagaacctgaagcgcgaactccttcgtgcgcaggaggaggttaagcggatccagtctgtaccgctcgtcattggccagtttatggagatggtcgacggcaacaacggcatcgtgggctctaccactggcagcaactactacgtgcggatcctcagcaccatcaaccgcgagttgctcaagccgtcagcgtccgtcgcgttgcatcgtcactccaacgctctagtcgacgtgctgccgccggaggccgactccagcatctccttgttgggatcgtcggagaagcccaacgtcacttacaacgatattggaggatgtgacatccaaaagcaagaaatacgggaggcggttgaattacccttgactcatcatgagttgtacaagcagattggtattgatcctccaagaggggtgcttctgtatggtcctccgggtactggcaagaccatgcttgccaaagcagttgcacatcataccactgctgcttttatcagggtcgtcggttcagagtttgttcaaaagtacttgggtgagggccctagaatggtgcgtgacgtgttccgtttggccaaggagaatgccccagcaatcattttcattgatgaggttgatgctatagccactgctcgttttgatgctcagactggtgctgaccgagaagttcagcgtattcttatggagctactcaatcagatggatgggtttgatcaaacagtcaatgtgaaggttataatggcaactaatcgggcagacactctagatcctgctttgttgcgtcctggtagacttgacaggaaaattgagttccctctgccagaccggcgtcagaagaggcttgtttttcaagtttgcactgccaaaatgaacctgagcgatgaggttgatttggaagattatgtttccagaccggataagatcagtgctgctgatattgctgctatctgccaagaggctggcatgcatgctgtccgcaaaaaccgatatgtcatcctccccaaggactttgaaaagggctaccgaaccaacgtgaagaagcccgagacagactttgatttctacaaatgagtcaacccagaagtgttgaactcgtttcttgtttatcaattgattatcttttaccatcagctgagtttatggatagttgccattacaaatattcaagttcctcaatgatgatgtgtgttctgtaatgattttttggattgtttgcctgtcgttcatggtgatctgcttcatcagatttaaggggtgtttggtttatagagactaatttttagttcatctattttat

SEQ ID NO: 119057 - DNA, 1473 bp, Zea Mays
tttaaccaaggcagcacgacggcagcgacgacgacatacaacaacacgacggtaggggtgatgatggcagcgccatcgggtggtggatgcagtggctgtcttgactgcctgcatgatattgtgcatgcactatcgatgggatcatgcctgacagtagagcagcggcctgccatggctacgggaggtgcgcacaaagggagagatgtaaaagagaggaaggaaaaggtggagggtaggataataggaaatggagtgggtaatttggcttgcatgttcacgcgacaggggaagaagggtaccaaccaggatgccatggttgtttgggagaattttaatggaaggtcagacacgattttttgtggagtttttgatggccacggtccgcatggccatattgtagcaaggaaagttagagatactctcccttcgaagctgcgtgctctgatatatgatgactttggggagagccccatttgcaattcagatggctcaattctagaagaaactttatctccgtacgctgatgaagaagacaagtctccagtgtctgtagaaaaaggagaacgtcaggaatcctttttgtcaatgaaagattcattccggaaggcttttagggtaacagacaaagaacttaaattgaaccggaatatcgatagcatttgcagcggaagtacagcagttactttaatcaagcagggccaggatcttattgttgcgaatttaggtgactctagggctgtattaggaaccagagatcaaaacggccgtttggtagctcatcagttgacagttgatttgaaacccgatcatccaagagaggcaaggagaatcaggcgatgtaacggaagggtttttgctcatcaggatgaaccagacgtatctcgcttgtggcttccaaattgtaactcccccggtctagcaatggcacgagcttttggcgatttctgtctcaaggattttgggttaatctgtgtgcctgaagtcacctatagacaaatcagtaagaaggatgaattcattatccttgctacagatggggtgtgggatgtcttgaccaatcaggaagtcatggacgtagttgcttcatgctctgagcgttcgtctgcagctcgttctatcgttgatctagcaaatcaggcatggaggtttaaatacccaacttccaaaactgatgactgtgcaacgatatgtctttttctcgacgtagaggacaaggctgctggcttgtcagtgtcgtcatctgttgctagcaagggaactggatcacaagctcagccaaggaagcccaggctccatactagtgtaccacctgaagatgtagatgatgggagtgaatcaaatatcagtggagatgaaaggtccttggacagcttcactaggttgaacacactactggcactaccaaagctcggagacacaagtctgaaaataaaatgaagcttattgccttcgcatgcagttagcagcatcagt

SEQ ID NO: 119058 - DNA, 497 bp, Zea Mays
gagcatagatctacacgcaagagtccgttctccattgtttacacaaaagttccaagacatgtggttgatttattaaagctaccctcaagagagaattcaaggtcagcaacaatctttgctaacaactattctgatttgtttaaagaagttcatgacgtcctagaagcctcaaatcagaaatacaaacagctagcagacaagagaagaagaccaatgtcatttgaagttggtgatagggactaatggtgtatctcagaaaggagagactaccagcaggagttcatggaaaattaaggcaaagaaaatatgggccattttctattttgaagataagtgataatgcatatgtagttgatctgccaagagaaatgaatatttcaaatactttcaatgtggctgatatatcactctatcatccagaacaagcactttatgaagaaaactcgaggtctagtttcaatcaagtaggggagaatgatgagggacatcacatgcaa

SEQ ID NO: 119059 - DNA, 520 bp, Zea Mays
ttgtatccaccactatatgaatggaacttgatgttcttctttagatcttggactagatctttgctttgagctttggattgagctctcgctgtctgtggattcagactagcctttagggctgtacctactagcacgttgaagctgttccttcaacattttgtgatatctacctatcagcaccttggagaggttcctccaatatagtgtgttgcaccactcacagttggagtggccttatgaagattaaggacctattcatcattaaaggcacctttcaagtacatgatgggtcccaagtgcgtttctgggaggagaattggctggagttgggggcgcttaaatttcgattccctcttctgtataacctagcaaggaggaagaattcaagtattcaacagttgcttttgtcttttcctcggtacccttaaggctgtctccagcaacgtcctctatattcatcctctatatttgtcttttacagtctcttctaaaagatttcatcctctatatctcatttctc

SEQ ID NO: 119060 - DNA, 2168 bp, Zea Mays
ccgatccagcctcacaccactgttcacggatgaaagcatcaatcagatcacggctccagatccgccgtacgcaaagccccataccccaataccggtgccgccttcgcctcgcactacacctctccctccctccgcctccatctccttcgccaccagaacccaagcgctgccccacacgccgccgcagcccgcacgggagccgcgcgccgcaccaaaaccctaggtctcctccgtcccccgatccatcgccttcatggccgcgccgcaacctgtcgcccaggcccccgaggcaccgccgtctgcgcaagtggtgggcaacgcgttcgtgcagcagtactacctcgtgctgcaccagtcaccggatctggtgtaccgcttctatcaggaggctagtcgcctcggccgccccgcatccgccgccggagccgccggcatggactccgtcaccactatggaggcaatcggcgagaagataatggagatggacgtgtcaaaagcggagatcaggacggtggactcgcaggagtcgcttggcggcggcgtcactgtgctcgtcacaggccacctcaccggccgtgacggagtgcgccgcgagttctcgcagtccttcttcctggcgccgcaggagaagggctacttcgtgctcaacgacatgttccgcttcgtcggggaaatccctgcccctaccgctgtagaggcgcagccagaggcggatgctgtagtcctgtctgtggctgccaacggcacatctactcttgctgtggagcctgccacccctgatgaccatgccgtgccacagcaggaacatcatgttgtggaccgatcaccacctcaacctgaggaggaggaggaggctgaggtttacgatccgccgccagaggaagtagtggatgaggaacaacctgttcctgaagtgataaatgaagttccaaacaacgtggcagctgttttggcaactacagttgcccctgtgttgcaggaggaggcaccaaagaagtcatacgcctcaattgtcaaagtcatgaaagaagtttcattgcctgctcctgcacctcctactaggactgcaccgcccaaaccagagaagcagtctcctgctcttgctcctgtcaaagatgtgctgccttttagttccaaccctgagaacggcaatatccaagagcctgaagatgacgcgcatgcaatctatgtgaggaatttacctctaaatgccactgaaactcaactggaggatgagttcaagaagtttggtaccatcaagcaaaatggcattcaagtcagaagcaataagatccaagggttctgttacggatttgttgagtttgaggattctacatctgtccagagtgctatagaggcttcccctgtgatgattggtggtcgtcaatgttacattgaggaaaagaggacacctggttcacgaggtcagtctatatacaaattgatacttaatcttatgcagtgtctatgccaatcatagttcttaaggcggtaaggtgagacaaggcgttgggccaccgcctggacgcctaggcgacgcctaggcgcttactaaggcgagcaaggcgacgccttaccaattaaacaaaagacagaacaacaacatatatgaggaagaaaaagaaaaagggagaaagaaaaaaaagaaggaaggggtagaaggagatggcccagcccaccaggcaggcaggcagcccatatatcctccggttagggttgctgagttgctcccatctcactgtcgccgctcgtccacaaccatgcatcgctgctcctgctcccccaagctcggcggcgctcccctgagtctcagcggcggcgcttccccgagctctgcaccgccgctcccccgagctctgcgccgccgctcgcccgagctcggcactccctgcgccgccgctcccccgagctcggcactctctgcgccgccgctccctcgatcccgctccccaaagtcgtctctgctaggcttcttccccctcccctcttgccgactcttggctaggcgacggggacgcctagactttttggccgcctggacgcctaggcgtcgcctaggcgacgcctttgaaaccatgatgccaattatatcattgaatcatatgaatctgatgactcactaaatgactgatgatcctgctgatcctaggagaatggagatggacgaa

SEQ ID NO: 119061 - DNA, 1392 bp, Zea Mays
aatcagatcacggctccagatccgccgtacgcaaagccccataccccaataccggtgccgccttcgcctcgcactacacctctccctccctccgcctccatctccttcgccaccagaacccaagcgctgccccacacgccgccgcagcccgcacgggagccgcgcgccgcaccaaaaccctaggtctcctccgtcccccgatccatcgccttcatggccgcgccgcaacctgtcgcccaggcccccgaggcaccgccgtctgcgcaagtggtgggcaacgcgttcgtgcagcagtactacctcgtgctgcaccagtcaccggatctggtgtaccgcttctatcaggaggctagtcgcctcggccgccccgcatccgccgccggagccgccggcatggactccgtcaccactatggaggcaatcggcgagaagataatggagatggacgtgtcaaaagcggagatcaggacggtggactcgcaggagtcgcttggcggcggcgtcactgtgctcgtcacaggccacctcaccggccgtgacggagtgcgccgcgagttctcgcagtccttcttcctggcgccgcaggagaagggctacttcgtgctcaacgacatgttccgcttcgtcggggaaatccctgcccctaccgctgtagaggcgcagccagaggcggatgctgtagtcctgtctgtggctgccaacggcacatctactcttgctgtggagcctgccacccctgatgaccatgccgtgccacagcaggaacatcatgttgtggaccgatcaccacctcaacctgaggaggaggaggaggctgaggtttacgatccgccgccagaggaagtagtggatgaggaacaacctgttcctgaagtgataaatgaagttccaaacaacgtggcagctgttttggcaactacagttgcccctgtgttgcaggaggaggcaccaaagaagtcatacgcctcaattgtcaaagtcatgaaagaagtttcattgcctgctcctgcacctcctactaggactgcaccgcccaaaccagagaagcagtctcctgctcttgctcctgtcaaagatgtgctgccttttagttccaaccctgagaacggcaatatccaagagcctgaagatgacgcgcatgcaatctatgtgaggaatttacctctaaatgccactgaaactcaactggaggatgagttcaagaagtttggtaccatcaagcaaaatggcattcaagtcagaagcaataagatccaagggttctgttacggatttgttgagtttgaggattctacatctgtccagagtgctatagaggcttcccctgtgatgattggtggtcgtcaatgttacattgaggaaaagaggacacctggttcacgaggtcagtct

SEQ ID NO: 119062 - DNA, 1475 bp, Zea Mays
aatcagatcacggctccagatccgccgtacgcaaagccccataccccaataccggtgccgccttcgcctcgcactacacctctccctccctccgcctccatctccttcgccaccagaacccaagcgctgccccacacgccgccgcagcccgcacgggagccgcgcgccgcaccaaaaccctaggtctcctccgtcccccgatccatcgccttcatggccgcgccgcaacctgtcgcccaggcccccgaggcaccgccgtctgcgcaagtggtgggcaacgcgttcgtgcagcagtactacctcgtgctgcaccagtcaccggatctggtgtaccgcttctatcaggaggctagtcgcctcggccgccccgcatccgccgccggagccgccggcatggactccgtcaccactatggaggcaatcggcgagaagataatggagatggacgtgtcaaaagcggagatcaggacggtggactcgcaggagtcgcttggcggcggcgtcactgtgctcgtcacaggccacctcaccggccgtgacggagtgcgccgcgagttctcgcagtccttcttcctggcgccgcaggagaagggctacttcgtgctcaacgacatgttccgcttcgtcggggaaatccctgcccctaccgctgtagaggcgcagccagaggcggatgctgtagtcctgtctgtggctgccaacggcacatctactcttgctgtggagcctgccacccctgatgaccgtagtgtgtaaagcacagcctgcagttcagtcgtgtttttcatgaggcagatgataacaacactcttctttcactgtttgtagatgccgtgccacagcaggaacatcatgttgtggaccgatcaccacctcaacctgaggaggaggaggaggctgaggtttacgatccgccgccagaggaagtagtggatgaggaacaacctgttcctgaagtgataaatgaagttccaaacaacgtggcagctgttttggcaactacagttgcccctgtgttgcaggaggaggcaccaaagaagtcatacgcctcaattgtcaaagtcatgaaagaagtttcattgcctgctcctgcacctcctactaggactgcaccgcccaaaccagagaagcagtctcctgctcttgctcctgtcaaagatgtgctgccttttagttccaaccctgagaacggcaatatccaagagcctgaagatgacgcgcatgcaatctatgtgaggaatttacctctaaatgccactgaaactcaactggaggatgagttcaagaagtttggtaccatcaagcaaaatggcattcaagtcagaagcaataagatccaagggttctgttacggatttgttgagtttgaggattctacatctgtccagagtgctatagaggcttcccctgtgatgattggtggtcgtcaatgttacattgaggaaaagaggacacctggttcacgaggtcagtct

SEQ ID NO: 119063 - DNA, 1580 bp, Zea Mays
aatcagatcacggctccagatccgccgtacgcaaagccccataccccaataccggtgccgccttcgcctcgcactacacctctccctccctccgcctccatctccttcgccaccagaacccaagcgctgccccacacgccgccgcagcccgcacgggagccgcgcgccgcaccaaaaccctaggtctcctccgtcccccgatccatcgccttcatggccgcgccgcaacctgtcgcccaggcccccgaggcaccgccgtctgcgcaagtggtgggcaacgcgttcgtgcagcagtactacctcgtgctgcaccagtcaccggatctggtgtaccgcttctatcaggaggctagtcgcctcggccgccccgcatccgccgccggagccgccggcatggactccgtcaccactatggaggcaatcggcgagaagataatggagatggacgtgtcaaaagcggagatcaggacggtggactcgcaggagtcgcttggcggcggcgtcactgtgctcgtcacaggccacctcaccggccgtgacggagtgcgccgcgagttctcgcagtccttcttcctggcgccgcaggagaagggctacttcgtgctcaacgacatgttccgcttcgtcggggaaatccctgcccctaccgctgtagaggcgcagccagaggcggatgctgtagtcctgtctgtggctgccaacggcacatctactcttgctgtggagcctgccacccctgatgaccgtaatgccgtgccacagcaggaacatcatgttgtggaccgatcaccacctcaacctgaggaggaggaggaggctgaggtttacgatccgccgccagaggaagtagtggatgaggaacaacctgttcctgaagtgataaatgaagttccaaacaacgtggcagctgttttggcaactacagttgcccctgtgttgcaggaggaggcaccaaagaagtcatacgcctcaattgtcaaagtcatgaaagaagtttcattgcctgctcctgcacctcctactaggactgcaccgcccaaaccagagaagcagtctcctgctcttgctcctgtcaaagatgtgctgccttttagttccaaccctgagaacggcaatatccaagagcctgaagatgacgcgcatgcaatctatgtgaggaatttacctctaaatgccactgaaactcaactggaggatgagttcaagaagtttggtaccatcaagcaaaatggcattcaagtcagaagcaataagatccaagggttctgttacggatttgttgagtttgaggattctacatctgtccagagtgctatagaggcttcccctgtgatgattggtggtcgtcaatgttacattgaggaaaagaggacacctggttcacgaggtcagtctatatacaaattgatacttaatcttatgcagtgtctatgccaatcatagttcttaaggcggtaaggtgagacaaggcgttgggccaccgcctggacgcctaggcgacgcctaggcgcttactaaggcgagcaaggcgacgccttaccaattaaacaaaagacagaacaacaacatatatgaggaag

SEQ ID NO: 119064 - DNA, 463 bp, Zea Mays
acaagcgttgcaggttctgtcgtcgtgcctcagatgttgagtgcatagagatcatcatgtcgagtgcggggtacagaaaagctgatacaaatttggagtctgttcatcactatttttgcaggcaacaaaagctaaaaagtgatactattgagtattgtagaatagacacctattcagatgtagttttagttttggtcgtcggttggtgagcctgtcatttttgcaatgttatgttactgctagtattcatttattgtgtcgatttgaggttaatagcctttttggggctgttggaataagtgatattttagagtagttaatactagtagctagggtcaggatttacatgtttatttgcaatatgtcgacgccaaaggattcggtctttatactgataataaaccgctattgatttattgattgttttcttgggttaaagatgaaacagatgaatttacaagtt

SEQ ID NO: 119065 - DNA, 358 bp, Zea Mays
ctcaccgttgctgcacgccaggagcaggccctcgacctcccagccgagcggtccttgttcccatggcgcgtgctcgacttcagcctggaatccctttgccgttgccatgacagccgccggccgagtctcttcctgtcgtgtgtccagtcctctgcgcagcgcgcgcgcctggctcgcttctcttgcgcgcggtcctctgttcctgcgcgcctgcgcgcagctcgctccctggctcgactctgcccagttcgtgtcctgctcgccggtcgaattctttgcgtcgcacgcgtagcgttttgttattcctacgcgtgctgccgcaaagctccatgttcagttcgcctcctgtcttgttgtc

SEQ ID NO: 119066 - DNA, 497 bp, Zea Mays
tggaggcatagtgggaggaggagatgtcggcggcgacgggtccgatgctaaggcacaaggtggtcgccgtctccggggttgccactttggggctcgacacctacgatgcgcacatgttccgccccaagaaccccacgtacaaagaggtttggcacacggcgtccctgtaccatctcgtccacaccgcggcgctgctaggggcgcccatcaccaagcgccccaacgttttcggagggctcctcgccgctgggatcgtgctcttctctggaacgtgctacaccgtggcttatcttgaagacaggaagttttcttcaccggcaccattggggggctttgcctttattgctgcttgggccagcctcctcttctgattaaattgtgcttttccaagaaaaaaatcataaacctctctatctggtgttttataagattgtgaaaaatatacttgaaagtgtatacagtggacagtatgcgcctctggttaataattcaaaatg

SEQ ID NO: 119067 - DNA, 615 bp, Zea Mays
atgcctggagtctttcctaggggtgatattttcaaccctaagtggaaccagccagaaggtagagctctaacaggaggtgactgtgagcagcagcacagcgacactgctacgtccagtgccatgtttgcagtgatgcagctatataacaacacggagcgcagttttgggatggtcaatagttctcatgccacggctcagaaccagttgtaccaggctcaagaagcgcatgctgcagagttagctcaagtacaagagaagctggcccaagttacgcttgagaaagatgaagctgtccagatggtgactactcgccgcattaacccaggggtcgctggagcttctggtagtggtgtgatacagatacaaccatgtggtgcaaggtcgtggcggctgggtggcgctgccatgctgcaaccagacgacagagaaagggcagtagtaccaatgcctcgattgttattaagctgcttgctgatcatgtatatgtgtccactcaattcaaccagggctggtggcaaggaaagctttgtccactctgtcaagtgtggtacgctttgcttaagccaatttgattattgcccaatatgcaacacagcagtggtcatttcgaattga

SEQ ID NO: 119068 - DNA, 1372 bp, Zea Mays
atgcctggagtctttcctaggggtgatattttcaaccctaagtggaaccagccagaaggtagagctctaacaggaggtgactgtgagcagcagcacagcgacactgctacgtccagtgccatgtttgcagtgatgcagctatataacaacacggagcgcagttttgggatggtcaatagttctcatgccacggctcagaaccagttgtaccaggctcaagaagcgcatgctgcagagttagctcaagtacaagagaagctggcccaagttacgcttgagaaagatgaagctgtccagatggtgactactcgccgcattaacccaggggtcgctggagcttctggtagtggtgtgatacagatacaaccatgtggtgcaaggtcgtggcggctgggtggcgctgccatgctgcaaccagacgacagagaaagggcagtagtaccaatgcctcgattgttattaagctgcttgctgatcatgtatatgtgtccactcaattcaaccagggctggtggcaaggaaagctttgtccactctgtcaagtgtggtacgctttgcttaagccaatttgattattgcccaatatgcaacacagcagtggtcatttcgaattgaatgttcttacattctactctctgagttgaaagaatgcaactccaagttcagtcaccttttttgtctctaatgaaattctttcagggacctttacaactaattttaacaactaatttatcaaaataaatgagtaatacatttagcttctgttctagatgtgtgagtctagtttgagagtttaaactaaatcttagaatgctatagcgattcaaatttttttattatttctttatttcaaatatgtctgaaacatacaatactgttgtttttcgaaaccggttggaggatcagtagtgcagtacagtccttcccatgcaaaagcttatgcgttcagcatgctttcagttttctagcagtagttttctttcagtctttcagtttttatatttgtattttttcactgtcaaatcatttcttcgctataattgcaactgtacaatatattgtgataccttgtattttacttgatcaattgacaaatatgcttcactacgtgtacagatgaaattttagattttacgtgatatatcaatatgaaattgatgggcctaagaaattcagagaattcagagaagtattgaattgttgccgaacttgcttcttttattttgttgttgaattctgttgtatatggcagggatcaaccgaatgaatattttgaggcagggattaagccatagagagattaaacccccaagggaattaagtgaaagggagggattcacttaatccctccctggattagatccactagggg

SEQ ID NO: 119069 - DNA, 522 bp, Zea Mays
caaatatgtctgaaacatacaatactgttgtttttcgaaaccggttggaggatcagtagtgcagtacagtccttcccatgcaaaagcttatgcgttcagcatgctttcagttttctagcagtagttttctttcagtctttcagtttttatatttgtattttttcactgtcaaatcatttcttcgctataattgcaactgtacaatatattgtgataccttgtattttacttgatcaattgacaaatatgcttcactacgtgtacagatgaaattttagattttacgtgatatatcaatatgaaattgatgggcctaagaaattcagagaattcagagaagtattgaattgttgccgaacttgcttcttttattttgttgttgaattctgttgtatatggcagggatcaaccgaatgaatattttgaggcagggattaagccatagagagattaaacccccaagggaattaagtgaaagggagggattcacttaatccctccctggattagatccactagggg

SEQ ID NO: 119070 - DNA, 222 bp, Zea Mays
atgcttgggacaaagtggccagcaagaatggagtcatggaacatcggcaggagggttgtggcagcggcaaccgatgtatcccttggacaatctggttttgacatgatgcaaatcaatctgctgtacactgtattccgcacttgcacagattgttttgctaattacaagattatctcagtgttttggtttagatttagattacacttatgtatgaaatattga

SEQ ID NO: 119071 - DNA, 345 bp, Zea Mays
ccaccatggtcgcgcgctccagccagccgtggatccgttccctgccgtctcggccgagcgccagcacctgagcagaagagagaaaccgaggagagagaaagagcgggaatggaggaagaccggagtggagaaagcgccgccgccggtgaaacctccggcgccggtgttccatcctctgtgcgtagtcgcgtgggtgcgccaacgtccgggggaatccgtccgtgccttcggagcgggctgggcgaccccgaatcgggcggaattccacgccggtgaacgtgccagagcagaactacctcctccccgtggtcggctcgctagcgcagacaatccccggtaagaaca

SEQ ID NO: 119072 - DNA, 120 bp, Zea Mays
caaatatatcaagttttgaattaaaccaaaccgtgtcacaggtgtcgtcgacccattttatatatatcgctaaaatctggattcataaatatctgtgaaattctttaaataaataaaaaa

SEQ ID NO: 119073 - DNA, 1016 bp, Zea Mays
aagaagaaaagaaagtagcgtgtgggaggaaggagcgcgagaaggagatcctcgtcccctcccgcccccgtacgtctcccctccatcttccattcttccacatatccccacacaattgccgtctcgctccacattcccttcgcaccacctttcccctctctctctccctctctctccctctctcactcgctctttctccggggccgccattcctgctccgtccactcccaccacatgcggcggcgcgggcgcctccccgcggcgctgtggctcgttgtcgtgacgttggcggcgctggtggcgcgacctgcgtgtgcggcgtggtgcatcgcgcggagcgaggcctcggacaaggcgctgcagtcggcgctggactatgcgtgcggccccgcgaggggtgccgactgcgcgcccatccaggccagcggcctctgctacctgcccaacaccctcgccgcgcatgcctcttacgccttcaactccatcttccagcgctcccgcgccgcgccgggggcctgcgacttcgccggcaccgccaccgtcacggtcacggaccctagttatggatcatgcacctacccttcatctccaagcactgccgggcaaacaggatcacctggttcaacgtccatgccagggactcccacgtccttgtcgccaaaaggcaccgggagcactggaggattaaatccacctgacgtcgattcgaccgactccaatgctaaacctctggcgaccacatccctcccatctcttgctctgtcctgtttcatgtatattttcttgcagttgtggtgatgcatggatgatctagttaggttcagtagagcattgagatgcagcattgttgcatcgtgatctaagagacaccacaacagttttgtttcagggaattggttggttggtggtagccgttgtaacctgccgttcaagtgaaaggcaagagtgcccgtcagttggattctctcaacacattatgcttcttttggtctaaaaaaatcattatgcttcttttt

SEQ ID NO: 119074 - DNA, 201 bp, Zea Mays
atggcgaggcgatgtctagtcagcacggaccagactatgactagaggacctcacccattgatcctcaggctgtatgcaagtggtggaaaagctcatggaaggtacacaatgtttactaacgtcatcgactcgagccagatgagggttcagcgtggaggttcatcgaggtctgttgctcgtagctaccttgccaacgcatga

SEQ ID NO: 119075 - DNA, 164 bp, Zea Mays
atacttgagacttttattatgactatgtatgagatattatctcttattagtactggatgatgagatgtgtcttattatgactatggatgagacttttgtgatgtaattgatgagactatggatttaaatattgttatgtgattgtgcgtgagatgttttatgtg

SEQ ID NO: 119076 - DNA, 373 bp, Zea Mays
atggttaaagcatctctgaccgagaaatgtttatgccggaatccatatgaaacaactaaattgtcatcagttttatcattgtccatcaaaatccgccacacaccttgttcaaagaaactaaagctacaacacttgacatggaacaccaacagaatcatctgattgattgggcaaacacatttcagatgaaaagtgcagcctacacgaccaatcaatcacactgataatgtgtgcaaaacactgggcagaattacatagccgtataacacatggaaatgcaacatggggaaatcacaagcccactggacaaaatcacgtagcacgacattgaagcaacaggtctcatgcattacatacaagacaacagtccacc

SEQ ID NO: 119077 - DNA, 1683 bp, Zea Mays
aaaaaaaaaacgaattcgccttcttcaaaaacctcttcgacgtcgcacccgcaacgcacgctggcgggcggcggccatggcgtacctccctccccacaagcgccaacccagcaccacagcctccacgcccatccccgcacccaacccgccacctccgtccctctcctcctccctccgctccctctccctctcctccccgcgcggccgcggccgcggccgcggcgcagtcggacgccacccgctcgcttctacaaagattttccgcgctgccggctgcatctcacgttggttccctctacctcccttctcccctgccggcgacggcgaggagtacatcctacgcctcgagcccttcccttgtccccccatcgagcacaggaccggtgccaaaccccttgcccttgtcgtcgcctccaccccaggacaaggctcttccggctccactgcggcggcagtcacctccatcgccgagcagtttcttcccgatctccttgccgccgcggagagggtcaaggcagaaggcgcgcctaaggatgagttggtgaaactgagtctcgttgcaagactgggaacggtgctcttcgagtgccagcccggtggatcgcccgtttcactggacgaactccgtcaggccgctaaagcaggggaagatggttccaggagccagttgcgtaaaacgttctacaccagtttgtctagtgagtgtctggatgatatggagcgaaccatggtaaagaggattgggctggattttgattcgtccaagaagcactatcatgtgaaggtttctgacaagaatcgaagtgattctacaatatcttgcaaatgcaccgtggaggaagatgggagtcttgctatccataaggttgaattgaatcaggtacggcacttggtggaagacatatcctgtcttttcaaaggtcttgatctaaggttgatgttgagtaagaaaaggatcctgaaaaacctagattctgaagtggaaaatgcagtaaagagcttggtgtctactgctattattgatcctaatgtgaaagggggagttagatggccacttggaaaggaatcaattggcgagaggttcagcatagttggggtgtggcacacggactacaaagctttcagaaacgagaccatgaggctcaagctaaggcatgctgacagattcgatcaccgtacctcgactgggggagtttctgatgaagttacattcaaactaactgctatatcttgcaaactggaggaagatgatctggcggagagcgctgtgaaagagatgctggagtctgcggtccaaatgctatgggacaatgcgctcaactaccgggtcgtgccttgagctccggttatgcagacaatagttcttccttgaagatgcaaagcgacatgatttctttgagcccctcctgtcctgtactagtactgaacaagagaactcctaaacacaactgacgctggggctgcccacgcacgccatcaaaaaaataaaaataaagtagcgttgggttagcttggctggttcccggtcattcggtccaacgtagttcggttgtcgagttctgattggttcggatggagtcgtcctggaaaatatccccatcctcatcctcgctcttctgccctaatgagcggatgcgccaaagcgacacacagttcttccatgcaagggcggcgcggatctag

SEQ ID NO: 119078 - DNA, 3213 bp, Zea Mays
aaaacgtggcgggcttcaccgggcccgggccgggctgccggtttggccatctctacccacatctgctgcagactcgaggcgatcgaagcgtcattggcggcggctgcggcaatggcggggctgtcgctactgtgcggtgactgcggcgcgcagctgcgtagtgtggaggaggcgcaggcgcacgccgaggccaccaaccacgccaacttcgtcgagtccaccgaggccgtcctcaacttcgtctgctccgactgcggcaagccatgccgctcccagaccgaggtggacctgcacaccaagcgcacgggccatacggagttcgcggacaagaccgcggaggcagccaaacccatcgatctcgaggcgccgcttaagccggcctccgaggatgtcatggacgtagacacgtcggcttcggcgagtggggagccacaagagatggttgtcccggaggtgaacaaggagatgctcacggaccttgagggcatgggtttctcgacagcgcgcgccaccagggtgcttcacttctccggtaatagcaccattgaaggtgctattaactggctttctgagcaccaagaggacatagatattgatgagatgcctctggtaccagccaactcaaaaacggaggataacaagcccagcctgactcctgaggaaatgaagattaaagcacaggagctaagggatcgtgctcgtaaaaagaaagaggaagaagagagaagaatggaaagagaaagggagaaggaaagaatacgaattggaaaagaacttctggaagccaaaagaattgaggagcaaaatgaaaggaaacgcatgatagaactgcgaaaacttgagaaagaggaggagaaaagagctagagaaaaaatccgccagaagttagaagaagataaggctgaaaggagaaggaaactaggactgccaccagaagacccagcagctgccaaaccaagtgcaccgcttcctgttgaagagaagaagagtgcattgcctgtccggccagctacaaaggctgagaggatgagggattgcctaagaaatcttaagcaacagaacaaggatgatgatgccaaagtgaagagggcatttcaaacactccttacttacattggaaacgttgctaaaaatcctgacgaggagaaatttagaaagatcaggctaaccaatgctacatttcaggagagggttggaaatttgcatgtgggcatagagttcctggagctctgcggatttgagaaacttgaagggaacgagtacttgtttttggcaagggaaaaagtcgacaaggctatcctgaacacagctggagccgagctgaattctgccatcaccaatcctttctttggggtcctttgagtcgtaaaaaaccagtacaatgtatactcaaaactcttggtttctcactttgtttgacatcaactgggcgccaactgtagatttgtaagtctgtggtcggtatctgatttcatgaattattattgttgcatacagactagtacttgcgtgcatcgctgaggcaatatatcttccattctgttttcatcgctctcccggcctccctgcattttacaatgctctagcaccaaaaacaagagcggatgtactttgatgcattttacagcaacttcaatcaattcttagttatatgctagtacagtacaacatatcatctgaggacggagagagtcggcgaatcccccagtcatcatctttaatcaaagctgaacctggcgcccgtgaatccagctgaatggcgcgaactccggatccttggccttgttgtcgtgcgccctctcctccagcctcctgaaccggggccccagctcgcacacgaactcctgcgcgcggcggccttccccggacagccccgtgagttcctggacgccccaccggcggaccaggaactcgaggatgtcgacgtagtccctggccgtgtagacaccgatgcgctgcgcgacagcgctgaagcgcgcgaacagcccgtcgtcctggccgtcgtacatgaggtgggcgggcatggccaccttcttcctcatggtgtccgcgaaggcgcgcaccgtgtagtccgggtccacctcgaacagcttctcgacgatccgctcgtacgccgactcgtggcgcttctcgtcggcggcgattgtgccgcagatctgcgccagcttggtgtcgccgtaccgcctggcgtggcgcgccgtgttgccgtgggagatgaaggtggcgcgctcctggaacgacgtgtagacgaagcccatgtacgggttcgtctccgtcttgggatcctgcatttgtttgtacgtacgtcatgcgtgcgtacgttcatgcatcaaccacccatcatttaaaggtaaataattactcaccatccctgaggcgatgaggtactggacggtcttctcgatctgcctcatgtccaccctccccgtcaggaagaggtatttgttcatgaggtcgccgtgcctgttctcctcggcggcccacgccctggtccacaccgcccagctggtcgagctggcgccggtctcgtcgcggacgccgccgtccagggtgttgagcatggtctggtacgtcggcagcgcctcctcggtgaccatgtcgcccacgaagcagacgaagtagtcgtcggggatctcccgggcgcgctctcgcagctcccggacctcgtcgtcgaaggactcggaggcggcgtccggcaggtagtcctgcggctgccaggacctctccacgggcttgaggagcaccaggatgttgtccgccgcccacgactcgagcgactcgaagatctcccgcttctgcgggggcagcgagtgcgccacggggcggtgtacctcgcgaggaggggcgaagggcttcctgctgggagctctcacccttcattcatcatcagcatcatcgcaagattatcacaaagctaaaggaaattcaattgaggcaccgcaagattcagaggaggacaaggcagagctcacggggctgcggaagccatggccaccaccgaggagaaggctctccttgtactcactaggcaaggaggggcgaaggcgccgcaggaagggaacgccgccaccgccatgcccgccgccacttgtaatctccgcgatgctctagctagctacagtacataacaatgcaatgagcgagcgaccggcaattcaaactccaatgccgtatgtaatcggtaagtaaagtacctgatcattaagtagctga

SEQ ID NO: 119079 - DNA, 3131 bp, Zea Mays
aaaacgtggcgggcttcaccgggcccgggccgggctgccggtttggccatctctacccacatctgctgcagactcgaggcgatcgaagcgtcattggcggcggctgcggcaatggcggggctgtcgctactgtgcggtgactgcggcgcgcagctgcgtagtgtggaggaggcgcaggcgcacgccgaggccaccaaccacgccaacttcgtcgagtccaccgaggccgtcctcaacttcgtctgctccgactgcggcaagccatgccgctcccagaccgaggtggacctgcacaccaagcgcacgggccatacggagttcgcggacaagaccgcggaggcagccaaacccatcgatctcgaggcgccgcttaagccggcctccgaggatgtcatggacgtagacacgtcggcttcggcgagtggggagccacaagagatggttgtcccggaggtgaacaaggagatgctcacggaccttgagggcatgggtttctcgacagcgcgcgccaccagggtgcttcacttctccggtaatagcaccattgaaggtgctattaactggctttctgagcaccaagaggacatagatattgatgagatgcctctggtaccagccaactcaaaaacggaggataacaagcccagcctgactcctgaggaaatgaagattaaagcacaggagctaagggatcgtgctcgtaaaaagaaagaggaagaagagagaagaatggaaagagaaagggagaaggaaagaatacgaattggaaaagaacttctggaagccaaaagaattgaggagcaaaatgaaaggaaacgcatgatagaactgcgaaaacttgagaaagaggaggagaaaagagctagagaaaaaatccgccagaagttagaagaagataaggctgaaaggagaaggaaactaggactgccaccagaagacccagcagctgccaaaccaagtgcaccgcttcctgttgaagagaagaagagtgcattgcctgtccggccagctacaaaggctgagaggatgagggattgcctaagaaatcttaagcaacagaacaaggatgatgatgccaaagtgaagagggcatttcaaacactccttacttacattggaaacgttgctaaaaatcctgacgaggagaaatttagaaagatcaggctaaccaatgctacatttcaggagagggttggaaatttgcatgtgggcatagagttcctggagctctgcggatttgagaaacttgaagggaacgagtacttgtttttggcaagggaaaaagtcgacaaggctatcctgaacacagctggagccgagctgaattctgccatcaccaatcctttctttggggtcctttgagtcgtaaaaaaccagtacaatgtatactcaaaactcttggtttctcactttgtttgacatcaactgggcgccaactgtagatttgtaagtctgtggtcggtatctgatttcatgaattattattgttgcatacagactagtacttgcgtgcatcgctgaggcaatatatcttccattctgttttcatcgctctcccggcctccctgcattttacaatgctctagcaccaaaaacaagagcggatgtactttgatgcattttacagcaacttcaatcaattcttagttatatgctagtacagtacaacatatcatctgaggacggagagagtcggcgaatcccccagtcatcatctttaatcaaagctgaacctggcgcccgtgaatccagctgaatggcgcgaactccggatccttggccttgttgtcgtgcgccctctcctccagcctcctgaaccggggccccagctcgcacacgaactcctgcgcgcggcggccttccccggacagccccgtgagttcctggacgccccaccggcggaccaggaactcgaggatgtcgacgtagtccctggccgtgtagacaccgatgcgctgcgcgacagcgctgaagcgcgcgaacagcccgtcgtcctggccgtcgtacatgaggtgggcgggcatggccaccttcttcctcatggtgtccgcgaaggcgcgcaccgtgtagtccgggtccacctcgaacagcttctcgacgatccgctcgtacgccgactcgtggcgcttctcgtcggcggcgattgtgccgcagatctgcgccagcttggtgtcgccgtaccgcctggcgtggcgcgccgtgttgccgtgggagatgaaggtggcgcgctcctggaacgacgtgtagacgaagcccatgtacgggttcgtctccgtcttgggatcctgcatttgtttgtacgtacgtcatgcgtgcgtacgttcatgcatcaaccacccatcatttaaaggaagaggtatttgttcatgaggtcgccgtgcctgttctcctcggcggcccacgccctggtccacaccgcccagctggtcgagctggcgccggtctcgtcgcggacgccgccgtccagggtgttgagcatggtctggtacgtcggcagcgcctcctcggtgaccatgtcgcccacgaagcagacgaagtagtcgtcggggatctcccgggcgcgctctcgcagctcccggacctcgtcgtcgaaggactcggaggcggcgtccggcaggtagtcctgcggctgccaggacctctccacgggcttgaggagcaccaggatgttgtccgccgcccacgactcgagcgactcgaagatctcccgcttctgcgggggcagcgagtgcgccacggggcggtgtacctcgcgaggaggggcgaagggcttcctgctgggagctctcacccttcattcatcatcagcatcatcgcaagattatcacaaagctaaaggaaattcaattgaggcaccgcaagattcagaggaggacaaggcagagctcacggggctgcggaagccatggccaccaccgaggagaaggctctccttgtactcactaggcaaggaggggcgaaggcgccgcaggaagggaacgccgccaccgccatgcccgccgccacttgtaatctccgcgatgctctagctagctacagtacataacaatgcaatgagcgagcgaccggcaattcaaactccaatgccgtatgtaatcggtaagtaaagtacctgatcattaagtagctga

SEQ ID NO: 119080 - DNA, 975 bp, Zea Mays
gtagctcctccagtccttctgctacacagaaacgccatcgcctccgcccaaaaaacagcctccacacacgacctaaatcttttcctgcccacgggcgactcccaaacccaacagcagcaagaaagccaaggaaaacactcatttccttcttccttccttctctaccatatagccaagaaccgaaggtagcttgcgacttggcaagctacaagttgggcgattcaagcagcaggatggtggcgccggtggtgatcgcgtcggcggggctgggcatgctggccggcgtggcgatggccaaccggtcccttggggacgggctcccggcggcctacaggtgtgacgcgcgcccgcgctgcgccacgtgcggcggctccggccgagtcgagtgcttgtgcaaccgctggtccgatggcgactcaggctgccggacctgcgcggggtcggggaggatgccctgccgcagctgcggcggctccggcaccggcaggccgctcccggcgcggctcaccgtccagcaccagaagccgccgccgccggccggctacaactgatggaataattaggtatccatatccgtggattgtataattcacgcgggaatatatatatggtgcaacccatccaggaaatcagttcaactgcgagatgattatgcatgtacatgcctcttcttcaagaccggttgtaatatattgtgctgaggacactcggtgtcgctgttgttcagttaatatgcaaattgcacagcacaagaaagaagaagaaaaactgtgttgaaatggtttttttctttagagatctaaggaaaatatatgattgagaagggagagctgtccgtgattctaaacacagttttgttgtatgtagttaattctggtggatgtaatgtatcatacacatgcttagattcgttaatatatagatgcacccacatgaacatgatttactgagattaaatttgttgtgagtgccctt

SEQ ID NO: 119081 - DNA, 103 bp, Zea Mays
ccaagtgcacgtgcgttgcaacgacatacaaaatattagtactcaatgattacataaaaacaaataacacatattatcgatctcaatcttataaattcttttg

SEQ ID NO: 119082 - DNA, 298 bp, Zea Mays
aggggttggggacacatatttatagccctaggggctacactaccacaccttctcacacacactacacaacaggattgtcctctagatgctaaagagactacagaggacagtcaaaagcgactgttgtcctctagatgctaaagcgactacagaggacagtcaaaaagcgactgttgtcctctagatgctaaagagactacagaggacagtcaagctgtcctctagatgctaaaggactacagaggacagtcaaaagcgactattgtcctctagatgcccaagacttattccatcactc

SEQ ID NO: 119083 - DNA, 426 bp, Zea Mays
tttagaattagcaggaccaaaaccgagtatatgagatgtgattttggtactacatatagtgaggattgagatgtaagcttgggaggccaggtagtaccaaagaaggacaccttccgttatttgggattgatgttatagagagatggtgatattgacgaagatattagccatagaatcaaagtgggatggatgaaatggtgtcaagcattgagagttcgatgcgacaagagagtgccacataagttgaaaggcaagttctacaggacaacgattaggcctgctatgttatatgggactgagtgttggcctactatgagacgacatatccaacaactaagtgtcgcagagatgcatatgttgtgttggatatgtgggcacacaagattggaccgaatgagaaacgatgacatacacgatcggttagga

SEQ ID NO: 119084 - DNA, 685 bp, Zea Mays
cgccatctcttccatcatcctctttgtcgccatggatcttgccaacgggcgggacgacgcccagaaaggaggcgtcggtgtggagacaaggaggaaaaagaaggtggagcttgtgcaggattccatccatggcttcctggaggagaagtggagcgatggcaagggagaagagaagcgcttgacgtccaggcaggaggagcaggagctcctgtcgtcgttgctaaccaagttgggtgaagtagaaaacgacgcagattcggacatgttggaaccaaacttgccccacctggatcaccaggctgcagggaaaggcgaacacagcaaggaggtggagctagctgacatcgccaaggaactgaacaagatcaagaggcagaacaaggtcacccacctactcctcggcaccgtcatcgtcctgacggccgtgtggcaggtcaacgaggtgtccttcctcctctgggtgcggaacaagctgagcaacccattcaagtcgctgggagacatgatcaagggctccctcaagctaagaggtaggaggccggtgctcgagtcgtcgccattgccgctggcaggcgtccccgatgtcagccggcctgacctgccaacgcttgtcatcggcagcaccgaagacagggcaggggtcagcttggttagaagtgaattgaagggtatcgagggtgattaa

SEQ ID NO: 119085 - DNA, 2689 bp, Zea Mays
gggtctgtattttaagtccatgattaaattttcgggggaaatacaattttagtgctgttcgtggcttcgaatctccgtcaattcgctccactcctccaaactgatccgcacaggttgtgccgctgaaaatccaaactttgggattgatgcgactgtagtaacttgttgctcagtggatggtcttgagcttttctgttccagccaggagtcaagatcaaccgagtactgtgctgaagatgaaggtgggtgcagacccaagtacccaagatgtgatggaggaggcagccctcaaagcaaagcatgtagcagagcgcaagttccacgcacgtaacaccaagggtgcccggaggtcagcgctcaaggctcatagcttgtgcccatcacttgagggcatatctcagatgatctccacacttgatgttcaccttgcactgaatcgaagattgatggggagagtgactggtacaggatactgtctctcaatgccatggctgatgaagaggaggtgaagaaacagtacaggaagctaactctccagttgcacccagacaagaacaagtcggttggtgcagaggttgccttcagacttatctcggaggcatggagtgtattgtctgacaagagtagaaagatgctttatgatcagaagaggagagaccattgtgtggcgagtgtgtccaacggtttgtatgcttatgattatgatacaaagctcagtaagcgagcacgaaaaaatgccgttgcctctgcctcagcagctgttgaggctactactcgtcttgcaggggctgacacattctggacatcatgcaacagctgcaggatgcagtatgagtacttgagagtttatctgaaccacaaccttctgtgcccaaactgtcaccatgcattcatggctgtggaaactggatttccctgcaatggaaccagttcttcattcacgtggacaaccaagtcacagcagcagcagaaccacgatactgttgctgaccattcatatcaatcagcaagcagaacatcaagcattccagacaccggacatggagcataccagcaagagaacacttacgagttgtacaaaaaccaaagtttccagttcactcagtaccccaagacaacatgtgttgctgctacaaatggttacagtacacatgcctcagagaaatcgaagagaaaacatgaagaaaactacatatacaattatatttcaagtggcaagagcaatgagtatccatcagggcgtggacgacattcaaaaaggaggcagaatttcagtaatggctgtgcatctgtggaagttaatggtcagaatctggctgcaactgcaggtatgtctgggattgccgatggaggaagatttaatggtacatcaggggagaagttcaggtctgcagtgaatgcaagaaaagctaatgtcttgagggagatcttccaacttgacacccgtggtcttcttcttgagaaagccaaagcagaagttcgtgaaaaactacaagtctggaatattttgacatctagccagtttgtcgagaaaaggaaatcagatagaagagagaagcatattcaaaacaatattaaggctaatggcattctctctgacaatccaaccaataaatgcaagaaatgcatttcaaaagatgcagataccgagatccctgtgactgatgtaatgaatccagaacagatgcgtgtacctatgtccattgatgtccctgacccagatttccatgattttgataaagatcgaacagaaagagcctttggcaatgaccagatctgggctacatatgatagtgaagatggtatgcctcgcctatatgcaatggtacagaaagctatttcaatgaaacctttcaggatacgaatgagcttcctcaattctaagtccaacaatgaactggcaccaataaattggatcgcatcaggttttacgaagacatgtggtgattttaggattggaagataccagattactgaaacagtcaacatcttttcccacagagtttgctggagtaaaggtcctcggggaattatcaggattattccccaaaaaggcgatacatgggctgtgtaccggaactggtctcctgattggaatgaacttacaccagatgatgtgatatataaatatgagatagtagaagtgatcgatgatttcactgaagagcaaggtgtgactgttgtcccattgttgaaggtagctggtttcagggcagttttccacaggctcacgggctccagtgtggtcagaagaataccgaaggaagagcttttccgcttctctcatcgggttccttcttgcctgctcactggtgaggaaagaaataatgctccaaaaggttgccatgagctggaccctgctgcaactccagttgaccttctcaagattattacagatgttaaggatgacaccacacgttgaggctccaagtagaaactctacttgtctgtcctacagacttgcaactgcgagctagcatggctgaagtctcaatatgtgcttcactcactcctcagcatcatttggctcacttgccttaatctatcattgaacttctggatgacgatgaggacttaattaggcatttataacatttaattttattgtgatatcgatattgtatagagataagggttattgacaggctgcatattgtgctgagaccagttctccaaaggcaacgtatct

SEQ ID NO: 119086 - DNA, 210 bp, Zea Mays
atggcgcacggtggttctggcccgaccgaagtgctccggcgagcaattagtccaccaccagaggatatcctcgcctggaaggaccacgaagacgtgcgggtaacacaagcgagcatccccggccacccatcagggacccgacgaccaccaacgcttgaatcaaccgcggaggccatttgttctctccccgagctgctcaccatgctctga

SEQ ID NO: 119087 - DNA, 196 bp, Zea Mays
gataggcaccatggaggaatcagcgatgttgctacacacacgacgacgaacgacgcaacgacgggcagtgagagatcgcagactgagtaaagactcggcgagcaatgacgtgaggagcaaagcgaggtcatggccgggcaaactcaatggcgcggactgccccgcagccaggactagagacggacacgcggctaga

SEQ ID NO: 119088 - DNA, 1417 bp, Zea Mays
atggggaagcgccgcggagagtcggagacgcgctgcccaggtgctcgtctagctgggcctaatgaaacgaaacgttgggccggccgagcgaggaggaccgcatgatgatttgctaaggggttaagcgaagaagattccgaggggataacgaagagtggcgcagtggccatcgagactcgagagggagtggcagacgcgaggttgcaaggagatggcggacggcaagggaagggagaattcggccgtggcattgaagacctcgccgtcagtgccgatggctcggggattgcgcggcggtagtaaccctctggaggagtggagcggccgcgtaaaagcgattgaggccgggttccgtgcgtggatggcgaagcagcccatccacatcgaggccgcggtgtccacggccgttggggcggtgcagggcggggctctgggtgggctcatgggctcgctcacagccgacggagggtcgccgttccccatcccgcagccgccgtccaacgccaactcggatgccatggcgtcgttcaagcaggcccaggctctagctgctggacccttggtgcaagcccgaaactttgcagtcatgactggcgcaaatgcaggcatatcttgtgtcatgagaaggctacgaggacaagaggacatccagggcagcatgacagctgcttttggttctggtgctcttttctccatagtgagcggaatgggaactcctaatccagttttaaatgcaattacaactggtgttgcttttgcagtatttcaaggtggctttttcatgattgggcagaaattctcaaagccatcaagtgaagatacatactactctctgacaagaagcatgctgcacaaactgggtcttgaaaaatatgaaaagaatttcaggaagggtctcctcaacgatcaaacattaccactccttacggacagtgctctgagagatgtgaagatccctcctggacccagacttctcattctcgaccaaattaaaagggaccctggcctggttcgagcaaagtgaagtcacaattgtcaacaattggtcctttctgagctgcatagggtttgaaagcaatgccacctcttttttttaaataagctttctaggaaagtaagcaataatttagctgtgctgttgttaattgtttttggccgatcaatttgcatcactcattaaattttgaacatgtgtttacatgcatcttattcaaatttaaattggcattccgaacgatatgcaaatctgtggaaaacagggttcgccatgtccatcacctcgattaatttggagtggtctcgattaatttggagtggtcgctgtcgtgtatacgagtgaagcaacgaggaaataaaatattgctttctagatgctgacaagttccgacgaggcgataggatgatctggggacttggg

SEQ ID NO: 119089 - DNA, 762 bp, Zea Mays
gttgcccccacccagaccaaacccaggcttcccgttccctcgcttttgtccggcggccatggcggaggagcagcagcatcagagatggcaggagggccaccgcctgtgcgccaacaattgcggcttcttcggcagccccgcgacgctggacctctgctccaagtgctaccgcgacctataccagcagcagccagcaggcgcggcggcgggcccctccgctcccaccgcgtcggccttccagcattcctcctcggcagtctccggcgcggcggcggtctctcccgatctcgaacctcccgcgacggcccctgctggcgccaaggcgggcaggtgctccagctgccggaagcgcgtgggcctgacggggttcgcgtgccgctgcggagctaccttctgcggcgtgcaccgctacccggagcggcacgcgtgcgccttcgatttccgggccgccggccgcgacgccatcgcgcgcgccaaccccgtcgtcaagggcgataagctcaaggacaagatctgaggagcaggaaccgccgcctctcgcttcagagttcatgtcttccccccgtcagcggaactccggaagagcaaggacgaccgacggccagaagggacggatcgtcggattgtacgaattactcccgtgtactctacgattggtataaaacccaagcccgtcggttcgattgtgtaaagctggcggtgaaatcgctggccgtttactgaatgaaaaaaaattcaaatagaaaaatatttacttttcca

SEQ ID NO: 119090 - DNA, 106 bp, Zea Mays
gcgacatccagatcccgttcccgggcaaagggaactttcagggaccttgcaagagcccaaaattgtatacaacattgttgaagccgaagcacaggctcaagcatca

SEQ ID NO: 119091 - DNA, 192 bp, Zea Mays
atggcgtcttcttggatgctcaggtcctcaccaaccacgtgctgtattgtcagacttctatgcgcaatctcgtcggctgtcgtgcccctgctcaccgtcaacctgctcggacctcgcctcggcgcgcaacaaccatcatggcgtggggattcagctgcgtcgctttttggagcacaaatcgctagatgctga

SEQ ID NO: 119092 - DNA, 412 bp, Zea Mays
tgcaggccattgctgcaccgctacctgcgtttttgatcacctttgccaatgcgtcgctgtttggcgcgttctggggcggcttgctgtcgtggaccagttcgatggccggcgcggcgctgtgcttttttatcgccagagtgatgggccgcgaagtggtggaaaaattaaccggcaaaaccgtgcttgacagtatggacggctttttcactcgctacggcaaacacaccattctggtctgtcggttattgccttttgtccctttcgatccaatcagctatgctgccggtttgacttcaatacgttttcgctcgttttttatcgccaccgggcttggtcagttaccggcaactattgtttattcctgggcgggcagcatgttaacaggcggtactttctggtttgtcaccggact

SEQ ID NO: 119093 - DNA, 658 bp, Zea Mays
ctatataatccatccaaggataatttagttcatctaggtatcttttactttggtcttttatttaaaaaatacattcattttgggcgcagtaactttgaactgtgaatattcttaagcgaaagtgttttgatttaaaacctttgggaaattttccttattttcacaagattgtactttagggtgttacaacaaacttggtctaatatggattagagatatcaagaaccaagtccgaatgaagagagtatgaggagatgacctcttcacttaattgttctttcactaagagagtattaaacttagagcaattatgtaagtcaagtgagtagagagaaaatcgcaataagataaagacaagagacatggagatttttatcccatggttcggtcaagtatagaatacttgcctactccacgttgtggcgtcccaatggacgagggttgcactcaacccctttcaagtgatccaaagatcaatttgaataccatagttctttctttatctcaagaatatcccattgtgaggaatctccacaatttggagtctctcacgccttacacaacttaatatccaataaacaaaagagtaaggggaagtagaaacacacacgagaacttaagttgtagcaacaacacgcacacaagtcaagaaaagagc

SEQ ID NO: 119094 - DNA, 973 bp, Zea Mays
cgcacatagggaacagaagctactagctccagcacaaaacacctactgcttcaactgtaccgttagacatgtcaagggtgttggagcctctcattgtggggaaagtgattggtgaggtcctggaccatttcaaccccacggtgaagatggtggtcacctacaactccaacaagcaggtgttcaacgggcacgagttcttcccttcggcagtggccgccaagccgcgtgttgaggtccaagggggcgacctcaggtccttcttcacgttggtgatgaccgaccccgatgttcctggacctagtgatccatacttgagggagcaccttcactggattgtcactgatattcctgggactaccgatgcttcttttgggaaagaggtggtgagctacgagatcccaaagccaaacattggcatccacaggttcatctttgtgctgttccggcagaagagccggcaagcggtgaacccgccgtcgtcgaaggaccgcttcagcacccgccagttcgctgaggagaacgacctcggcctccccgtcgccgccgtctacttcaacgcgcagcgcgagaccgccgcccgccgacgctaaccgtacggctcaacgtacgaaagaagaccatcctacgacgcttgcaattagctgggcaagcaaagctttttttttcatcctgagtcgatctttacgtatgtatgtttgtttaaataaaaaggtagctaatcagctgcttggctgtgaccccacgagctagcagctacaacctactggtacatgctgcacattttagctgatttatgaaggtgacaatatgattggtagggttgcaatgttgactgggcatagtgtaacaacttaagcaatggccatgggcgagtacgtgtcgagtggtgaagttgaagggaagtttatattaaaagcaaggccatgtcttgtattaccttgcctattattctgccatatatacatactggtgt

SEQ ID NO: 119095 - DNA, 116 bp, Zea Mays
ttttttgttgccgcaagttcttggatctaaacaagcctggcaaaaaataaaggaaaataacaaagcgttgttgggatggattgatgaggacaattctcacgaacgattgaactgcc

SEQ ID NO: 119096 - DNA, 132 bp, Zea Mays
ttttttctttttttgtttcagattttttacgtaacggtaccaacggtacgtacgaaggtttcatgcttcacaaagaataaattacatcatgagatatatagttgacaattgttttttataagagaatagcac

SEQ ID NO: 119097 - DNA, 2287 bp, Zea Mays
gttgaaggtcctataggtctcactccccactaaaatatctaatttggactgcatggggggcagtgggcagtagaaatcttatctattttgtctactacctacagatttggacaaagtgatatttatgtgtgggagctgagccaacgaggtgtagtgcttgtatgccacgtttttgaacctttggtgtgctagcactctaggaatcctccttcatcaagcgtggatgagctccactgcacctgcccctatatttagtaccttgggctgccgtattgagtgaagatttcttccttgccctcaaattctagccaaagttcactgcttgagtgtgcagtccttatgtactgctggtataaccccctccctagcccaggtttgcccccttctccccatggactggatgcgctcagtgacccctccccctgcctatttattcagtgtgttccacgactgagttcagaaaagcttttctcccttgttctcgagctgtagtcccagtccactacaaaggtgttggagtcctggtattcttgctggtgtgcatcctctctttcagccaccaagtttgttttactctagagctgaatgccaacctcttgcctgtggtgaccaaacccaaccgtttctcacctccccgtggataaggtttcccacaagtattcttggccgtgtactacttgttccatgctcggcaaaggtcagtgaagctcaccatttactacttgtactctaccactgtctgttgctgggaactaggtgtaaagttcgctcaaaaaataggctgttggatttttggatcggagacttagtgcagaaggctgaaactaggttctagtatgttgagctccactttggtgcttcctaaaaaaattgttctgaatgttttcaacctaggggtgctataccaaagtagtagagctatatctaaggaataactttggtaatgtgagcttggtcttttgttgtgtaaaagttggagaaaaggttggctaaagttggactgttaggctggacacaactgaatttttttattcagttctgtgaactgaattacagcagtatgcctagtttagaattcatttgtgactgattcatggggttttagattaaaggttccatagaaaagttgtagaccatagtaaagtgaacaagtttgctaaagtgagatggacctggttccacataaatttgggagtaaaagtggccaaaagatggactgtcaggtgttgggattcagacttagaataatatttaagtctgaatatgtgtgtttttacccaactttgggggccttgtggtaataaatccaaagggatttgggttaagagtctgtagcaaaatgagagaccagatatagatgaacaagttttgtgcaaagagtgggcttggtactgtatggaatttagagaaatagcctgctgcaaaaccctctatctgactcagtattgtgctgtttcagaaattagaaactgaattttcagtgttttgctttactttggattgccataactcttgctctaaatattttcaacctgtgatttctataccaagttggtagagctatgtctagagaataactttgagtaaatgagttgggtttgtagttgagggaatttgtgagttacaaagcactgaacagagggagaggaatggagcactagaagatgaattcagagaaacgaaaacaggttcagtgaattgtagctgattcttggacactataacttgtagtacatgcagtgtggatccttgcttaatgcataaatgaagtacttggttggttatggaggcaagcttttctagtttggttggtaaattgagctgtgatattagagtatttagctctcttaaggttttgttagcttttgtgtacacctttagagaggtgtaagtcttgcgatgcttcttagtattttcttttcaagttgcataagcataaacatccatgatcatgttatttcatatagaactcctactagaaggagtgaatattcaagctgaagtggtgactgaagaggaatctactccagtggctgctgatcaagtggaggagccatctaactgaggtttaatagagggatagagtacctcttcactgcaataaggcaagccccggtgcatttaccccttttcttgtatttttaaaagacttttatacactttaagtctagtgaaatgtgcattaagttataggagttgcttgaaaactatttgatgcattgactaccttgatatccattcctgttatagatacttctttggaagtatcaaatattgtttacaaaaa

SEQ ID NO: 119098 - DNA, 883 bp, Zea Mays
gttgaaggtcctataggtctcactccccactaaaatatctaatttggactgcatggggggcagtgggcagtagaaatcttatctattttgtctactacctacagatttggacaaagtgatatttatgtgtgggagctgagccaacgaggtgtagtgcttgtatgccacgtttttgaacctttggtgtgctagcactctaggaatcctccttcatcaagcgtggatgagctccactgcacctgcccctatatttagtaccttgggctgccgtattgagtgaagatttcttccttgccctcaaattctagccaaagttcactgcttgagtgtgcagtccttatgtactgctggtataaccccctccctagcccaggtttgcccccttctccccatggactggatgcgctcagtgacccctccccctgcctatttattcagtgtgttccacgactgagttcagaaaagcttttctcccttgttctcgagctgtagtcccagtccactacaaaggtgttggagtcctggtattcttgctggtgtgcatcctctctttcagccaccaagtttgttttactctagagctgaatgccaacctcttgcctgtggtgaccaaacccaaccgtttctcacctccccgtggataaggtttcccacaagtattcttggccgtgtactacttgttccatgctcggcaaagaactcctactagaaggagtgaatattcaagctgaagtggtgactgaagaggaatctactccagtggctgctgatcaagtggaggagccatctaactgaggtttaatagagggatagagtacctcttcactgcaataagaactcctaccagaaggagtgaatattcaagctgaagtggtgactgaag

SEQ ID NO: 119099 - DNA, 1989 bp, Zea Mays
gatttcttccttgccctcaaattctagccaaagttcactacttgagtgtgcagtctaagtactgctggtataaccccctccgtagcccaggtttgcctccttctccccatggactggatgcgctcagtgacccctccccctgcctatttattcagtgtgttccacgactgagttcagaaaagcttttctcccttgttctcgagctgtagtcccagtccactacaaaggtgttggagtcctggtattcttgctggtgtgcaccctctctttcagccaccaagtttgttttactctagagctgaatgccaacctcttgcctgtggtgaccaaacccaaccgtttttcacctccccgtggataaggtttcccacaagtattcttggccgtctactacttgttccatgctcggcaaaggtcagtgaagctcaccatttactacttgtactctaccactgtctgttgctgggaactaggtgtaaagttcgctcaaaaaataggctgttggatttttggatcgcagacttagtgcagaaggctgaaactaggttctagtatgttgagctccactttggtgcttcctaaaaaaattgttctaaatgttttcaacctaggggtgctataccaaagtagtagagctatatctaaggaataactttggtaatgtgagcttggtcttttgctgtgtaaaagttggagaaaaggttggctaaagttggactgttaggctggacacaactgaatttttttattcagttctgtgaactgaattgcagcagtatgcctagtttggaattcatttgtgactgattcatggggttttagattaaaggttccatagaacagttgtagaccatagtaaagtgaacaagtttgctaaagtgagatggacctggttccacataaatttgggagtaaaagtggccaaaagatggactgtcaggtgttgggattcagacttagaataatatttaagtctgaatatgtgtgtttttacccaactttggggccttgtggtaataaatccaaagggatttgggttaagagtctgtagcaaaatgagggaccagatatagatgaacaagttttgtgcaaagagtgggcttggtactgtatggaatttagagaatagcctgctgcaaaaccctctatccgactcagtattgtgctgtttcagaaattagaaactgaattttcagtgttttgctttactttggattgccataactcttgctctaaatattttcaacctatgatttctataccaagttggtagatctatgtctagagaataactttgagtaaatgagttgggtttgtagttgagggaatttgtgagttacaaagcactgaacagagggagaggaatggagcactagaagatgaattcagagaaacgaaaacaggttcagtgaatcgtagcggattcttggacactataacttgtagtacatgcagtgtggatccttgcttaatgcataaatgaagtacttggttggttatggaggcaagcttttctagtttggttggtaaattgagctgtgatattagagtatttagctctcttaaggttttgttagcttttgtgtacacctttagagaggtgtaagtcttgcgatgcttcttagtattttcttttcaagttgcataagcataaacatccatgatcatgttatttcatatagaactcctaccagaaggagtgaatattcaagctgaagtggtgactgaagaggaatctactccagtggctgctgatcaagtggaggagccatctaactgaggtttaatagagggatagagtacctcttcactgcaataaggcaagccccggtgcatttacccctttccttgtatttttaaaagacttttatacactttaagtctagtgaaatgtgcattaagttataggagttgcttgaaaactatttgatgcattgactaccttgatatccattcctgttatagatacttctttggaagtgttggaca

SEQ ID NO: 119100 - DNA, 690 bp, Zea Mays
atggcgagcagtggacgccggcttggaggagcgcgcgccatgggcgagcgcagggagcttgaccggcgggagaaacgccgggctggggcagggaggagcgaccggcacaggggcacacggccaggggatccgccagccaccaacgcgcccaggaagaaatcgacggggttagggagacggacgagcagaggaacccacgactgcgcgcagacaaatctgagggagagagtgaagcaaggagggagccgagggaggaaatcaatggaaggatgccctgctcaccaccgctcgtctccacatggccggatagccaccgtgctgaccaccacggccagacccacgccgctggcctggagcatgtcgcgggagatggactccttgccttcacctggcgcggactgctcctcggtctgcagtcgcgtggcgtggagaggagctgggcatgtgctggagattagagagaggagaaagacgacggaagggttggaggctaggggaagccgagcgttgctgcttcaccagtgcgacagctcggtggtggaaggagctggagcagggagaggggcgccacggaggtgggctggaggacgaacgcacggagcatgtgggatatttcaacgacgcagaaaaatcccagcgactgtccgtagaaaaagatcggccagaaacaaaaaatcgcgagagtggtga

SEQ ID NO: 119101 - DNA, 112 bp, Zea Mays
gcgttttcagcgtttacctggtatggaaatttggaatggcaatggtataatcacatctttttcactccccttcctaatgcacgtaaaaaaacagaagcagccaataaatgcc

SEQ ID NO: 119102 - DNA, 294 bp, Zea Mays
atggcgcgcacgcctgctccgctgttggccgcgccctgctccctgctgcgcgcgtcggcctccagcccgtggagcttcttctgtgcgcgcgcttctgttctgctgttcagccatcgtttgcttcgctggacgctcaagccatcggacggttcctctctttcgtgcatcacagatctggtggccatcccttttatcggagcagtccgcgccatagagttcgcccggcccggtcccatgcgccagcacgctgtggtcgagtttattgagttcaccaacgctctgttgccgatttga

SEQ ID NO: 119103 - DNA, 118 bp, Zea Mays
atgcaaatagtagatgttatatcttcatgtgggatgagttttatatttggggatttgaaacttggatttgaaattcaatttgaggatgtacagatctaaatagaaaataacaaaagaa

SEQ ID NO: 119104 - DNA, 415 bp, Zea Mays
cgctcttcttcctccctacgcccagccgctcctgctcgttctttaggtagccgccggccgagctccttcctgcttctctctccctctcacgtttcctccttcccatggcgcccagtcgagcttccgcacgcgcgaagcttctctgcaggtcgcgcccaccacgctccagcaccccaccgtcggttttagctccagcttcagctccgccgtggcgtccatgctcgccaagcccatctctcatggccggcttgggatcctgctcgtgtgttcctggccggatttcctgcggacctcttctcccccggcgttcatctccctgcgcgtgtcgtgcccctggctcggtcccagctcggccttgccctttgccatggcgccggtcgccaggatgtcttctccacctctctcatggcgctcg

SEQ ID NO: 119105 - DNA, 294 bp, Zea Mays
atggggaaggaagcttggctgcgacacgcagagaagctccgatccgaggacagagcgctcaggcgctatggagggagcaccgcgagggagctgcgtggagagggagagctcagctgggaggagtggaagaccactcggctgagcgagggagaagatcagtggctgcaaacaaataatctgtcggatgggaagcggcggcagcagataacttcacctaccaatcgaacacttgatcgctctgtcatagatgatttattggagaatcaaatctcaattaaaaactctcggatgtga

SEQ ID NO: 119106 - DNA, 201 bp, Zea Mays
gggtgaataggcaagttaaaactttttcaacaaaaactagaaacaaactaggtaaaaccagttcaaccggtgtcaaaaccagtttaactggtttgcacgagctcaactaaatgatgagatataaaactgaattgatatcaaaattaacccaattatctttggaaatgagatgtcctagatgatccacagggttcaaattag

SEQ ID NO: 119107 - DNA, 351 bp, Zea Mays
aagggttggagacccatatttatagccctagaggctgcactaccccaccttctcacacacactacacaacaggattgtcctctagatgctaaagagactacagaggacagtcaaaagcgactgttgtcctctagatgctaaagcgactacagaggacagtcaaaaaagcgactgctgtcctctagatgctaaagagactatagaggacagtcaaaaagcgactgttgtcctctagatgctaaagagactacagaggacagtcaagctgtcctctagatgctaaaggactacagaggacagtcaaaagcgactgttgtcctctagatgctcaagacttattccatcattctc

SEQ ID NO: 119108 - DNA, 511 bp, Zea Mays
aataaaaccctaagtacgcaagtactcaacaagacttacctgactaaagaaaagactctcaaggatatgctggcttgtcgggaatcaaggtaaggcttatcaaatttcaatgactcatttgcagaagagcttactagtagtgaatccttatgccaaaattttacttcacaagttaagtacttttcctgaatctagatttgcctaatctagagcatccacttgtcctggtctagctttcttttacccaaattcttattttacttataaactatgatgtgtggtcggagggtagaagtctccatgaccgaggagcaacgacgattcaaaccgattatacccaactgcggatccctaaccacacgacatatgtagcacttaactcttgcatatgtcaaccgttcccacagatcctccacaacgtgaaccggtccgtgctacccgggagcatagtactcctccgtccagcctctagccaggagggtacacgctactcccaccatctcccatgccc

SEQ ID NO: 119109 - DNA, 204 bp, Zea Mays
atggcgggggctcatctgctagtggtcgttgacgacgtcgccccaacaacagcggaggaggcaaggctcagtcgccctggccttcgttgtacaatccatggaccgggcaaaccacgatgtggcccgaccccactggacaacagcgcggcggacgcccgcctgcacaccagggcgccccagcaggcgctcatcgttgcaccatag

SEQ ID NO: 119110 - DNA, 1814 bp, Zea Mays
gaccggttcgacttcagaacttccagcatcctatcagataccgaaatctccaactcccgcatcgcatcgaaccttcggcctgcaagcgaattcgtcctcccctctcctaccggcgcgaattcaaccgcccgcaaagccctaggccgatgcgtccgatccggctacccgagccgccgggtgtcgacggcatggagacgcccgagatcttctctggcagcggcactggtggcgccgccgtcgttcgccgcgccgtcctcataggcaacggctcccccggcgcagaaaaccagtgtctcggcctcgcccgcgccctcggccttgccgacaacctcacattctaccgtgtcacgaggccgagaggagggatcaatgagtggctgcactttctccccatttccatgcacaagtttatagaccaaatactcaggcagttcttccggaacacaaggttcgcaatagtggttcaggggaggaagccgcgtgtgctgaatggtgcatcagttgggttgtctgcagttctggaagcaaacgtcaagaagattgttactgtagcacgcgatacgtatgagaaggaaggtccgacgttagtcgttgcttgtggctgggacaccatatcatattcaagcttgataaggaaagtagcttcagataatgtgttcgtcatccagatccaacacccacgatctcgccttgataggtttgatttagtggtgactcctcgccatgattactatgctttaaccgctagtggacaacaagaagttccacacctgttccgcagatggattactccacaggaaccacccaggagtaatgtggtacttactgttggtgcactacaccaggctgattctgctgcgctacggcttgctgctatagcctggcatgatgaactcgcccctttgcctaagccgttgctaattgtcagcattgggggccccaccaggaattgtaaatatggtgtagatcttgccaggcagctcataacttctctgtataatgtgctagatagctgtgggagtgtcagaatctcattctctccgagaacaccatggaaggttgctgatactatatttaaagaatttgctggacatcccaaggtctatatttggaatggtgaagaacctaaccctcacatgggacatcttgcatgggctgatgcttttgtcataacagcagactcgataagtatgttaagtgaggcaggtagcacagggaaacctgtttatgttattgggaccgaacactgtaaatggaagttttcggcttttcacaagactctacgggagcgaggggttgttcgcccgttcactggattggaagatatttcaaatagctggagctaccctcccctaaatgacgccattgaagtagctactcgtgttcgtgaagtgattgcagaacgagggtggacagtgggatgatgtgatcataagtagctctctgttattctgtctaactttggtccagatatgatatatacggtaaactatagagtttggttagcatcactgtggattcagtttgtgtcgtttggaaaaaaaaaggagagaataacatagccatggaatggcctgtacaaaaggtgaccctctctttcatggtacacccccaagccaaaattttgagtaactgcacagctccgggagatttttttggctactggcaacatgttgcctgatgtaaatttaagctgctagaaggaattggagtaaatagagttgataatgagaaaatttgaagctgatgcaacgtttcgggttttgtatggttgtatgcttatgactttaccctgttttgattaaatttgtgta

SEQ ID NO: 119111 - DNA, 107 bp, Zea Mays
cttattttttgtagggtctttacttagtgagaaccccagatcatttaccattgtgataggaccaaacttcatgtctaaactttgtgctacatctactgcatgtttgc

SEQ ID NO: 119112 - DNA, 1510 bp, Zea Mays
tcatcaatagaatctaatcagccatcttctgcctattcaaatatttagattctaactaccagtttctcactacaactatattatcaagcattcagttttttactataatttttctctacatccaacttctcctcgtagtcatcttttcagaaaagtttcttagacccacaagctagagccagccagccgctcagccccagccctcggaaacccatcgcaaattcgcaaactaaccccaaaccccaatccaccccatcccctcctcatccactccgggcggccatggcctgctccttctccgccgccatcaccgtctcttccgcccctaccccggccgccagacccctcgctgctgccacgcagtccgtctgcatcgctcgctccgcggtcgccaccactgccaggccgctccgcctcgccgcctcaaggtccgcgcgggctaccagactcgttgcccgcgccagcgtagtcgatgacttgccgctggtcgggaacaaggcgccagacttcgaagccgaggctgtgttcgaccaggagttcatcaacgtgaagctctctgattacattgggaagaagtacgtcattctgttcttctaccccttggatttcaccttcgtctgcccgaccgagattactgcgtttagtgacagatacgaggaatttgagaagttgaacactgaggttcttggtgtttccattgacagtgtgttctcccaccttgcatgggtgcagacagacaggaagtcgggtgggctcggcgatcttaaatacccacttgtttctgatgtgaccaaatcaatttcaaaggcctttggtgttctgatccctgaccagggtattgctttgagaggactgttcatcattgacaaggagggagtgattcagcactctaccattaacaaccttgccattggtcgtagtgtggatgagaccatgaggacccttcaggcattgcagtacgtccaggagaacccagacgaggtgtgcccggccggatggaaaccaggggagaggtcgatgaagcccgaccccaagggaagcaaagagtacttcgcggccatctagattcgtcgtcattgagaagcaggtgcccgttaagtgctccagcagtaggttctcgtgttcagcggagctcgcgttttgacaagtgtgttgtgctgatgtgcatcccgatttgagtgctgttctttgccaccttgtttagttctttcagctgacgaataaggttcattgcacgtgattgagcgcccacgtttttggttttagcgtagtttgttgggattgactggtaagctttgcgtcgatgctgctgctacaaggcctctaattttatgtgggcagctacaacgtgcgctgttcctggcccaagctggtatgcgaaaagagcaaggccgcttaccagggccccatgactgaaccttcctctcgctgcttttgcaagcccttaaaaggtctattgctattgtgggcttggactacgttcatccaggatctgcaatctggatcatca

SEQ ID NO: 119113 - DNA, 97 bp, Zea Mays
tcagaatttgtgaagtgggctatgtgtgttgttgctacatttttcattatgcagtcatgaatgttctacgacaagcaaaatttatgacctgatcaac

SEQ ID NO: 119114 - DNA, 392 bp, Zea Mays
gcttttgtctatttatggtgcaacccttagtgaaacatatttggagataattcagcttatgaatatgatagattcacctaagtgtcgaaccattactgaaatcgatcatctgtggggtgcttccgctctgaaattcagagaagaactgaaactagatttttcaaaatcaggtacaaataagacagggaatgctgaaattactaaaaggagaagggtactcttttggagaacatatgacgtgattgggtttagggattttaggaggagaatggtatgggctttttctccgggggatctacgcggttggggaaattgggagctcagtggtgctcgatctctgttatacaaacactaaaacctgaaagatgtttccagtacttcatggaaattta

SEQ ID NO: 119115 - DNA, 522 bp, Zea Mays
atggcaagcagaccgacagagacagcacaacggcctgcacagcaaggtcgagacggtggcttgacgacgaaaccacatctgcgcatggcggggctaagcgccggtaaggattccaagcgtgcgacgagcagtaaagagagcagggcgccatgggaggaaggttggaggccgggcacgcaggccaagctgagccaagcagatggggaggagaccgagtgccggccgagaaactgcggccatgggcgagcagacatagagtgtcgtgagctggagctggggggatggagaggacgcagggaatccggccaggaactcgcgagcaagatccccaagccggccatgggaagggagaggaaggagccgagcgccatgggaggaaccttgctggggaggggcgacgagcataggggcgcggccatggaggtaggcgctggccagggggaaacagggagctcagcgcggctagagaggaaagcagggggatgggcgcgcggctggtacgcagggagaagcgcgcactag

SEQ ID NO: 119116 - DNA, 339 bp, Zea Mays
gggcactggaaacactgattcgaatgtctgaagaagaaacacttttcagttgcatatctgacacatcagtcctttctgaatatgtatattctcccgaagaacgatccttggtagagtttaccgagctcaacttattctcaaaggaatccgaagtgaaagtagagctaccacttaggctactttctcttgcaccatcaaaaggaattccagcgatccggattccatctatatgttggacctgggatccatgctgtcctcgacatatcaaggcactaagaccagtaaaccaagcctccgccttgactttattcttgcagatctttgaaatcaagggagccc

SEQ ID NO: 119117 - DNA, 121 bp, Zea Mays
taatgctgtgcctaacaagactcggctttgagttggtgattaaaaaaacattcagcatttctttttatttatattgtaatgacatatacaaacctaaatttcacataccaaaaaaataaaa

SEQ ID NO: 119118 - DNA, 1346 bp, Zea Mays
atgcgcatcctcacagtggcgtatgtgacgcgccactgcagggagcgagggtgggacgggctctcgtgggacgctccagggactctggcccttcaccaaactctccatccgctggaggaggaccgccgcaagattgaggagctcaagaacaaggccgcagactggcagctcgacctcctccagtttggctccaacacctccgagttggtgttgaatgtacattccataccatatcacccaagggacaggactatgtggagggtgaaaacttccaaaggatccacatcagaatcgaaacaaaaggaaattctcgaggttgtcgtcacggaagttcttggttatgggaagttttatgttagactgtggttctatgaagtacttattgtttcactttgttttgctatttttgcacatggcttcaggcatacattctcatcttttgcattgaaagaactgaaccataaaaaaaataaagacaggagcacttctctagattcaatgccaatgaaaaaacttatagttattgcacaagctagaatgttttctcgatcaacttcctttccagataacttcctaaatgccaagtatattcctgaaacatcaataaatataccttctaaggaaggtccacataggcagttgtcaccctcaaatcggataatcaggtctacttctggaaatgataatgtcaattctaggagtctgtttgataatattcagcagaagaaattagcagcgcatggagccaatgcagcgagaaggtctttcaaagatttcctcagtacattaacaagaaccaaagaaagtatatcgcgtgcgacacgtcttgctatggaatgtgctaaatttggcattgctggtgaggtgatgtatgatgcctttggtgttaggctacaagcaggaaagcaagcaaaggtcttgaaccagattgtgtatgagcttccatcagaacatccactggctgaaacaagaccgctgcgagagctactagggcacacacctccacaggtatttgctggcgaagtgcttggatttgcagtagccacatttatagcgatgatcgctgggcttggtagttgactccgcatttgaagaaatggtcaacattcacattgaagttctagaattcaaattggacacatgtttcctagctagcttatgatagataatgtgttgtgtataggtgtatttaatatgcaaattgctgtcaatttgttgaagagaaacttgcgtcattcttttgtagttaatcgacgagtgaactatatgttgtattcgttcctgtccaaagtatttggactgattgaaagtacctcttgataaagcattcatgagatttccgcaca

SEQ ID NO: 119119 - DNA, 510 bp, Zea Mays
atggtcgggaggacgcggcgtactacacgacaaccagcagggtgctgctgcaggatagacctacacgacgctggggttgcgatagaacatgaactcgcgctcgccgttgtcgcggaggatagcagcgagcatgcgaccgaacacgtcatcgccgagcagaggaggatgggattcgatggcgctgggatcagaggagctcgcggcagaatgcgcagaaagaatggaacgcgcgcgacgcagccatggaggaacagggagctccagcgcgaactgggcagagtcgagccagggagcaggtgccatggagggactcggtgcagggagaagctccatggcgagggggctcagtcggtagagggagcaggggctggggcgagcaggcaccgggcgcgtggcgccaaggaagaaggccgagctgggcgcagtggactgggcagagagactcaaactggcaggggagagcgcgtagggactccatggctggagcttccggcgagcactggaaattga

SEQ ID NO: 119120 - DNA, 201 bp, Zea Mays
atgctcaactacgaccaggtcttcatcagggacttcgtgccctccgtgctcgccttcctcatgcacggcgagaccgagatcgtccgcaacttcctccttcacaccctccagcttcaggtgaaacatgaagagctgcttgagtatgcccaaagtatcatttcaggattgaagagaaatgatgaaattgtgaggtggtattaa

SEQ ID NO: 119121 - DNA, 357 bp, Zea Mays
atgggcgagccgagccgggaatcacggcgcgcagaggaggaggaaggagagggcttgggcacgccatgggggggaaagcttcaaggaggagcccggcacaggagaggagcaagcaccagggagcttggggaagctgcgcgacgcagagagccgctcggcgagcgcaataagaagccgaggaagccaggtgcaagcgagctggccagggcttggaggcatgtcgcgagaaagaagcttggggaggagagaggcgcagctgccgtggaagaagcagggcgcggtggtggaggcaacctggaggccgaactgcagcagggaggaagctccacgcctgggcgcgacggctggagaagataa

SEQ ID NO: 119122 - DNA, 2322 bp, Zea Mays
atgccctctctgctctcggtatggcggcggtggtgctgttttctctctgccctccgcccctccctgctcgcgctgctcgtcgatcgtgctcgccctgctcgcctctgcgccctgcggtcgattggggatctcatgctcagctgtttgctttgctcgtcgcctcgtcggtcgtgctcgcctgctcggactgctcgcctctgtgccctgctcgtcggtcgtgcactcgtgctcgctctgctcgtcagtcgtgctcggctgctcgcctctacgccctgcggtcgattggggatctcgtgctcggctgctcgccctgctcgtcacctcgtcggtcgtgctcggactactcgcctctgcgccctgctcgtcggtcgtgcactcgtgctcgccctgctcgtcagtcatgctcggctgctcgcctctgcgccctgctcgtcggtcgtgcactcgtgctcgccctgctcgttagtcgtctctgatgctccggctttgaaagtcggggtcatggaccttgacgcggctgcagaggaggaggagcgccggcttgaggactacaatgaggcacaggatgctaggtacttcctggggtttggtgacacccatggagatcctattgaggttgatactgttgccggctctcaaattggcactggaaccggatccactagcccgtcagcagcagtctctaatcctgatcaggctgctgatgctagtggtggcaacatgaagaaaaggtccaagtgctggaatgactttgatgaattgactaagattgtgaatggatggcacgaaggttcttcgaaggctaagcaacacgaagttatggcccttaaaaagtattacacggtgccttctttccaaggattcggggagatcttagaggtggtgaaactgttcagagaaaccctggttcatacctttagtgggttcagactagaatttacgtccagggacgggggaggagcgccactaagcagactcctgctccaagtgctgggtctacttgttgctttgaacgaagaaaaggggcaattgaacattggaattccccttcgacgtcggggaaaccggctcacagtagctctgggtcggttacagaaagaagggctggaattcaatctgaccaacggcgcggcgcttcgattactaagggtaagggagcgcatcagtctctacttattctacgccttacaggctaacccgaaagaggataagataaatttttggttcttccaacatctggtaaggagaagagctttgggtttcctaaggggagccccaccaagcgggttgaaaagcctccactcgagtttaattaaaaccctagtcaaagagatacccgaacttatgggggaagtgaggcagaagcaggaatcatgtcctttctttagctcgctggtgtgagctgagcttggctatccgagccaaggaaagatgtcaaccaatggacaacgtacatagtaaagatcgtgtatttacaacggaatagtatacaaaggaattcttcgaacacatataggttaccaggatacctaacaaacttctcaaaaacccaaacaggaagaaccattacccttactagtaccaaggctagagatccggatttgaaccaaggaatggaatcaaatgcaacaagaaaaaggtatgaatgaaccgttagaaacaagctaagatatctggattgccaatcaaaggaagtaagaaactattctcttctcttttcttttcaggttctagtatacgcctacataaagagaaaccttaaccttgcttgcttgtcttgtaactggaaaccatagacccagaaaccgtatcaaaccatatcaaataataggaagaagcaggaatggaaacataaaccgtcagaaccacggaaagagatcctgattcccaatctttggctgtaagaaacagaaggatgattcagtatactagactagcacatctcgatacccctttcctttagccaagaaaaatagacacgatgtcgttttattttttcgcattggaaaagactatccataacctatgtccctaaccggattctgtgtcagaaagcgtgaatctttattgcattcgatgctctgccttcgcccaagcggtctccagggaaggaagccaataatgggtgtgtcagggtggaataaagaaataggaaagaaaagcctatcagtaaagagagaacccttaccaagaaacggcttccaccaaggtaatgaatactacctctcaagcaagggaaacctatgaagacagaaaagagaaccctaaaggttagagccaaggcaagaaagaatgctaaacctaagaacctgtcctttaaag

SEQ ID NO: 119123 - DNA, 611 bp, Zea Mays
ttttttttaagttgagacagactcaattgcttctgttccttctggggctggcttggcttcttgagtttcctaaaaggccttcctcggatgcgatagagatagattgcttttctttttaataattctttccccgcaagctcaacagcggaaccggaccctggcctcaatggatccgaatctggcctgcccgaaggaatggactgtacgaattggtcatttggctgagactaccatatttggaaacctggcctagattagaaggatgcgaacaaggcatagttctggcactttctctactccaatacctgcttcttcgcctgcccaaaactaatagctctgttggaacgagtgctgggattcatcttcattcatctacctcgcgccggagaccttcacaagctcactagtataaatcagatctatctggccaaaggataaactagtagctatatgaagacctgcacccacccctgctctgaaatgtttcccgaggaactgcttccagtatcgatagaagctcgagtgttcacatgcataccactactatccagcatcaactggacctgcacctaaagagaaagagaggcgcagaatcactcaactagactcac

SEQ ID NO: 119124 - DNA, 246 bp, Zea Mays
cggagcatgcctgcctgcaaatcgaatcctatcctatgaaacaagcttctactattcaaatcaaatcaaacacagaaacctcagccggagatggtgagtcaagtattgcacgccagttggaagtcaagctatctggaatgcggagaccccacccgtagctggttctagatccggataatcaatcacaagatcatgcggagaatttaacagaacagctggcatgcgcactcaactacttacaaatgc

SEQ ID NO: 119125 - DNA, 3457 bp, Zea Mays
aaaactactaattctagaccagaagatcttctcatgttggatatcagaaataaaatgggtgatctttcgggagggagtgccagtagcaccagttcatcgtcttttttgtcttgcaattctagtctacactctcatagtccttcttcttcagaaggattcatttcttttgggactccctcgtcctcttcctctatcaatcaaccatcgccattagcatcctcttcctctgtcaatcaaccctcgccattagcatccttttctgtgaaccagccatccccttcttccgtgaaaggagtattcttaacggacagtggtactccctcttcctcttcatccgtaaatcggccatccccaaacccgaccgatgaaagggtcgtagaatatcaaggggctatatgcgaggaaatggccaaattaatgcccggcagggatcaccaagagattctagttgcagccgaacgaatacatggggggagtgctaatataggatttcttcgatcacagctccgggatttagtagcaaatggcactgaaagtgaagccttcaagtacggaatggctgagctagcgaatgagaatttagcggcaaatttcgctgtgatgcatttagcggagagtcctttggatcaatttggcattcaccctctcgctctcgctctcggtctcggtttgttcctatttctagtttttatttttcttgcgctgcgcgaagtatggaaaaacaggacgagagcagcataatcgttagttaggggtaagaggggaatcttatgtccatattatctaaaaaaatatatgagtgttaagcttgtccgcgttgttatttgttgtttatgtgaggctgcatgcgcttgttatttgttgtttatgtgaggctgcatgcgaatgattaactcgtgtctttatgttgtcagccatgtgagaaggctaataaattatctcttttctttcatcagggtccgggaaaaaggaagtaagaccctcgagacgagaactacatatggtctgatactgacttccttgaaaagaggaagacaagttatgtaggcagtagccgttccaaaaatgcagcggtaccacaagtgctcattcattggtccaacctagaagctacttgggaagactatgaattgattgcaagtaagtatcatggacaaggaggatttttaggagaaaggagatcctctctcaacccaatagatgcaatgtaggaagactagtttagtccatgggtgtaacaccataagatgggattgatggtaatctatcataaattgtttccctttttgtctagatgacgtccccacggtgtctataatttatgtcaaccaataagaaatacccgaaagaagatgcataggccttcaatcatggtgcaatgaatatcgtagatagagtgatggaagaagttcgatctcatatagctagctggagtctttcttttcaaatcaaagtgaaacgattttccttttacgttgagatatttgaattggattttctttcaccactactatcgtaacgcacagaaaacactgacgtttccgctcgctttcaaccactgccactttacctgagcactgtgacacagtcggtcaagtattgaggctagtatatcaaggacttatgagaactgaaaagaaaaaaactaggcaaagaaattctcaaagttcattgagttaagggaggacggaccattcgtggcgggttcgtggaagagttgggttcgattccctttatacgcgatgtggcgaaaaagactgattcaacgaaatatgcctgcattaagatttaaaacgtgccgtctacttccaggaaatgttcggaacagagaactttctctaatccaacgccgcattctctgaagattgaggaacaagaggagatccattaaaagaaatctttctcagagagaaaatctaaacagtaacatcaaatcacaaactacacgaaagttgtccctttattatggggatttacccataagggagatgcacaaaggaagagaacgaacttcatatatccctttttttactcaatcaagaaacaagatcggacgtgatttcggttcgtctccgttttagtgacactcttcctcaagcaaggcagctgataagtcatcgaagggtttgtttgaataatggactggtaaccattactcattttaaagtttcccatggtgatctaatatcttttaaagaaaatgacgcgagaacccgcggtgaagaaataaggagatctttctatatcgacatatcagttggaaaaatcataggcaaattcctaccggtcagaatctggagaagaacaaaaacagaatggttccgcttactcacaactcagaggggatgccgcttactactaaaatccgggtttttgcaagagttgtgttcttatatgcaagaagaagacttagaaagaacaaagaagtttggatccgcaaaagtatgcttaggcagttccttcgctgagcacaacagaatgaagaggaatttgtttcatttcaaatacttcttcttatggaaaagaaggaaggaggaagaggaaggggtagaggagatcctcaaagttatcgagcaaaacgaaaaccgaaaaagagcaataagcccttttgtttacacaaacaaattatatagaaattcgacctattgctccggatccccgtttactattactaggaagataagaatcaaaaggatcgaactacctactcattattcagaggtgaatcatagaacactaaaagctgtggtatcttatggacctaacataggtcacatccctcacgacataagattgaaagatccaaaccttcctcttcggagcggaaacggacctggccaaaacatataaaaaaagatcggcctagtcgctcatagggacatatctatccggatagaggagaggatagtctagatcaatttttagaaaaatctctctatatatagaatagataggtatctctgtggatagagataaagatagggatccctcgaaatatatggaaaaagtgcactttttgactactactactatttcttattcttagacgaaacatcgttttttcgattttgactgaattggtcggagcgtagacgagcgagcagagcccaggaaagaggtcagatcgtcattgagtagtcgactataagtataagactgctggcctgagagaaggcagtctctctcgggaaacatggcccagggttctatagtatagtatagtatagtatagtagccagactataggaaaatcaagtctcatgttgctcctcagaaaacgcgtatagtatatagtatatagtatatagtatatagtatatagtatatactatatagtatatagtatatagtatatagtagtagtagtatcattggccaaagtaaagtcgatgggacaaacactgttcgttagaactagcattttgttttgtcatggaatcaagtctatttgttcgaa

SEQ ID NO: 119126 - DNA, 727 bp, Zea Mays
ctccctagtggccagggaagcgttagcttcaccctttgaacgtctcatttactctctctagctctcgactttacgtataggaatttaaggtacattggtcgatgaaagtgaacatctatcttatcttacgccacttactctacctttactttgtggaagacgtccgattgaatgatctccagtgggttctattaccatgtgtacccagcctgcttccttcttttttaccagcctctctgcttctgtcagtatagaggaaagtcttcaatccaaataaaaaaggaaaaaaatacctagcatgacacatcagctacaccatcagagcctgtccacttgctagtcaggaaaaagaaccgctccgttccgtgggcttctttcgcagctctcttcacgctcgctttacgagtgcaaccaagttcaataaactgtgaatgctaatttaattcatagactatgttggtttctatctaagagtcctgtgagacgctttccttctcatacacatctgaaggaacgtttgatcatcagcattagagagttttgcaggtccttgagagaacgttatccagccaccataccatggtctgaggtgaaagaaattggtcctagtccataaaacgaaaggtgctgggcaagcgcagagaagtcgtctgaaggggagttccataggaatgttcaacttcgatcaaccttggtcccatgcctaaaaaagaaagaaggtaaaaaa

SEQ ID NO: 119127 - DNA, 1557 bp, Zea Mays
tccatccctagtccctacccccgcctccacttctctgcgcttcccagcgccactgcccactgcattgcagacggacagtcggacaggaccaacagctgcccacagcaccaaagccaggaattcacttggattgattcaagggaaggcttcagatgaacgggcggctgtcggccgagtaccgggggctggaggtgaaggtgccgaacctcttccggtgccccatctcgctggacgtgatgcactcccccgtgagcctctgcaccggcgtcacctacgagcgcgcctccatccagcgctggctcgactccggcaacaccacctgcccggccaccatgctcacgctcccctccaccgacctcgtccctaacctcaccctgcgccgcctcatcgcgctctgggcgtccacggccgcgccctcctcctcgtcgcccgccgcgtccgccgtcgggcccacgccggccgcggccgcggccgagctcctccgccggatcgctgaccccggcgcggacccctgccccccgctccggaagctcgcggctttcctctccgacgacgacgtggacgagttcgacaagaacgcgctggcgagggccggcggtgccgccgagaccgtggcgtttgtgctgcggagggcggacagggaggccgcggaggccgccgtgcgcgtgctcgcggcgatcgcggcgtccgactgcatcgaggaggagagcaagaggcgcgtggccgctgcgctcgccgccgacgcgccgtccgcggccgcgtccctggcgcgcgtgctgcggagcgggacctcgctggaggcgcgcgtcgacgcggcgaggctggtggagtcgctgctccgcaatgcggcaccgggggcgcgggccgcggtggcggagtccgaggacctggtccgcgaactggtccgcctcgtgggccccgcggacgagaagaagggcagcctggacgggcaggccgtggcggcgggaatgtcgtgcctagcggccgtcgcggcgacgcggcgtgcccgcgctgcgatggttcggctgggcgccgtggccgccgcggtgcgcgtcctggaagccgacgccgggcccccgggccaggcgctccgcgtgctggaggccacagtggggtgcgccgagggccgcgccgcggtgtgcgagtccgccctgtcggtggtgcccgcggtggtgtccaagatgatgaaggctggggtgggcggcgcggaggcggcggtgtcggtgctctgggcggtgtgccaccggtaccgggaccggcgcgcggtggaggcggcggcggcgtgcgagggcgggctcaccaagctgctgctgctgatgcagagcgggtgctcggcggctgcgcggcagatggcgtcggagctgctcaagatcttcagggtgaacggcaagagctgcgtcgcggggtacgactccaagactagccacatcatgcccttctgattgtagcagcagtcggagtcggacgaacggaaccgactcacattcttcctgtctgtttcactcttgcagtttgcatctctttggttttgattcggtggaagtacattgagctggg

SEQ ID NO: 119128 - DNA, 442 bp, Zea Mays
tcaccatatcaaacctcggtcgtggttgctgcacatgtggcgtgaagacgaacgcgccgtcaatcacgggagactgaagcgaagtcgaaggagcatgacgggcaccgtggcgtggcaaggtgaggcacccgccacgaaggggctgttgtggctatcggttggcgtggcagagcccacgggtggctgacgacgcacggcgacctgactcggcattgcgtcgaacaggtggcgcgcgcggcgtgctgctactacttggcgctgcacaacaagggagcgagcgagcagcagcgaagccaaccaccatgcacgggaggggcttggccagagcaggaaaaagaaaaatgaagctcgggcatggctgcacttggggaggcggcgtcgagccccaaggcaatatcttgcgcaagaacataaatcagggagggtaggcgctgctcgacca

SEQ ID NO: 119129 - DNA, 387 bp, Zea Mays
atggttgggagcgtgggcaacgggctggcggatttggacgcaggggccatctccatgaacggggtggggaaggctctgtatcctgccaaggcggcggcggcggccgccgcggagacgctccctgtggagctggagccgccggaggccgtagtggcgccgacgggggaggaggctgccaacgggaagagggagatagtgatggggaggaacgtgcacacctcctgcttcgccgtgaaggagcccgacgcggacgacgaggaaaccggcgagagggaggcgacgatggccagcatcctcgcgctctaccgccgctcgctcgttgaacgcaccaagcaccaccttggaacaagtttattttgctttatagatggacaaattttgctataa

SEQ ID NO: 119130 - DNA, 1221 bp, Zea Mays
atgagggtcgtccacccctataagctagatctttatcgtactttgagtcctctcatcacctacataaggatccacgcccatatttttcatgaaggttacccgtacaatctggacttcgattatggtgcactggcccaactgcagcacttctcgattaacaaccttggtgaccccttcatcgagagcaactatggtgtccattccaggcagtttgaggttggagtgctggattggttcgctagcctctgggagttagaaaaagatgagtactggggatatattactaactgtggtacagaaggaaatctgcatgggattcttgttgggagggaggtgttccccaaaggaatattgtatgcttctcgtgagtcccattattcagtattcaaagcagcaagaatgtacaggatggattgcgtcaaagtcgacactcttatgtctggggaaatagattgtgctgatttccagagaaagttattgcagaaccgagacaaacctgccatcattaatgttaacattggaacaactgtgaagggggcagttgatgatctagatttggttatcaaaaccctcgaggagaacggctttaaaggtcggttttatattcattgtgatggtgccctctttggattgatgataccatttgttaagaaggcgcctcaagtgacatttaaaaagcctattgggagtgtcagtgtctctgggcacaagtttgttggatgccccatgccatgtggtgtccagataacaagattggagtacataaatgccctgtctagcaacgtggagtatctggcgtcaagggatgcaacaatcatgggaagcaggaacggccatgctcccatcttcctctggtacaccctcaacaggaagggctacagaggctttcagaaagaagtccagaagtgcttgagaaacgcacactacctaaaagatcgcctcaaggaagcaggaatcggagcgatgcttaacgagctcagtagcacagttgtgtttgaaaggccaaaggatgaagtatttgtccgaaggtggcagctcgcttgtgaagggaatatatgccacgttgtggtgatgcccagtgtcaacattgacaagctagactatttcctgaacgaattagtggagaaacgggcgacttggtaccaggatggaataagtcaacccccctgcattgccagagtcgtaggctttgagaactgtctctgtggccgtcataagtag

SEQ ID NO: 119131 - DNA, 1010 bp, Zea Mays
attatcaacaattcctgataaaaacagacccacttcctctgatcctcttcaacccacccaccgtgggttcgtccagccttccggccttcccccccggtggtcatcacatctcccccaattcgccgccccctccgacctcgccgtactcctctcgctccgggttaatcgctgctgtcttctgcagttgaagtagcctcttcatctgctcgccgcagttcgtccgttgcccatggcggatgaggaggtaactgatccaaaggcgttcctagaggaacgttcaaaggctaagtgtgtgtcgcagtggtatgaatatcagaaatgtgttaagaggattgagaatgacgagactgggcacaaacactgtaccggccagtactttgattactggaaatgtgttgacaagaatgttgcagaaaaactctttgagatgttaaaatgacaagaaaagttttccctacttcagttatccacccaaagttggtaataattgtatcacttgtgtggcctatagactattaaggcgctcaatatttgttagagaagttttgccacttgggtaacacaaattttccactgccagtttgcatttcatttctgctactagtattgaaccagcaggtttcctcctgcattgttggataaaaaatccatcgaatatttacaagattgtggctgattattaaatgctgtaatacaccttaattgcttttacggtgtattttgaggagcacatagcaaatcatttgggtcctaaacttggatgtgtcggaataacatttgtacatcacttctagctggtggaaatgattcatcatgagcagaagtttgtagtactgcactggaatgaaacattggcacagcatagcttttgtccagatgtgagttgatacgtggatgctgttatgagcagagcttgtggctatatattacagcatctcttgcatcctttttgtttgtgtgtttccatcaatgtatgtttactggccattgtatatggagttatctggtca

SEQ ID NO: 119132 - DNA, 985 bp, Zea Mays
attatcaacaattcctgataaaaacagacccacttcctctgatcctcttcaacccacccaccgtgggttcgtccagccttccggccttcccccccggtggtcatcacatctcccccaattcgccgccccctccgacctcgccgtactcctctcgctccgttgaagtagcctcttcatctgctcgccgcagttcgtccgttgcccatggcggatgaggaggtaactgatccaaaggcgttcctagaggaacgttcaaaggctaagtgtgtgtcgcagtggtatgaatatcagaaatgtgttaagaggattgagaatgacgagactgggcacaaacactgtaccggccagtactttgattactggaaatgtgttgacaagaatgttgcagaaaaactctttgagatgttaaaatgacaagaaaagttttccctacttcagttatccacccaaagttggtaataattgtatcacttgtgtggcctatagactattaaggcgctcaatatttgttagagaagttttgccacttgggtaacacaaattttccactgccagtttgcatttcatttctgctactagtattgaaccagcaggtttcctcctgcattgttggataaaaaatccatcgaatatttacaagattgtggctgattattaaatgctgtaatacaccttaattgcttttacggtgtattttgaggagcacatagcaaatcatttgggtcctaaacttggatgtgtcggaataacatttgtacatcacttctagctggtggaaatgattcatcatgagcagaagtttgtagtactgcactggaatgaaacattggcacagcatagcttttgtccagatgtgagttgatacgtggatgctgttatgagcagagcttgtggctatatattacagcatctcttgcatcctttttgtttgtgtgtttccatcaatgtatgtttactggccattgtatatggagttatctggtca

SEQ ID NO: 119133 - DNA, 951 bp, Zea Mays
cggatcctcactccgcctccacctcatcggcgccgtccattcccgcgcaatgccactccgtcacctagccggctagcccttctctcgaaaaagttcccggctccccgctccggttacaaaacacccaaccccatcccaatctccgaacgcctcgcatcaaaccaactctttcccaaatccaccgccggctcggctcgcccatcttcgcgccaagcaccgaatctccgatggcccgcacgaagcagacggcgcgcaagtcgacgggcggcaaggcgccccgcaagcagctggccaccaaggcggcgcgcaagtcggcgccggcaaccggtggcgtgaagaagcctcaccgcttccgccccggcaccgtcgcgctccgggagattcgcaagtaccagaagagcacggagctgctcatccgcaagctgcccttccagcgcctcgtccgtgagatcgcgcaggatttcaagaccgacctccgcttccagtcctccgctgtcgccgcgctgcaggaggccgccgaggcctacctcgtggggctcttcgaggacaccaacctctgcgccatccacgccaagcgcgtcaccatcatgcccaaggacatccagctcgcgcgccgcatcaggggcgagagggcttgatctcccgttgtcgtcgtccacgttgttgggcctttcctctgtgtctctgcttgtagaatccttgcttctgttcggttccttctgttcgcatgatggtgttcgtagtgttaggagttgcattttctaatctgcttgttcttgcaccggtgcctctgaagtggcgtttccctctatcttaatggaaatggaatgtgctttaaaaaagaaatctgatgtctcgtttgtttccggaattgtaatcttattaacagaataggttatttttttaagatgtgaccttcgaccgtataagtctatcttaaatttatgagct

SEQ ID NO: 119134 - DNA, 859 bp, Zea Mays
tcttctctcccagcgcccatctctctctctcctcgctgaagctcccatggcgttcggcgtccccagccatggccgcggctccctggagctcgcctgtctgctcacgacacacgcccagcgcctcgtcaagctcctccatgccggtgtccctgcttccgtactggccggcgagtggtctcgagctcccatggcgctcggacttctgctcgggttcaggctccctgcgcgcgagcctctgcgcgccctgtctctctcccttcgcgcgcgctgctccctgttggcccgcgcagtttcccggttgccgctcccggatttcttcctcggtgcctagctcggatttccctatccctccatggccggtcgttcctaccaatttccctggcctcgctcggtctgctgcctctgctccctgcgcgtccgactccgttcggccgagcgattttcccgtctttcgctgcgtcgcgcgctctccccagccgaggctcatgctccccacgcgtgtccctcggtctctactcggatttcgaccctgcccagctgttcctcctctctgctcgctctcctccatcgccgccgtgggctcgccggcgtggtccctgctctggccgccgtggtggcacgcgctgctcccctgagctctcccctgcgtacccggcctcaagtttcctcccatagcgccctgctccgtttactgctcgtcgcgcgcttggaatcctggctggcgctcagccccgttgtgcgcagatgaggttccgtcgtcaagcctgtcgaacctcgttcttctctgctcgatctcgtcgaaccccgaatcccggatattaaacaaaaataagtgaggtccctgtgtatcgcttatcaa

SEQ ID NO: 119135 - DNA, 2069 bp, Zea Mays
ctcccacctcgtgtgtctgtttctccggcctgggctctgggctcgggcgtagtccagttgccaccaaccgagccagagagagaacaaagaacgggtgaaagaaatctcggaaaggttccagatttcctcgaggtggaggcctccttttcctcggccgaatcgctcgttcgctttctctctctctttcctcccatcgagcatgcattcttttctgctgctgcgaccgtaggatcggcgtccagcagcctcgccgcgtcggtatggttttcccttggcccacacatcctagctcttccgcattcttgaatttcgtggtcgaggattagggggtttctcgtgcgctggtccaatttcgcgctaatcgtcctgttcctgcctcggattactcgccttctcgtggtccccatctgttcttggcgttcgcacgcttgccgtgcggcgggcagggctgcagcagcagccggcagcgcgtgcatcttgcgaccccctttccaagaaccagctgcaagctttggccttttccgcctgccgtacccgaaatcccgcaagaaactccacccaagaaaaaagcggcgcccttttggctggctggctgccattcctcacgccccacgagtttggtgaggctttgaaacgagcacagttcacaagacagtgaggctgcggtgggtgtttcctcgtcggagatggagggaaatttgccgccgcaaaccatggtcccaggcggaggccccttcgatctggggcagccgttccacttcgccgtccaaccccaggcgctccaggtttaccaggatgtcttcgctgcccccgccgcgagccagatgccggagctcggcaatgtggtgaaggcctcgctgagcgacgaggaggagggcggcgacggccacctcgaccgcggcaaggcggcagccgcctcccagtggcaccgggtcaagtggaccagcggcatggtcaagctgctggtgtcggccgtgtcctacatcgacgaggacgtggacgcggaccacgggaccagcagcgggaggaggaagcacgccgtgctcaagaggatgggcaagtggaagctggtctcctcggccatgaccgagaggggtttcgctgtgtcgccgcagcagtgcgaggacaagttcaacgacctcaacaagaggtacaagaggctcactgagatcctcggccggggaagggcttgccagatcgtcgagaagccagagctccttgaacagttgagcctatctgggaagctcagggaggaggccaagaagcatctcaactccaagcatctgcactacgaggagatgtgctcctaccacaacaggaaccgctactgcctgcttgatgatcctgtccttcagaggtccctgcggatggcgcttagggctccagctgaacagggaaagcaatgcttgtttggctatgatgacgaggatgatcagatgttgctttctgatgatgatgatgattatgaggatgacgagttgaatgacgatctggaggccggtgctgaggatcatggtcctcacagagttcatgccaccgagaaactgaaacatgatcatgagggacattgtgggtctcatctgtcagaagttgcagccattgacatgaacagaatgaacttcgaaggatctggtggtccatcctctgagaagaatttaagttatatgcgtgttcaaatcgagaggcagcgtctgaaaataaaatctcagatgctgagaattgagcagaggcatttcaagtggctgaagttcagcaaggagaaggacagggagctgcagaaaatgaagctggagaatgaaaggatggcgctggaaaatgagcgattggagctggagctgaagcttaaggaaattgagataggcatcaaaccaaagaggatttagagattgcaggatgcaagtggtagagctagggaacttttagagtttctggtaaccattttatctattgtagtaccttacaaattaggatatgttacatagtttcatcttcgctaactgcatatcagttaagttaataactctgttggtttcaagcatttgcaataagtacagtttaccatctgaata

SEQ ID NO: 119136 - DNA, 2223 bp, Zea Mays
ctcccacctcgtgtgtctgtttctccggcctgggctctgggctcgggcgtagtccagttgccaccaaccgagccagagagagaacaaagaacgggtgaaagaaatctcggaaaggttccagatttcctcgaggtggaggcctccttttcctcggccgaatcgctcgttcgctttctctctctctttcctcccatcgagcatgcattcttttctgctgctgcgaccgtaggatcggcgtccagcagcctcgccgcgtcggtatggttttcccttggcccacacatcctagctcttccgcattcttgaatttcgtggtcgaggattagggggtttctcgtgcgctggtccaatttcgcgctaatcgtcctgttcctgcctcggattactcgccttctcgtggtccccatctgttcttggcgttcgcacgcttgccgtgcggcgggcagggctgcagcagcagccggcagcgcgtgcatcttgcgaccccctttccaagaaccagctgcaagctttggccttttccgcctgccgtacccgaaatcccgcaagaaactccacccaagaaaaaagcggcgcccttttggctggctggctgccattcctcacgccccacgagtttggtgaggctttgaaacgagcacagttcacaagacagtgaggctgcggtgggtgtttcctcgtcggagatggagggaaatttgccgccgcaaaccatggtcccaggcggaggccccttcgatctggggcagccgttccacttcgccgtccaaccccaggcgctccaggtttaccaggatgtcttcgctgcccccgccgcgagccagatgccggagctcggcaatgtggtgaaggcctcgctgagcgacgaggaggagggcggcgacggccacctcgaccgcggcaaggcggcagccgcctcccagtggcaccgggtcaagtggaccagcggcatggtcaagctgctggtgtcggccgtgtcctacatcgacgaggacgtggacgcggaccacgggaccagcagcgggaggaggaagcacgccgtgctcaagaggatgggcaagtggaagctggtctcctcggccatgaccgagaggggtttcgctgtgtcgccgcagcagtgcgaggacaagttcaacgacctcaacaagaggtacaagaggctcactgagatcctcggccggggaagggcttgccagatcgtcgagaagccagagctccttgaacagttgagcctatctgggaagctcagggaggaggccaagaagcatctcaactccaagcatctgcactacgaggagatgtgctcctaccacaacaggaaccgctactgcctgcttgatgatcctgtccttcagaggtccctgcggatggcgcttagggctccagctgaacagggaaagcaatgcttgtttggctatgatgacgaggatgatcagatgttgctttctgatgatgatgatgattatgaggatgacgagttgaatgacgatctggaggccggtgctgaggatcatggtcctcacagagttcatgccaccgagaaactgaaacatgatcatgagggacattgtgggtctcatctgtcagaagttgcagccattgacatgaacagaatgaacttcgaaggatctggtggtccatcctctgagaagaatttaagttatatgcgtgttcaaatcgagaggcagcgtctgaaaataaaatctcagatgctgagaattgagcagaggcatttcaagtggctgaagttcagcaaggagaaggacagggagctgcagaaaatgaagctggagaatgaaaggatggcgctggaaaatgagcgattggagctggagctgaagcttaaggaaattgagataggcatcaaaccaaagaggatttagagattgcaggatgcaagtggtagagctagggaacttttagagtttctgggttctaacctggctggtacaggtactctaggataagatgttgtgtcgtctcagtgtgctttgtgaataccattattacatcaatatcaacgaagagtttgttgtcttcatccgtgctttccaggtcgatttgatctaatgtaacgtgaagtttcagaaatgctttacgatagcatcagctggactgtgtactgtatgttgtatcgaacccttctttcttcactaacatacagtaccagatattcatcccttcaagctaccatttaaaaagcaagcttcatctgttttgacc

SEQ ID NO: 119137 - DNA, 1509 bp, Zea Mays
atgaggtgtgggttaccatttgctgaagatctcactggcattgattctgtccatctcgctggagagggtcctgatgctgaatcacttgaaggttctttaaatgtcgtgcgaaaatccactcaggctgcagctcgtatatttcaagcctttagggtggactcattatacagaaagaaagtcgtggaatacggagatgtcacctgtggattatctgatgaatgcacactttcacttgtttctcttaaaaatgtcaagccagaacaacatgatacacatctgcattctgctgctgttcgcatacagaacaagtttcgcggatggaagggaagaaaggaatttatgatcattcgccagagaattgtcaagccacagggatccgaggacatggtccacctcttgagggaccccgacgaggaggcccgcgtcgataccatcgccgaggggcttgggatgcgccgggtcggcctcgtgttcacgcaagccgttgggggaaaggccagcgagactggtgagtacaccatgtccaaccgggagatgagtgagatttgtgtcaagctcttcaaggatggggtactggaaactgaggttcaggatgctgatgatccccgtcagtcaaagatgcagaaagaggtggtggctggggggaaggatactatggaggtggataatgacttcttcctcatgctcgtcaagatctctgatcaccagttctacacaaaattagaggagaaacataaagctttggaagcagagaaggacgaggctgaggccaggaaaaaggaagagcaagacgttgctttaaaacaactaaggaagtcattggtgattagagcgaaacccatgccaagcttctatcaagaagggcccccaccaaaggctgaactgaagaagcaaaagaaggctgtagggccaatgacgttgttcagcgccgctggaccttatccattttcttacattcgccttgtactcatccgcgtcacacgccaggagaacgcgctctgcactgccgcctcttttgaccgtgatgccgccaacgcgttccagctctacgtcgctgagttcctcggctttggcgtcaagcgggcgggtttcctctacggccgcgtcgacgtagagaccaaggatgtcttcgtcgactttatcgatgagccaccgcagcagggctccgaggacgtggtccacctcttgagggaccccgacgaggaggcccgcgtcgataccatcgctgaggggctcgggatgcgccgggtcggcttcgtgctcacgcaggccgttgggagaaaggccagcgagactggtgagtacaccatgtccaaccaggaggtcatgcaaattctaggcaaaggagttgggttaacatgggaagaggccaagctccaggtgaaactaacacatccttgtcgtcgtgctgattccagatcaaggggtagtgatccggaaggtggctatggtttttgtaagtacgagactcaagatcttgttcaaggaaggtggctatggtacttttga

SEQ ID NO: 119138 - DNA, 1181 bp, Zea Mays
tcgctccttcatttgtgtgtgctaaccgtgttgacaagaggaaggagttctacacaaaattagaggagaaacataaagctttggaagcagagaaggacgaggctgaggccaggaaaaaggaagagcaagacgttgctttaaaacaactaaggaagtcattggtgattagagcgaaacccatgccaagcttctatcaagaagggcccccaccaaaggctgaactgaagaaggtgcctcctacccgtgccaaatcgccaaagtttacaagttcaaggagaaggagctgcagtgatacactattgacacctgacggggaaaataccaatgcaacatctacccaaccacatcgtcatagtatcaggagtcctaaagacgctaacagagtacaacaatgctcgccaaagagcggtgtggcaaccaaaacaagatctgtcaaggctgagctgaaggccctctaaagagcatggagcagccgagcgctgtgtttctctgtacaaaccgaattgcctaaccgttcccatttccatgcatttttgcttctattttatacccaacatctccagcaaaagaaggctgtagggccaatgacgttgttcagcgccgctggaccttatccattttcttacattcgccttgtactcatccgcgtcacacgccaggagaacgcgctctgcactgccgcctcttttgaccgtgatgccgccaacgcgttccagctctacgtcgctgagttcctcggctttggcgtcaagcgggcgggtttcctctacggccgcgtcgacgtagagaccaaggatgtcttcgtcgactttatcgatgagccaccgcagcagggctccgaggacgtggtccacctcttgagggaccccgacgaggaggcccgcgtcgataccatcgctgaggggctcgggatgcgccgggtcggcttcgtgctcacgcaggccgttgggagaaaggccagcgagactggtgagtacaccatgtccaaccaggaggtcatgcaaattctaggcaaaggagttgggttaacatgggaagaggccaagctccaggtgaaactaacacatccttgtcgtcgtgctgattccagatcaaggggtagtgatccggaaggtggctatggtttttgtaagtacgagactcaagatcttgttcaaggaaggtggctatggtacttttga

SEQ ID NO: 119139 - DNA, 408 bp, Zea Mays
atggcgagggagctcgggagaaaagttgcggcacaggaagctgggcggccgagcgcgtggaagctccagggcgcgtgcggtacagagagctccagcggcgagcgcaggggcgcgatgcagcggccatggccgagttggagccagggacggcgccgagcagagaaggaagccgcggtgcgcagactgggcaagcagcgggcgcggctggaggagggaggagcagggagcttgggcatgcggcgagccagggaccaggcacaccatgggagccgcgcgaccggtcgaactggagctgagcaccggcagggacctatgcgcccgacgagcagagcaggagggagaaagggaggaagaagaagcacgcgtgggagggaagaatccagggcgcgcgtggagataaagttgtag

SEQ ID NO: 119140 - DNA, 623 bp, Zea Mays
tccatctagccagcccaatccacatcaccagcccacctcgtcgaactcgtcgtcttccgtccatccatcgtcgtcggcggcggcggagagagagcagatgacgtcctcggggacggtcgcgcagcagctgccgcggacggaggcgcggtcgctgtcgggtcacgagggagcggtgttggccgtgcggttcaaccgggacggcaattactgcctgagttgcggcaaggaccgcactctccgcctctggaatcctcacacaggcgcccaggtcaagacctacaagtcccacgcccgcgaggtccgcgatgtgcactcttcctcggataacgccaaactggtgtcctgcggtgccgacagacaaatcttctattgggacgttgcctcgggccgcgtcatccgcaagttccgcggccacaacagcgaggtaatgcatcagatcaattgatgccccctcccccttatttttggagtttcagccgtcttctgatggctacactgtaatcaagtagtcccgtgctaattgtgtgggctacctgaaccacgggcaatagtgtatcgttctcattgctgtaataccaactgtatccaaagcagtgctctgaaccatacttctggtggttgca

SEQ ID NO: 119141 - DNA, 795 bp, Zea Mays
tccatctagccagcccaatccacatcaccagcccacctcgtcgaactcgtcgtcttccgtccatccatcgtcgtcggcggcggcggagagagagcagatgacgtcctcggggacggtcgcgcagcagctgccgcggacggaggcgcggtcgctgtcgggtcacgagggagcggtgttggccgtgcggttcaaccgggacggcaattactgcctgagttgcggcaaggaccgcactctccgcctctggaatcctcacacaggcgcccaggtcaagacctacaagtcccacgcccgcgaggtccgcgatgtgcactcttcctcggataacgccaaactggtgtcctgcggtgccgacagacaaatcttctattgggacgttgcctcgggccgcgtcatccgcaagttccgcggccacaacagcgaggtcaattcagtgaagtttaatgagtacaatgctgttgtagtctcagctggttatgaccgtacggtgcgtgcatttgactgcaggtctcaaaacaacgaccctattcagacaattgatacttttcaagatagtgtaatgtcagttaacctaacaaagacagaaataattgctggcagtgttgatggtactgtccgggcatttgacattcgcatgggtagggagactgttgataatctagggcatcctgtgaactgtgtatcattatcaaatgacaacaattgccttttagctaactgtttagattctactgtgcggcttctagacaaccggctggctgctgatccattgttcctgggctcctggcgacttct

SEQ ID NO: 119142 - DNA, 1459 bp, Zea Mays
tccatctagccagcccaatccacatcaccagcccacctcgtcgaactcgtcgtcttccgtccatccatcgtcgtcggcggcggcggagagagagcagatgacgtcctcggggacggtcgcgcagcagctgccgcggacggaggcgcggtcgctgtcgggtcacgagggagcggtgttggccgtgcggttcaaccgggacggcaattactgcctgagttgcggcaaggaccgcactctccgcctctggaatcctcacacaggcgcccaggtcaagacctacaagtcccacgcccgcgaggtccgcgatgtgcactcttcctcggataacgccaaactggtgtcctgcggtgccgacagacaaatcttctattgggacgttgcctcgggccgcgtcatccgcaagttccgcggccacaacagcgaggtcaattcagtgaagtttaatgagtacaatgctgttgtagtctcagctggttatgaccgtacggtgcgtgcatttgactgcaggtctcaaaacaacgaccctattcagacaattgatacttttcaagatagtgtaatgtcagttaacctaacaaagacagaaataattgctggcagtgttgatggtactgtccgggcatttgacattcgcatggggagactgttgataatctagggcatcctgtgaactgtgtatcattatcaaatgacaacaattgccttttagctaactgtttagattctactgtgcggcttctagacaagtcatctggagaactgttacaggagtataagggacatacgtgcaagtccttcaagatggattcctgtctgacgaatgatgatgcatttgttgttggcgggtctgaggatggttatattttcttctgggagttggtggatgcacctgttgttgcaagattcagggcacatagttctgtggtaactagcatcagttaccacccaacaaaggcctgcatgttgacgtcttctgtggatggctctattcgtgtttggacctgaagactcttgaatggttgatgtgctattcgtactgttcctccaaatcatccagttatctagcagcaaggattcgacagtatgaaagatgaacgcatgtctaacctaatgggattcatacacgccttgctgcagagagaagaaaatgcgctgctgttgggctgtgtagcacacagctctgaggccaaaaccttttgaagccggtattctgtcatctatgaagtttgtgagccttttagatgattttggattgtacctgaagacaacttgtgagttgcatgaaaagtaacatttgttacgaagtttcttactgcaagtgtcttgtctccatgttactgaagacaacttatgggggttgagaaatgtatcttctagttcctttttttttgttttgatttggaatggaatgactaatgagttcatcgaccatcacatcatcctcacaagctaatactcc

SEQ ID NO: 119143 - DNA, 1463 bp, Zea Mays
tccatctagccagcccaatccacatcaccagcccacctcgtcgaactcgtcgtcttccgtccatccatcgtcgtcggcggcggcggagagagagcagatgacgtcctcggggacggtcgcgcagcagctgccgcggacggaggcgcggtcgctgtcgggtcacgagggagcggtgttggccgtgcggttcaaccgggacggcaattactgcctgagttgcggcaaggaccgcactctccgcctctggaatcctcacacaggcgcccaggtcaagacctacaagtcccacgcccgcgaggtccgcgatgtgcactcttcctcggataacgccaaactggtgtcctgcggtgccgacagacaaatcttctattgggacgttgcctcgggccgcgtcatccgcaagttccgcggccacaacagcgaggtcaattcagtgaagtttaatgagtacaatgctgttgtagtctcagctggttatgaccgtacggtgcgtgcatttgactgcaggtctcaaaacaacgaccctattcagacaattgatacttttcaagatagtgtaatgtcagttaacctaacaaagacagaaataattgctggcagtgttgatggtactgtccgggcatttgacattcgcatgggtagggagactgttgataatctagggcatcctgtgaactgtgtatcattatcaaatgacaacaattgccttttagctaactgtttagattctactgtgcggcttctagacaagtcatctggagaactgttacaggagtataagggacatacgtgcaagtccttcaagatggattcctgtctgacgaatgatgatgcatttgttgttggcgggtctgaggatggttatattttcttctgggagttggtggatgcacctgttgttgcaagattcagggcacatagttctgtggtaactagcatcagttaccacccaacaaaggcctgcatgttgacgtcttctgtggatggctctattcgtgtttggacctgaagactcttgaatggttgatgtgctattcgtactgttcctccaaatcatccagttatctagcagcaaggattcgacagtatgaaagatgaacgcatgtctaacctaatgggattcatacacgccttgctgcagagagaagaaaatgcgctgctgttgggctgtgtagcacacagctctgaggccaaaaccttttgaagccggtattctgtcatctatgaagtttgtgagccttttagatgattttggattgtacctgaagacaacttgtgagttgcatgaaaagtaacatttgttacgaagtttcttactgcaagtgtcttgtctccatgttactgaagacaacttatgggggttgagaaatgtatcttctagttcctttttttttgttttgatttggaatggaatgactaatgagttcatcgaccatcacatcatcctcacaagctaatactcc

SEQ ID NO: 119144 - DNA, 824 bp, Zea Mays
agtgtggtttttctgttctgttgagtaaagtggtgccatctgttcaatgtactaaatagagggtcatcatgcacaaaatattaaccttttgctgtctcttgcgtttattaggtcatctggagaactgttacaggagtataagggacatacgtgcaagtccttcaagatggattcctgtctgacgaatgatgatgcatttgttgttggcgggtctgaggatggttatattttcttctgggagttggtggatgcacctgttgttgcaagattcagggcacatagttctgtggtaactagcatcagttaccacccaacaaaggcctgcatgttgacgtcttctgtggatggctctattcgtgtttggacctgaagactcttgaatggttgatgtgctattcgtactgttcctccaaatcatccagttatctagcagcaaggattcgacagtatgaaagatgaacgcatgtctaacctaatgggattcatacacgccttgctgcagagagaagaaaatgcgctgctgttgggctgtgtagcacacagctctgaggccaaaaccttttgaagccggtattctgtcatctatgaagtttgtgagccttttagatgattttggattgtacctgaagacaacttgtgagttgcatgaaaagtaacatttgttacgaagtttcttactgcaagtgtcttgtctccatgttactgaagacaacttatgggggttgagaaatgtatcttctagttcctttttttttgttttgatttggaatggaatgactaatgagttcatcgaccatcacatcatcctcacaagctaatactcc

SEQ ID NO: 119145 - DNA, 1120 bp, Zea Mays
cggtctccttgctccaccacggtcagtcctcgccgcacctgcagtcagcacagcggcctcctcttctctgaccctcgccacccaccgaggcaccaacccaccactcgctcaactacctctcgtcctctctctctttccccctcacgcgcaacacgtctccatctccagcgcgagctattagttacgaggtaactaggccaagatccaaatcgcgcttgcgcgcagacagcagctcacttacgggggtgtcatgccggcgagcgtgccgctgtgtctgggcctggacacggcgggggtgcaggtgccgtggtacttccggtgccccatctccctggagctgatgcgcgaccccgtgacggtgtcgacggggcagacctacgaccgcagcagcatcgagtcatgggtggccaccggcaacaccagctgccccgtgacgcgcgcgccgctcgccgacttcacgctgatcccaaaccacaccctccgccggctcatccaggagtggtgcgtggcgcaccgctccatgggcgtggagcgcatccccacgcccaagcagcccgccgacccggacctggtgcgctccctcgtcgcgcagggcccggggctcccggcgctgcggaggctcagggcgctagccagggagtccgacaagaacaggctcgtcatggccacgcacgagaccagggccgcactgctggaggccgccttcggctccgggtccggggcggcgagcgaggagctcgaggcggaggccatggcggtgctggcgctggtcggcctcggggaggaggaggccgtggaggtggtcgggagggaggagagggtggccaggctcggcaaggtactcgccggcggtggctcgcttgaggcgagggtgaacgcgggcgccgtggtggaggccgcggcgctggcgtcgggcgcggacgcccgggcggtgctgggcgccgcggaaggcgtgatggccgggctcgtcacgctggtggaggagaaagccagcgcccgcgccggcgggtgctcggagcgcgccaagcgcaaggcgcagcacctgctgaagctgctccgctccgcctggccgaccaccgactgcaccgccaactccgacgacttcctccaacactactga

SEQ ID NO: 119146 - DNA, 79 bp, Zea Mays
agctccattccagattcctttgtcaataatccatgtacgattacaaaactgtcagtaatatgtggaaacccaccaaata

SEQ ID NO: 119147 - DNA, 335 bp, Zea Mays
ttactcaccatccaagattcctatgctcgcgtgaagttgcttggagaaaacacaggttgttcggtccttggtgaagctgcccacggctccggtacgcggtggctcggtcatgttccaggcaccacaaagtagtagaattggaaataacaacactgtgtgtttcactggtgaatggagagtatagaacaggcacaacccggacaaacacctgtttgcgttgatctggccaaggcgaggtgggcaaatctggtgctacggtcaccactggtagaccatcacatgcaaactctaggactaggcagacttagcggctggggagaggagctttggcttgc

SEQ ID NO: 119148 - DNA, 4044 bp, Zea Mays
atggcctcaaacctcatctccgcctccagcctcgagacagagacagccatggcggatcctggcgaaggacctactgctccacccccgccacggctgcaggaaatagctcacgatgtgcccgaccatactgtcacgcaattttcagcctcacaagacactgaaaccgccgccggcgatgctgccacccacgactccgctcagcctaaagcggagtcggcccattgtgcggttggcgagccggagcaaaccacgacagaggcagacggtcagccacatgtcgcaaccatgccacaggaagttgccgcattgccgtcgccagctgagacaccggtgcaagagagtgcggcgcagcccacactgccgccgcagaagcaagaaagccctgttccagaactagcctcctcagtccacgaggaggagaaggacgcgtcaaaggcaaggggggacgaaggagaagagaagcccaccgcggcgcggaggccgcaactgaaagagactgtaaatttgggcgctgttgagcaaaccacgacacaggaagttgccgcattgccttcgccagctgagacaccggcgcaagagagtgcggcgaaggccacaccgccgccggagaagcaagaaggcggtgctccggaactagcctcctcggtccacgaggaggagaaggacgcgtcaaaggcaagtggggacgaaggactagagaagcctgcgagtcgtcggtggcgatggctccgcgccgtcgtgggcttgttatttctccgccccaaaagcggagagacgaagatgccgacaccgccgagcgacaagcagccggtgtcagggctggaggacacgaagcctacgacaggggagatgccgccgccccacaaggacagcggtagccctgtacttgttccatccaagcctgaagtggggaagaccgaaggcgagatgaagacggcggcggtggacgtcaagaagccggtgtcagggcaggaagaacagaagccagcggcgaagaagaagccgagccggaaatacagctctggcgctccaaggagggagatggaagacggcgaaaggagcaagggcggccgtgttgaaattgaaacccaagtggggaaggcgacaccacagctggaaggggagcgacctatgcgaaagaagctccagaaggcgatcaggttggttcagctcctcatgtccttgtacaacaagcaccgctcccaatcccaggagaagaagccagacacggcttccgatccaggtggtgaggaagacagcgaggccaggctagagtcggcgccggaagacaagaagccggcgtcagcagagcaggaagagcagaagccagcggcgaagaagaaaccgagccggaagtacagcgatggcgctgcacggaagttgaaggacgacggcgaaatgggcaagggccgccgtgatgaaatccaagtggggaaggctataccacagctggaaggggagcgccctatgcggaagaagctccagaaggcgatcaagctggttcagctcctcatgtccttgtacaacaagcaccgctcccaatcccaggataggaagccaggaacggcttctggtccgggtggggaggaagacagcgaggccaagcgagcgtcggcgccggaggaaaagaagccgcagcatcggaattggccacgagaggaagtgcgcctggagcacatcctcgaggaaactttcacaaggcttcttttgacagagtacaacaagcagctgagcggcgtgagtcagaagtgcctcctcaccttctccatcttcgagctcgcctccgaggtcaagaagcagatcatgatctattggtgggtcgcggagttcaacctccggcaccggagtgatccagcgcgggctctttctggcggtggcgaaacaagtgattcgccggcgctgcagggtaaaggcgcagacgctgctgacagcagagatgacgccgaaagcatcttcatcatgctttctgatcatggcttcctagtgccgatgaagaactggtgcagcaaggtgatccatggctgccaggtgaaccccctggtgcactggatgctgaagcgcatggcgagaggttgtcgcttcgccgagctggacgacaagggcagcccggaggacctgcaacccaattccaacatcctttgcctgacagcaggcaatcgccacgtgctgcaacagatgcacatggcggatgagtcacagacacaggccaaggccaggaagaaagatgagtcacagacacaaaccaagaagaaagatcactcacaggcctggggaaaaagcaaggtaacaaatgaaccttccatgcagggcaagggcaacgatgtccaggaccagcagcaaccggaggcacatgtcgggagcacatccacggcagcagcagataagacaccttcccagaaggacgaagacccaacccaagttacggaacagctaacaaataagcgctacgttgctagacatgttctctatactggcagtcaagctgatggcaaaggcagtgtaggaggcgttgaagacgatgcaggctacacaccaagcatgacatctagcggctatatcgtgacgagggtgggctgctggtggtggctggtgggcggcggtcgccaggtgatgagggtggctagtgttcgcaatgtgagggctattgcgtctgtgattgaattacgtgagggatttgccgctgtgcttgacaacatagagagccacgacactggcgcctggtaccactacataggagtgaccaatcacatgactaggttgtgtgccgccttctccaacattgacaacaacgtcatggggaatgggcctcaagatgtgaagcccagctctgagcccgaacatggtgacgagattccgcctccatcatttgaagggaagcgagtgatcctaaacctcaatgcacatgtgtaccccatctgcaagtctgcattctccaaccttgccgaatgcttggttgtgctgcagctcggccggtggaacaatcttgacgacaagacatacatggaggtggatggactggagtcacgggatgccatcggctcgctcaagaaccttcggtacctgagcctccgtggtctatcacggctaacagagctcccaaaagggatcgagagccttaagaaacttgaaatcctggacatgcgaggctgccaaaacctagccagagtgtcggcaggtgtcatcaaacagttgaagcagcttacccatctggacctcaccgagtgctacatgttagagcacattggccgaggaatcacgtccctcacagagctgcaggtgttcaagggcttcgtgttcgcaaccgggactcgggggaaggaggcgtgccgaatacaagacctcagaaggctgaagaagctccagaagctcaccatttgcatcaccacggatgctaatgtaggcaagcgtgagatggcggatcttaagtacctcgctagccttcggaaactcacgattacatggagtgagataccaagcatactggagggtggcacgaagaaagcgagagagaagcgacgtggacttgttaagacgtggaccagctttcagttgccaccagacctcatgaaattggacatccggtgctaccccaaggaagagctagaactcgaatgcaacgagaagctcgagaggctctacttgagaggtggagacatgagaaggtgttccacgaaggaaccatcctccatcaagacactgcgtttgaggtatctcaggcactttgagatggggtggagtgatatccgttcaaaattcgagaaacttgaatatgtggaaatcgtagttaatgataagaatccgatggagataccagattttacattggattgggatggggtatggaccaaggatgagaaggaagagcataataaccaccagaggttgcaggcggcgcctaataaaaaagacgttgggatggataaggatgttcaggacgatggcagcgggaatcacaaagaaccaactaaagctgctagcaccatcacaaaggttaataaggacaaagctgctaccaaagaacgggcaggtcctctcttcccctaa

SEQ ID NO: 119149 - DNA, 267 bp, Zea Mays
ggccgctacaagtcctcgccctcctcgattcacctcatctattgaaaccgccgtgggcctcaccgttgtgttgtgtccgtgcgtgggcatgcgagccaccgcccatgctacacgaccattgctgcggtcggtctcttggccgggatgactcacggggtccccatggtacacgagtcattccaatttctcgctgtctttcctcaccaccgcggagccgtcgggtggcgtcgctggacctctacgttgttcaatcgtcggtaaggggtt

SEQ ID NO: 119150 - DNA, 105 bp, Zea Mays
gttattatatgtgttgtcttctttggcacatatatgagatgcacccggatttgtcccttaaatccgggtgtgacacactcactcccctcaaccagtcgcacccct

SEQ ID NO: 119151 - DNA, 180 bp, Zea Mays
cccgcgcccacggccgccgcccccgcccgggcgccccgacgaccgccgccgaacgccgtcgcccgcccaacgccgtcacccgccgccgtccacggtagccacggcttccccacatcgacgtcgtccatcagtgtcgtccaccgatgtcgtcgaccaccgtcgtctgcgcaaagcgagcga

SEQ ID NO: 119152 - DNA, 681 bp, Zea Mays
agcaaatcagcctatggtgctctctttgttgactctatcccttttggcccttagcgacgtgtctggaagacctgggcccccttaagatgcaaattctttgccgaggaaaccatccagcatattcttgtctcctgtgtgttcgctcggcaaatatggatgtccattctacacaatttaggcctcctagccattgttcctcagcctggatgcactcgtttctcaaactggtggtgccaaagtatcaaaaaagtggagaaaagtataagaaaaggtcttaattccttgatcattttggtcgcttgggagatttggaagcaccgtaatgcttgtgtgtttgagggggttgtgccctgcacccagcgagttcaaagtgttgtgattgaggagggcagcgcttggtgcttgattggtgcatcagctctgcaggacatcctcctgcgccagctccctaggggaccctagcaatttgcctgttggtggtcgctttggtcgggatgttgctctgtgtgcgtggcgtgttgtattaatgtcatggggtctcggcctatgggcctttgtattagaggttgacaagtcttgtctctcctatgtttttttcttcttaatataatgacatgtagctctcctgcgtttgttcaaaaaaaaagatcaaacttttacacttaaatccttccaccagcc

SEQ ID NO: 119153 - DNA, 1196 bp, Zea Mays
tgcccctctcctccagcgccgcgcgccggctctatgcgcccgccgcccccggagatgcatatcacacgccgccgttaccgctgggtgaaggagtgggtcccgcaagatctggtcgtcaccggaggcccctgcacgctctacaagtgggtgcgagctacgaaggatgtgggaagacatttttttgatgtaggggctcttaagaagcacgctcatgtccatggggagaggcaatatatctgccactatgagaactgtggcaagaaattcttagatagctctaagttgaagagacattttcttatccatactggagagaagaattttgtgtgcccacatgaaggttgtgggagggcattttcgttggattttaatttaaaggcacacatgaaaacacattctgcagataactatcatgtgtgccagtacccagaatgtggccgaagatttacacaagaatcaaaactgagagctcatatcagggcacaacatgagaaaaatccaggtgcgtcatcaatgaaccacagtgcaattggaggtccgcaccagccccctaggccagcgaaggtctcagcagcacctccagctccctcagctgagcgcccttacgtctgcccctacgatggttgtgacaaggcatacatccatgagtacaagttgaacctccatctgaaaaaagagcatcccaaccactaccaggatggtggtccaaatggtgctgccgccccttcaaagcgcagcatctcgaagagttcccacaggagcaagctggacatcacctctaggatgccaccggccaacatccccaagcacagagggtatgcaacaccattgccagctgtggtgagcctccctgaggagcagcagttgctaaggaaagtggtgtacgaggatgacagcgaggagactgaagaagagggggataacaatggcgaggacagatggaactacaagagagctgctagcagcgacgacgaggaaaccgaagacgaagaatgagctgctagcagggattcatttttttttcttctgtagctgtgcatataccataatctatagactggtggttatagatttcaatacatgtacatttttaaaatacggctggcctatagtagacaagaggttgttgctgccatgccccttctcaactacacaggccatgagttcagaaaggataatggatcattgctcccgtc

SEQ ID NO: 119154 - DNA, 1316 bp, Zea Mays
agtccaccggcatttggaacttgttcgcgagtcgcgactcgcccagccgccccttccgagttccgacgccgataccgtgactccgctcgctccattccgctcctaccgccgctggccgccgcaccattcgatccctgtttcttaatccggcggccggcctggagccctcagctcaacactcggcagatcatctcggctgttcgcctactttcttcttccccacggtcgttcgcgtgcagcacggccggcggtaccggaacagggcccagccggagcagcggtgccgtcccggcccggctgccttttgctactgctaacatcccaggacgcagtccggaagctgtagctcctttccggtggtctggtcttcacggttctactcctattcgtctgcttcaatccagctgcgtcatctaatttatgctccaccatgaagatagcctggggtaagaaatctaaggttaagaagcagtcagtggttgtatcaactataccaggcctaccatttggagcggggagtgacaacgatgaggttgaaacggaggaaaaatcagatgcaaacacaaactgtcctggaacaaagccagttgaaactgctgagttgctccagagtcagggagacaagctagccgaggaagggaagtaccatgaagcacttgctaaatgggaggctgctctgatcttgatgcctgataatgcgatacttcatgagcagaaagctcaggttttacttgaagtgggagatgcatggcgtgcactgacagcagcaaccagagcaacagaactggatccattttggcctgaggcttgggttacacttggtagagctcaattaaattttggggagccagattcagctatactgacttttgacaaggcgttagctatgaagcctgactacaccgacgcaaaagctgaccgtgaaactgctgctcgcctagtcaagaaacgaggacagctgcatacgtcaggtttaagtgctaacaaaagacgcttcacagttggggagtacccaaaggagggaggtgcagagggtgaagaaaaagggaaagaaacagccgagcaactccaaaagatcacccaagaaaattagctaaattaactgattttgttactgtgtaaaatagatattacaaaaaaatattacattagtgttggtcacctgctttaattcgtaaagggaaccataacaaggcaatacaattaaagataatcggccttcgttttcctaatctatctaatagataaattaagggaggaggattatggtaatccaagaccttcgaataataaaataggaatgtctgatgagaatc

SEQ ID NO: 119155 - DNA, 1297 bp, Zea Mays
agtccaccggcatttggaacttgttcgcgagtcgcgactcgcccagccgccccttccgagttccgacgccgataccgtgactccgctcgctccattccgctcctaccgccgctggccgccgcaccattcgatccctgtttcttaatccggcggccggcctggagccctcagctcaacactcggcagatcatctcggctgttcgcctactttcttcttccccacggtcgttcgcgtgcagcacggccggcggtaccggaacagggcccagccggagcagcggtgccgtcccggcccggctgccttttgctactgctaacatcccaggacgcagtccggaagctgtagctcctttccggtggtctggtcttcacggttctactcctattcgtctgcttcaatccactccaccatgaagatagcctggggtaagaaatctaaggttaagaagcagtcagtggttgtatcaactataccaggcctaccatttggagcggggagtgacaacgatgaggttgaaacggaggaaaaatcagatgcaaacacaaactgtcctggaacaaagccagttgaaactgctgagttgctccagagtcagggagacaagctagccgaggaagggaagtaccatgaagcacttgctaaatgggaggctgctctgatcttgatgcctgataatgcgatacttcatgagcagaaagctcaggttttacttgaagtgggagatgcatggcgtgcactgacagcagcaaccagagcaacagaactggatccattttggcctgaggcttgggttacacttggtagagctcaattaaattttggggagccagattcagctatactgacttttgacaaggcgttagctatgaagcctgactacaccgacgcaaaagctgaccgtgaaactgctgctcgcctagtcaagaaacgaggacagctgcatacgtcaggtttaagtgctaacaaaagacgcttcacagttggggagtacccaaaggagggaggtgcagagggtgaagaaaaagggaaagaaacagccgagcaactccaaaagatcacccaagaaaattagctaaattaactgattttgttactgtgtaaaatagatattacaaaaaaatattacattagtgttggtcacctgctttaattcgtaaagggaaccataacaaggcaatacaattaaagataatcggccttcgttttcctaatctatctaatagataaattaagggaggaggattatggtaatccaagaccttcgaataataaaataggaatgtctgatgagaatca

SEQ ID NO: 119156 - DNA, 1384 bp, Zea Mays
cacacacatgcatgaagtgcctccatccctaataaatacctatgtggcactatctgggcatcttacctgtctcctttccttctagtagacacgcatgtgaatcatgattccaaacgtttatctctgactaacactaagtctaatgtagattatacatatgattttggtataataatattcatattacactttcatataatgtcaatttcatgctcatgccaaatctaatagatgaaatattcatggtttcaaaggcaaggcgtcgcctaggcgtccaggcggccaaagaagtctaggcgtccccgtcgcctagccaagagtcagcaagagaggcaagaggggaggggaagaagcctagcagagactttggggagcgggatcggcggcgcagagcttgggggagtgccgagctcgggggagcagcagtgctgagactcgggggagcgctgagcttgggggagcaggagcagcgatgttgtgacaggagtggcaatgctccaccatgaagatagcctggggtaagaaatctaaggttaagaagcagtcagtggttgtatcaactataccaggcctaccatttggagcggggagtgacaacgatgaggttgaaacggaggaaaaatcagatgcaaacacaaactgtcctggaacaaagccagttgaaactgctgagttgctccagagtcagggagacaagctagccgaggaagggaagtaccatgaagcacttgctaaatgggaggctgctctgatcttgatgcctgataatgcgatacttcatgagcagaaagctcaggttttacttgaagtgggagatgcatggcgtgcactgacagcagcaaccagagcaacagaactggatccattttggcctgaggcttgggttacacttggtagagctcaattaaattttggggagccagattcagctatactgacttttgacaaggcgttagctatgaagcctgactacaccgacgcaaaagctgaccgtgaaactgctgctcgcctagtcaagaaacgaggacagctgcatacgtcaggtttaagtgctaacaaaagacgcttcacagttggggagtacccaaaggagggaggtgcagagggtgaagaaaaagggaaagaaacagccgagcaactccaaaagatcacccaagaaaattagctaaattaactgattttgttactgtgtaaaatagatattacaaaaaaatattacattagtgttggtcacctgctttaattcgtaaagggaaccataacaaggcaatacaattaaagataatcggccttcgttttcctaatctatctaatagataaattaagggaggaggattatggtaatccaagaccttcgaataataaaataggaatgtctgatgag

SEQ ID NO: 119157 - DNA, 120 bp, Zea Mays
tttcttttaacagaaaacttgtaaattgtgccagaaattgtagaaaaaatccaaaaatagcacgacaaattttgttggatgtctcaattcatgagctctctggtaaagtttgtttcagga

SEQ ID NO: 119158 - DNA, 282 bp, Zea Mays
ctcaatttgactgatgtgcagccgccaagctcctcaagttccttcaactcttggtggaaacatgctgctaggtccttcccagggaagcttcgtgggggttttaattctttagttatagtagtgtcctgggagcttcggaaacatcgtaatgcttgtgtctttgaggggaatcgtactaatgttcaggctgtgctgctttcagggtcaggagaaggtcgtctgtggtgcttggctggagcatctagactgcaggagctcatccctaggcctgctctgccctcg

SEQ ID NO: 119159 - DNA, 3820 bp, Zea Mays
atgggggtgccggaggcggtggcgctggagatacctgcggtggaggaggggtcgccgacgccactggccagggtgccaccaaggatcaggcggaggctcctccaggcgggcagcggagaaaacggcggcaaggcgccgacggccgaggagatcgagaccaagctacgccaggcgcatctccggaggcagcaattccatgaagcattgtcctccaaagcaaggcgctcaattaagagcccttcagggtcattgcaggaggaggatcgagggcagcttcttgaggcaaagctcctggctgccaggcagaagaggttgaccctcttggaaaaggaacagagccggttggctaagctggacaaactgcgacaggctgttaagagtgatgcagagatgaggttcgagagggaaagggaagaactcggaatgaaagttgaatcacgggttcaaaaggctgagaacaatcgtatgcaactaatgcatgatcgtttgaagaggcaggctgcattagaggagaggacaaaaaggtactttatgcaaagattgacttgggaaaacaagtacagggagcgtgtacaatctgcaatacagaagtgtaatgctgctgagaagagacgattggggctgcttgaatctgagaaaagacgggcacagagtaggctcttgcaggttcaacttgctgtgaagactgcctctaaccagagagaaactgagaggagcaagttaaatgagcaattagaagaaaagcttcagaaggcagagcagcagagggctgactatttgaagcagcggggaaatcctcacagttctatgcacagcagttcagttaaaaatggagaatttctttcaagaaaattggcaagatgctggagaagattcagaacttctaggaaaacaacagtagtattggctagggcctttgatgcactggggataaatcagcgatcagttgtgtctatgccatttgaagaattagctctctgcattgaatctcctgcagttctccagaccactaaggcattgcttgaccgtcttgagagtcgttttgtcttttctcagtcatcaacttcatcaaaaccagaaaacattgaccaccttctgaagcatctaggatcaccgaagaggaagatcccactgagcaatgtggggacaagtgaagcaacactgaaaaacgcagttggaaattatgattccagtacgttgtctagatattcgcaaaggattgcactttgtgcttatatgattctaggtcatccaaaatctgttcttagtggacaaggtgaacaagagaaatttcttatggaatcagcaacaatctttgtaaaggaatttgaactgctggttaaaacagtacttgatgccctagatggtgcatgcatattgagctggtcagttatagatgatgccacacctgttcgttctagctacgaggaatcttcatccattgttgctgatctgaagaaattcagaactcagctgcttgcctttgacaaagcttggtgtgcttatctttaccattttgtggcatggaaagcaaaagatgctaaatcattagaggatgaactcattagggctgcatgcaagcttgagctgtcaatgattcaaacatgcaaaataactgaaggtgaatctgataacctgggtggtgatttgaaagccatccggaaacaggtcgcagaagaccagaaacttttaagggagagtattcaacacctgggcggtgaagctggtatcggaatgatggaatctgctttatttgaaacacggtcaaagttctttcaagcaaaagagaagaggagttccattgcaactacagttgcaaatgtagcatctccttcagttacatgttcttcaggacagtctaatgattctgaaactggtatcggaatgatggaatctgctttatttgaaacacggtcaaaattctttcaagcaaaagagaagaggagttccattgcaactacagttgcaaatgtagcatctccttcagttacatgttattcaggacagtctaatgattctgatactggggagaattgtaacatggatgctgaaaaggcaagtcgagttgtccaatctctttttggagcattgtcttcacgatatgaaaatagcaaaggtggcaagctgatgagtaacgcagcaccagaaaaaatgcctactgagaatgagcaaatagtcaatgagatactacatgatatacatggttcttttgctgacatctctgatggtgctggtaccgttgaaggtgacttcaaggtaaaagtcaaggaaacaatggagaaggctttctgggatgtggttgctgattcaatgagaggagacatgccagactactgttatctggtcagcctggtaaaggaaatcagggaagcactggaagagttatctcctacagggtggaaagaagaaatcagtgacaatattaaccttgaaatattgacccagttacttgaatcaggttcccaggacagacaataccttggacaaattttgcagtactctctggataagctgcgaaaactgtcttctcctgtgaaggaacacgagatgaagaagagtcatgatacattgttgggagaattggtcgaagactctaaatccaattataaagatccaaattcatttgttctttgcgttatcaagggtttgcgcttcactatggaggaattacaggctctaaaaacagaagttactagagcacgcatccaactattggaaccattgattaagggatcaggtggagtggagtacctgcagaagtcttttgctggtcgctgtggttccccttctgatgcgttagcttctctcccttcaactgcccggtggattttctctttgaaagatgtcgtggaagaacaatggaatgaacatgtcagctcgttatcaattctgccagaagcagaccatgttcagacacttgttgccaccctccgaactggccatgcagttgcaggtgtacaatctgtgatacctgcagcagacaatacaggattaccagagtgtaggggagaaatacttggcaagctaataaggattgggctattacagctcatcagcagcatggagggtgtagaaagggaatcggttcctgagacctttatgttgaattggttgaggctgcggtctgttcagagtaagtttcaacaagtgattgtgatagcgacaagcatgcttgttttgcatcaggtgttagcgagtgagaacccaaagatcacttcttctgagctggagaatgccacttcggaactgttcaacgtcctcacaaggctgctagacaactttccagatgttggcactgagaaaatcattgaggccatgatgtactcgtcaacctcaaggagcttgtcagatcatgaaaggatgaacgccagaaaagagatattgactagggtcttccttagaagcctccagaccgatgacaccgtcttcaagaaggtctctcagtccgtatactgtgcattccgtgcagtcaccctgggcggcagtggggagaagggccggatgctcgccgatgcatccctgaggcgcgtcggggcaacaaaactcactgcgcggctggtgaaggcagctgaagtgcttatcaaagcagcaatggtgtcagagcaggtccatggcccatggtacacgcagttattgtgaatggctctgctaccgcgatatatatatatatatagctctgctcatgccccgttgttacaactgaatgaatggtttgtgggagtgccgtgatgtctgaattccaataagcataggcgacctgaatgcatgtatatgtaaatatacacgaaacgtaatacgactccgaaatgctcctttctcc

SEQ ID NO: 119160 - DNA, 207 bp, Zea Mays
atggcggcggatcttcctccctctgccaccgctgcccctggccctggttttctgctgctgcgtgatcaagaagggagagggaaggggaggaggaagggtagggaacggcggacgcaaggtcttatagccagggagattcagattggagccaggttcgtagtggtcgtggcgccgcgagctcagccagaatcctcgcaaagcggttag

SEQ ID NO: 119161 - DNA, 1453 bp, Zea Mays
ctctctcggtgtgcagacctgctacaaccgatcttcttcctcccccatccgagctccatctaggacaacagcttctccgccctcacgccagtagcagggatctcctccctctcccatccatgggcgcgcaccccctccctgcgagctctctgcttggctcccctgctcccatggtgtccaacgccttcctctgtcctaggcgcagggcgccactgcggcctctccgaactccccatggcgtcgagcttctccgtcgcgcccctgtgacgtgcccagcacgtccgcatccatccctgtgcaggcgcccctttcccccagcgggattcctcctcttctccccaagacgcctggtcttctccccacctccgcccaggcaacaggagatcgactccatgcttgcccctagccgaactctcctacagaagctccccacaacgccttcttctgcaaacgcagcaagcagcagacaccctcctcctccctggtcggcctcccatggcgatgttgcccccttggtgtacctgcggcagttccaaaccagtcgtcggtgctccctgcttcaaccctgcacgacgctcactccctggctctcatcctcgccaccagcttgtgcaacagcctggccgtcggcctcgcctagtagcgagaacctgccccgacactcgccagtgcactctagccgtgccgtcgtcgatttccttactgcagcggggttcccccaacgtcgtgcgccacctgttcgacgatatgcacagtagctgcatgtctcagtttatcgcagcagcgagctctttcaccggcgcctgcccacggcagcagtcccgacgcgacgctgtggcccttagtgaggcaccttgctgtcctagccgctggatcgagctttgtcccaacccgcagcttgctatcgtcgagcattgggcttgccatcgatgtcgtgcttgtcgcgcgcagcaaaaaccacaccgccacgacttgttccagctcgacgagagcagccacgtcgtcgatccgtgcagccccgatgtctccgcgtctcgcttcgccgtcaatctgcgcagcgcctgcgcgtcgtcgtcgaaacccgtgcccttgtcgtcacgcctcgcgcatcgctcgtcggcaaagagcccaaactgatggcatgcatgcgcaactccaatcagatttcggccaggttgttcgctttaaaaaaattgtgattatgttttatttatgattcagtcgatggcgtaaatatgtgtgtgaaaatataattgtgtgaatgaaagcgtgtagagaaggaaatgaagtggaaaagaactcaggaatttttattttgataggaaaatatgcgatgcgttatttgatgcgaaaaactaatttacaaaatgcggattatgttttggaaaatgcatcgatatgtgtttatgtgaaaagtgtaatttttttatgcaatgtgatgagattcatgatt

SEQ ID NO: 119162 - DNA, 80 bp, Zea Mays
gcgtttagggtaaaggtagtcaaaattgagttgatgatgcactccactatgctgatcagctttgcttgtgcactggtagt

SEQ ID NO: 119163 - DNA, 996 bp, Zea Mays
atgggtggaagccagtatgatgatgactgggtgttgcccagtgccgatatcactcttgttctggttgggaaacttggctatggcaagagtgcaactggaaatagcatccttggacgggaagcatttgtatcagaatattcacatgccagtgttactaatacttgtcagttgggaagcactaccctgaaggacggccgcaccatcaatgttattgatacaccagggttatttgatatgagcattacatcggacgaggctggtaaagagattgttaaatgcatgaacatggctaaagatgggatacatgcagttctgatggttttttctgccacatctcggttttctcgagaggacgcaagtacagttgagaccattaaagtcttctttggtgaaaggattgtcgaccacatgattttagtcttcacttatggagatttagttggtgaatctaagttgaagaaaatgttaaataatgcgccagagtatttgcagaatgttgttgagctatgccaaaacagagtggttgtcttcgataacgtgactgaagaccgaaggctccaagcgcagcaacttgacaaattgctcgatgtagtggattcagtttgtgcaaaaaatggaggaaaaccattttcagatcaaatgttcactagcatcaaggaggtgcatgatagagaaaaagaggtgcatacctcgggatattcagatgagcagatatctgaattgaaaaaggagattcatagaactagggatgaacagcttgcgcacataaccaacatggtcgaggaaaagttaaactgcactgtggagaagttgcaacagcagctcatggaagaacagaacgcaaggctggaagctgagaaggtggcgtacgaagctaggctgaaatcagaagcggagatccagaagctcaaggagagcctcaagaaagctcaaatggaaaatgatgagttccggaggatggcgcagagccagggcagtaaatgtgctatcctatag

SEQ ID NO: 119164 - DNA, 92 bp, Zea Mays
cgttccaaatttccaattcatttcagattcaaatttccaaatccccaaatatcaatcatacccctaatgaaaatataacatctactatttat

SEQ ID NO: 119165 - DNA, 324 bp, Zea Mays
atggaggttgcagatggcgtgaagactggcgactggcgtggaggtcatggtttgctgacggaggaagttcgttgtgagagccaatcggtacgaacgcgagaagcgggaggctggctggggcgtgtcgtgcggagggtgcgggaggcgacacgggtgttggcgagcgtgcacgagcctggggtgtggagtcatggtctgcttgtgtacgatagaggtgagttggtgtgtgttttggtgcgggtggagaagcgggctggagtatgttgtggagtgggcgggtgggacgtgacaactgacatggcatggaggttgcagatggcgtga

SEQ ID NO: 119166 - DNA, 195 bp, Zea Mays
atgtttggtgttttgcgcagcccttccgcaataccgtcagccatcggtgaggttttgtttttgctttgtcgtttcatcgatcgacgtctatttgctaatgtgaactgtgtttatgtgcctatgtgtgttgaggagtgaaatccgtgaaatctaggtgaagaagagacaaagcacgtccatcgcttactagctgct

SEQ ID NO: 119167 - DNA, 1045 bp, Zea Mays
gtttctcttcccttctctctctgctccgggttcagagcagagctcagcgccctgtctccctccctccctccattcctcctcctccgctctctctctgcaggcctgcactgtgaggagactgtgacccggggacggagagctcctttcttctctctcatcgctccaccccttatttaccggtcggttgttcctgggccgtcccgtcccgtcccgtcgtctcgcctgggttctcgcttgcttctcaccatcactaccaccgtccacaccatcgcgagggcctggagggaagaggatgggacagggaggagaagtgaaggcggcgccggccgtgagggtgctggtggtggacgactcccccgtcgaccgcaaggtcgtggagctgctgctccggaaccacaaccaccagggcggcgccgcgccattccacggtcagcggctcctgctcctcagctcctcgcttgctcccctctcgtccggtcccttccgttccgtctggccactccattcctcccctctgctggtctcgacgacccttctcggcggcccgtgtactctgatccgggattatggctatgcataggaattgcatggcatgatcaagcttcatccattcgtcgtctgtcagttgcttatcagtactgttgaagaaaaaacgaaattaaatttccgcagcatgaactaattaaggcccgggtttcgttcctttcctcgtttggttcagttaccgccgtcgacagcggcaagaaggcaatggagcatctccggctgatggagcaaggcggccagctggattcatgtgccgctgatgctaatgtgagtactaccagtaccacacctatacccagtctcatgtactcgccgcccaatcgtaggccaccgtacatgtctgcagatgccgagctgtctcttagaaatggagaaaggtttcctttagtgtactgatttagttctagtgcgttagtattaccaaggaaaaaaaacatagaccgtgttctcatgacgtgatgagatctttgactgcaagtgcaagtgcaagcagaaatga

SEQ ID NO: 119168 - DNA, 1552 bp, Zea Mays
gtttctcttcccttctctctctgctccgggttcagagcagagctcagcgccctgtctccctccctccctccattcctcctcctccgctctctctctgcaggcctgcactgtgaggagactgtgacccggggacggagagctcctttcttctctctcatcgctccaccccttatttaccggtcggttgttcctgggccgtcccgtcccgtcccgtcgtctcgcctgggttctcgcttgcttctcaccatcactaccaccgtccacaccatcgcgagggcctggagggaagaggatgggacagggaggagaagtgaaggcggcgccggccgtgagggtgctggtggtggacgactcccccgtcgaccgcaaggtcgtggagctgctgctccggaaccacaaccaccagggcggcgccgcgccattccacgttaccgccgtcgacagcggcaagaaggcaatggagcatctccggctgatggagcaaggcggccagctggattcatgtgccgctgatgctaatcggataaccattgacatcgtgctcacggactactgcatgccggagatgactggctacgacctgctcaaggccatcaaggcgctgagctcccctaacccgatcccggtggtggtgatgtcgtcggagaacgagccccagaggatcagcagatgcctaaccgccggtgccgaggatttcatcctcaagccactcaagaccaaggacgtgcagcgcctgcgcaactgctccagcgccgctagacccagggacgacgcggcccaccagtgcgagagcttgaggaggagcagcagaaagctgcggtcggatcaggtcgccgcgcctggccacagatcgcaaccgacgacgggattaaccatggtgctgcatgcctccagcattgagctctcgcactacttccagttcctcctcaagttcgtgctgctcgcgtacgcggtgctgtgcctgaccgagctcctccacagatggtccaatggctccgtcctctccctgtggtctgcatgaggtcgactggaaccgcgatgcggtattattagtgtaaccactaaggctccaggctttcagttcaattcccccctgtaatccagtcctggcatgaggagccaccagttcttgctcgccgctccctatatttccatttcacttttcaccagcttttttgtggttattattatttatttttttggctagattattgttcttgcatttgggggcgtcgtatcgtttgcttggttgatggaagcgacaagaagtgggcgcgataaggtgatggtgattatatatagtgtaaatgcacggtatgagtgggtcagggtatctaatgtccctgttaatcaagataccggcttgatctgccgatgcaactgccagagacgccatttcttatggcgggtggggtggacgcagacgcccacctgctctgctgttaacctcagtacccgcggtcacgctgtgcgtcagtgacacaaacaaaactgcataagttgaccgccatatgacgccacattgatcttaggggaaagcaaaaatattgtg

SEQ ID NO: 119169 - DNA, 99 bp, Zea Mays
tttgtcagttcacattaccctgcaacttgttaattactatatctgttgaaagagttgtctattatctgcaacttcacacagcaggtcaatacagacaag

SEQ ID NO: 119170 - DNA, 105 bp, Zea Mays
ttcttgccctcctactcaaccactcgaggtattgcggtaaacagcaacaggtgtggatttatgtgctgtttggttcacgaaatgtaacacaaaggataatgataa

SEQ ID NO: 119171 - DNA, 3031 bp, Zea Mays
aaaaaaaagcagcgcctccacctccacctcccgactccaagccaaggcggcccacggagccacaccgcacaccccatcccgcccggagcagcaaagcataggtgctcgagcgctccctccagagctccccgcctgccgccccgtcctcaccctcctcggtcgcctcccgccgaggctcggctcccgtccgcagccaccacgtgcgacctcccctcccctgttcctgagaatctccgtaggtcggcatggggtgaccagatcggtgctctccagctgaattctgctcgcggctcgtctcggaggcagcggagatggcgagcgccggcgtggcgggctgctcagggagtgctggcgatgctttgttcagggaactctggcatgcttgtgctgggccgttggtcacagtgcctcgccaaggcgagctggtttactacttcccacagggtcatatggaacagcttgaagcatctacagatcaacaacttgatcagcacttacctttgtttgatctaccacccaagattctctgcaaggtggtcaatgtagaacttagagctgaaactgattctgatgaagtttatgctcaaattatgctgcaaccagaagcagatcaaagtgagcccaccagcccagattctgagccaccggagcctgaaagatgcaacgtctattccttctgcaagaccttgactgcttcagatacaagtacccatggtggattctctgtcctcaggaggcatgctgaagaatgtttgccccaactggacatgactcagaatccaccatggcaagaactgctggctaaagatctccatggaaatgaatggcatttccgtcacatctttcgagggcaaccaaggaggcatctacttacgacaggttggagtgtttttgttagctcaaaaagattggttgctggtgacgcgtttatctttttgagaggtgagaacggagagctgagagttggggtaaggaggctcatgaggcaactaaataacatgccatcttcggttatctcaagccacaacatgcatcttggagtcctagcaactgcatctcatgccatctccacaggaactctcttttctgttttctacaaacctagaacaagtcgatcggaatttgtcgttagtgtaaataagtaccttgaagctaagaatcacaaggtgtctgttggcatgaggtttaaaatgagatttgagggtgatgaatctcctgaaagaagattaagtgggacaattattggtctgggaagcatgccagctaactcaacttctccatgggctaactctgattggagatctttgagggtccaatgggacgagccttctgctattctgcgtccagatagagtttcaccatgggaactagaaccccttgatgcaactaatccacaaccacctcaacctcatttacggaataagcgtgcacgaccccctgctttactttctattgctccagaacttcctcaagtttttggttttttgaaatccccagctgagcctgcccaagctttctcattttcaagaccgcagcaaactcaggaattataccattcaaatcccagttcaatcttctcatcatcgttgaatgtaggattcagttcaaagaatgaccgttctactccaatcaacagtcatttgtactggacaatgaggcagacaagaactgaatcctactctgctagcattaacaaagctcctactgaaaagaagcaagaatctgctacttctggctgcagattgtttggcattgagataggttctgcagtatcaccagtggctactgttgctagtgttggccaggatcagccacctgctctctcagtagacgttgaatctgattagctgtcacagccatccaatgccaacaaaacggatgccccagtggcaagcagcgagcgctctcttaacgagtcagagagccggcaagtcaggagctgcaccaaggtaatcatgcaaggaatggcggttggcagggcagtggacttgacaaggttagatgggtatgctgatctccaccgcaagttggaggagatgtttgatatccagggagagctttctgccaacctcaagaaatggaaggtcatttacacagatgacgaggatgatacgatgctggtcggggacgatccatggaatgaattcctcaggatggtaaaaaggatatacatttactcttacgaggaggccaagtctttgactcgcaaggcgaagccgccggttgttggtgacaccatcaagccagacccaaacaaattgccaccggaatctgacgtgccacatgactcaaacaacaatgctcccgttgctgctgattatcaggactgatggatgctaacttggctcctaccttttctttcccctcttggatgtcggtcatgggaggcaatgcacgctccttgggacttgtaagagttatctgttttgttgcttcgcgggcccaaaggacgcttccctgcaccatctgcctttgtttggaacggcttggaccgccgtggtccttttacctgcagcaaggaaaggaatggctgggagggaatggatactggtatcgttccgtgtgtggcaccccgtgatctgtttgccgtgctttgtaggaggcatggcgtattgccgggtactttggttttggagactgctactgactgctgccgtcgtcgggccgctcctctcacctctggtaaataggactttgtacacaattattttgttagtagcagtatatgtacatcatcggtcgtgttgcttgctacatgtactcctatgtagcatcctcccctgcattttagtcctggctaggtatcagatgctctggtgcaaaaatgtctctgcttgttccaacggcatgctcttttcggcccgtgctgccttgctgggtgtcgtgtgtgccttttcggttggaacattgctgccaccgcccggcatttggtgctttcttggtgttatgtgtctgccctcgtgtacaaggcatctgtaacgcctggggtctctgtttgacgcgatgctgatgcgggcgcggccctttctgc

SEQ ID NO: 119172 - DNA, 192 bp, Zea Mays
atggcgctgtgcagggaggccgagtggaggacggcgttgccggagcacgcaggccgagctgggctgcggccatggagaggaagcaggagctcagcggggcgctggaagcaggaaggagcgccatgggagaaggagattcgagcagaggagcttcgggcgcggccatggaatggaaccgaggacgagcagtag

SEQ ID NO: 119173 - DNA, 534 bp, Zea Mays
atgtggggagggccgccctgggaatggacgtctaccgagggcgacccgtacttcgtccttgacgacatcgaggagcgggagttctgggaagagttccaggcgttgggccaagagtttatgacgagatcgatgtccaagtccatcttcatccaccacgaacggggtgtctgggaagcactgcagcgccaccggaccgcgctgcttcaatcgaacgagcagctggcatggaggagcaccgaagtggctaacctgacatcccggtgcgaggggctgaaggaggatggtgcggccaaccgcgaggatgcccaccggctgaaggatgtggtccttcgcctgaaggcagaggcagaccaccgtgagaaggtgctgtggtgggcgcaggagggcctccaggcggtgacggaggaacgtgactccttcgccaagtctctagaggacaaacagtcctcgggtcaggccctaagcgcccagatggaaggtttggctctttgtcttagccttgtcttgacccctttgtccatttccaggtcttga

SEQ ID NO: 119174 - DNA, 876 bp, Zea Mays
ttaaccctaaccttaactttacttgtcctcttgttcctccgcatctcttgccatccgctggagaagagtcaatcgcggcggccccgttcaatggtctcacgacggctaccgtgaacacgacgacgcacccgcgcgagatggcgacctcctcggcgtctatctatggcttggttgctggcgaggctagtggcgatcttgttgccctccctcaggcgggtgagtcttgcggcgggcgcaaacacagcgggtgagctaatggcagccaatgcaaccggttaagggcacacgtccggcaatggcgccccgtactgtagtgcctatagtggtcagcgccaagccctatcagtaggccatgtgcacaccagtaccgcggtgcctgctgcatgctcctgcgcccaacgccaaaggaaaaaaaaggaatacggtctactactagagtagtagttctccattcatcactttgcactttgcagtcgatctcagccagccatcctcctgcagtcctgctatcgtcaccctgcaggctctttcttgattccgaggtcagcaacaacttttcctgtctctcttttccaatcgctttcagtgaaaaggatctggcaattccaggtaaacttgagtaaagagaaatgccgaggttagttctaacttcatactgatttggtgccattaagctatgcgcgacaaaagtggggaacggtgaaaaggggattcatatttttggttggaatacaaaattactgtagtctatactgttttttttgttgctctctgcgagtttttcagaacaggaaattcagaaaaatctgatgcagagtttttccaggtctggataaatcttggatctggagcccagactcgctctcatgaactcag

SEQ ID NO: 119175 - DNA, 1336 bp, Zea Mays
agtagttctccattcatcactttgcactttgcagtcgatctcagccagccatcctcctgcagtcctgctatcgtcaccctgcaggctctttcttgattccgaggtctggataaatcttggatctggagcccagactcgctctcatgaactcagactacaccaccaacaagggcgccaacgggcggccgcatggcaagaagaatcaagcgttggctcggcccaaggcgacgccgtccaagtgggacgacgcgcagaaatggcttgtgggcatgtcgaacggccacgcggacggaacccacggtgccagagtcaagcctaggagctctaacgccgacgacaggcgcctcctcggctcggcctcgcagaacggccgcgtgtcctgcagcagcgtggatggcgccttggagtacagcatggtggtggccgcgccctcgacaccgccgcaggccgccgagggcggcggcgacatggaggaaaccaagaagatcgactgcatggtgcagctgcatgactcgccccaagcggtgatgcggtccgtgtgcctgcgggacatggggacggaaatgacccccatcgccagcaaggagccgtccaggacacccacgccccggcgcgcctgcacgcccgttgcgctgagcccgatggcctcaaggtcgtccaccccggtgagaagacgccaggaagggcccgtgggcgtgaccacggccattgtagcagggacgctgaccgagcaggtagcggcagcagacgaggtcgcttgcgtcggggacgagcgccccgtggctggtcatgtgcccagcgtgaactctctggagtctcgcgcggcagcctgggatgaggctgaacgggccaagttcatggcgaggtataaacgtgaagaggtaaagatacaggcctgggagaaccatgagaagagaaaagccgagacaaagatgaagaaaatgcagatgaaggctgatcagatgaaagcacggggccaagaggagctgtccaaccggctggccaccacgcgtcggatggctgaggagaagcgggcgagcgctgaggcgaagctcaatgagcgtgcggccaggacatcggagaaggccaactacatcaggaggactgggcacctgccgtcctccttcaagatttcttgcttgtgcggctcgagctttgagtaacagaataacaattattagtccaaataatacaatgaagatagtccaactcaacttcaaattcttcctcttcaacatggtgcttctcattcttctacctgaacgatgacaaatatgtggtctctatttttctcttatgatggatttattaaattttgtgcagttgagaataaaca

SEQ ID NO: 119176 - DNA, 1373 bp, Zea Mays
cctgctatcgtcaccctgcaggctctttcttgattccgaggtcagcaacaacttttcctgtctctcttttccaatcgctttcagtgaaaaggatctggcaattccaggtaaacttgagtaaagagaaatgccgaggtctggataaatcttggatctggagcccagactcgctctcatgaactcagactacaccaccaacaagggcgccaacgggcggccgcatggcaagaagaatcaagcgttggctcggcccaaggcgacgccgtccaagtgggacgacgcgcagaaatggcttgtgggcatgtcgaacggccacgcggacggaacccacggtgccagagtcaagcctaggagctctaacgccgacgacaggcgcctcctcggctcggcctcgcagaacggccgcgtgtcctgcagcagcgtggatggcgccttggagtacagcatggtggtggccgcgccctcgacaccgccgcaggccgccgagggcggcggcgacatggaggaaaccaagaagatcgactgcatggtgcagctgcatgactcgccccaagcggtgatgcggtccgtgtgcctgcgggacatggggacggaaatgacccccatcgccagcaaggagccgtccaggacacccacgccccggcgcgcctgcacgcccgttgcgctgagcccgatggcctcaaggtcgtccaccccggtgagaagacgccaggaagggcccgtgggcgtgaccacggccattgtagcagggacgctgaccgagcaggtagcggcagcagacgaggtcgcttgcgtcggggacgagcgccccgtggctggtcatgtgcccagcgtgaactctctggagtctcgcgcggcagcctgggatgaggctgaacgggccaagttcatggcgaggtataaacgtgaagaggtaaagatacaggcctgggagaaccatgagaagagaaaagccgagacaaagatgaagaaaatgcagatgaaggctgatcagatgaaagcacggggccaagaggagctgtccaaccggctggccaccacgcgtcggatggctgaggagaagcgggcgagcgctgaggcgaagctcaatgagcgtgcggccaggacatcggagaaggccaactacatcaggaggactgggcacctgccgtcctccttcaagatttcttgcttgtgcggctcgagctttgagtaacagaataacaattattagtccaaataatacaatgaagatagtccaactcaacttcaaattcttcctcttcaacatggtgcttctcattcttctacctgaacgatgacaaatatgtggtctctatttttctcttatgatggatttattaaattttgtgcagttgagaataaacaatata

SEQ ID NO: 119177 - DNA, 1317 bp, Zea Mays
agttctaacttcatactgatttggtgccattaagctatgcgcgacaaaagtggggaacggtgaaaaggggattcatatttttggtctggataaatcttggatctggagcccagactcgctctcatgaactcagactacaccaccaacaagggcgccaacgggcggccgcatggcaagaagaatcaagcgttggctcggcccaaggcgacgccgtccaagtgggacgacgcgcagaaatggcttgtgggcatgtcgaacggccacgcggacggaacccacggtgccagagtcaagcctaggagctctaacgccgacgacaggcgcctcctcggctcggcctcgcagaacggccgcgtgtcctgcagcagcgtggatggcgccttggagtacagcatggtggtggccgcgccctcgacaccgccgcaggccgccgagggcggcggcgacatggaggaaaccaagaagatcgactgcatggtgcagctgcatgactcgccccaagcggtgatgcggtccgtgtgcctgcgggacatggggacggaaatgacccccatcgccagcaaggagccgtccaggacacccacgccccggcgcgcctgcacgcccgttgcgctgagcccgatggcctcaaggtcgtccaccccggtgagaagacgccaggaagggcccgtgggcgtgaccacggccattgtagcagggacgctgaccgagcaggtagcggcagcagacgaggtcgcttgcgtcggggacgagcgccccgtggctggtcatgtgcccagcgtgaactctctggagtctcgcgcggcagcctgggatgaggctgaacgggccaagttcatggcgaggtataaacgtgaagaggtaaagatacaggcctgggagaaccatgagaagagaaaagccgagacaaagatgaagaaaatgcagatgaaggctgatcagatgaaagcacggggccaagaggagctgtccaaccggctggccaccacgcgtcggatggctgaggagaagcgggcgagcgctgaggcgaagctcaatgagcgtgcggccaggacatcggagaaggccaactacatcaggaggactgggcacctgccgtcctccttcaagatttcttgcttgtgcggctcgagctttgagtaacagaataacaattattagtccaaataatacaatgaagatagtccaactcaacttcaaattcttcctcttcaacatggtgcttctcattcttctacctgaacgatgacaaatatgtggtctctatttttctcttatgatggatttattaaattttgtgcagttgagaataaacaa

SEQ ID NO: 119178 - DNA, 820 bp, Zea Mays
aaaaatctcgacacaaggcgaaacgggatcgcccgcccagtccacgcaccaaatttccattccatcttacctgcttgagtactactctcccgttcaccacgttcactccgtatctctcgtgcctttttcctttcctggttgcgacgagccgacgactgggcggacgccgctgccgccctacgccaggtcttcgtcggccccttcgacgagcacacacaagattcagtcgggaatgttgaatgcatagtgtaatttctgcgcaaaaagatggcatcagacgagttcatcagccttgacgcaccttgtgaggctgatgcgaaagatgaagggggagacgttcaggttaaagctcctgatgtgagtgggatggagcctctggtatcggatctccaaccagaagggaaagctggtgctgtgggtagtaatcccaagacatctgctgggaacctggatcttgaagaggggcaagtggaagatatggacctcgcggatgatgacgtagtggttggaaaggatcagctattagatgcttccattcagcccgagatcagtgttgcagctgtgcagactgtgattggttttgaggtcaagctggacaagggggacgggactgaaaatgaaataatttatgagtcaaacagcatctctattgaagaaagtccctcaagaggagttaaaagagcccgtgtggaatcaaaggaaccttctgttcgtgtcatctacagtgacttgacaagggaaagcaaacgaaagcttatgcaattgatgcaacaatggtctgagtggcaggctagaaggatgcaccatttggaggtactgt

SEQ ID NO: 119179 - DNA, 2429 bp, Zea Mays
agactctccgcagttcggcctcgcgattccgcgggagactgttctacttctcgccggcgacgccgattcgatctgacgggcacacatcagaaggctggaggagggcactgggagccgagggggaggctaagggtcaggattcgggcgcgatgccgcgcccgggacgacttcagcggtcggggtccaagcgcgggctggaccccaccggtggtggcggcggcggcgacaacgacgaccatgcgcccaagcgcccgcgcatccctgccctcgctagtgtcattgtggaagctctcaagatggacagtttgcagaaactctgttcatcgctcgagcccattctccgaagagttgtaagtgaagaagtagagcgtgctttagccaaactgggtcctgctagaattcaaggaagatcctcccccaaaagaattgaagggcctgatggaagaaatcttcagctccagttcagaagtcagttggctcttccaatcttcactggtggaaaagttgaaggtgagcagggagcagctatacatgtcgtgctgttggatgcaaacactggatgtgttgttacttcaggacctgagtcgtttgcaaaattggatatccttgtacttgagggtgacttcaataaagacgaagatgaggattggacagaagaagagtttgaaagtaatattgtcaaggagcgtgaagggaagagacctcttttgacaggtgacctgcaagtgactcttaaagaaggtgttggaaccataggggagcttaccttcactgacaactccagctggataagaagcaggaaatttatacttgggctgaggattgctcctggcttttatgaaggcattcgtgtccgagaagccaagacagaagctttccccgttaaggatcacagaggagaattgtacaaaaaacactacccacccacgctgaaggatgatgtttggagattagaaaagattggcaaggatggcgcattccacaagaagttaaatgctagtgggatctatacagttgaagatttcctccagcttcttgttagggatcagcagagattacgtagcattctgggcagtggaatgtcaaataagatgtgggacagccttgttgatcatgcaaagacgtgtgtcttaagtggaaagcattatgtatactatgctagagactcaagaaacgtgggtgcaatattcaataacatctatgagttcactggtttgattgccgatgatcagttcatttcagctgaaaatcttacagacaatcaaaagggctatgctgatgcattggtaaagaaagcatatgaggactggatgcaagttgtagaatatgatggcaaggcactcttgagcttcaagcagaaaaagaaatctgtcatgacaagaagcgatgctgcagttgcctcgacaaaccaccctgcttcaaatggttcggccatttcacagaaacaattgtcccttccagcaaaagctggacaaacttcctccgcgggtattatgaatgaagatggaactagaaatgcttacaatgcaaatggaaaccagtcagcaagatatgcagccaccactcagaacattcctgcaaacgtcgccatgcaatatgacaggagtgcagtgtcgcctgaaagccagtttagtggttcatcccttcagagtcaagcttcaagagggtccaatacgctagcattgggccctccacagcaacatcaaagttttgcattcccagcactcggccagtccatgcggccaacaggcctgaatccttttgaagaatggccgcagcaacaggaaaactgtggcggtgttgatgactacctgatggaggagatcaggatgaggagccatgagattctcgaaaacgaagaaatgcagcagatgttgcggcttctgagcacgggtggtgcaggaaccaacctaactgaagatggcttcagtttcccttcgtacatgcctgcaccttcaccaaaattgagctacgaggatgaccgcacccgtgcacctgggaaagccgttgttgggtggctcaagatcaaggctgctatgcggtggggcatctttgtcaggaagaaggcagctgagagaagagctcagcttgttgagctagacgactagaaagtattgcagctggaagcatgtgcactccagatgttcatgtaccaaagtttcgttgatgtttgtggatccggatggactcagccttgttcgatgcatataagttgatttgtccaggctgttcttttaattactatggaaaaaaatccctttcttactttagatgcatataagttgattttttatcacattctggactgctgtcctcgaaattacaaaatctggagctaaaacagtttaggttttaaccttaacctgatagcaactcaatcgaaaactcgatctctctttctgccggcatatcgggtacacatcgatatc

SEQ ID NO: 119180 - DNA, 1283 bp, Zea Mays
ttgtcactgcagtagcataatatggatatgcttctgcatatgccagattgtactaacaaggatcagtcaagttggcttgtactgtagtcctcaacaatggaattagggcattggcaactctggcagaaattgtgctaatgttgcctcatactgttgctgttgctttatagcattttaaatacttattagtcaacaattgtcggttgtgcatagaaaatgactgcttatgattatgtgatatggatgtgcagtttggagtcgtgaatgtaattaatttaccatgtgtatagaaaatgatactgcttataattatgggatgtgctgtactgacatcactgaattacttctgttctgcagatggaactagaaatgcttacaatgcaaatggaaaccagtcagcaagatatgcagccaccactcagaacattcctgcaaacgtcgccatgcaatatgacaggagtgcagtgtcgcctgaaagccagtttagtggttcatcccttcagagtcaagcttcaagagggtccaatacgctagcattgggccctccacagcaacatcaaagttttgcattcccagcactcggccagtccatgcggccaacaggcctgaatccttttgaagaatggccgcagcaacaggaaaactgtggcggtgttgatgactacctgatggaggagatcaggatgaggagccatgagattctcgaaaacgaagaaatgcagcagatgttgcggcttctgagcacgggtggtgcaggaaccaacctaactgaagatggcttcagtttcccttcgtacatgcctgcaccttcaccaaaattgagctacgaggatgaccgcacccgtgcacctgggaaagccgttgttgggtggctcaagatcaaggctgctatgcggtggggcatctttgtcaggaagaaggcagctgagagaagagctcagcttgttgagctagacgactagaaagtattgcagctggaagcatgtgcactccagatgttcatgtaccaaagtttcgttgatgtttgtggatccggatggactcagccttgttcgatgcatataagttgatttgtccaggctgttcttttaattactatggaaaaaaatccctttcttactttagatgcatataagttgattttttatcacattctggactgctgtcctcgaaattacaaaatctggagctaaaacagtttaggttttaaccttaacctgatagcaactcaatcgaaaactcgatctctctttctgccggcatatcgggtacacatcgatatc

SEQ ID NO: 119181 - DNA, 1236 bp, Zea Mays
gtttgcccctgcacaccgctgcgctactgggaggagcacaagtgtatcgctgtggctgcggcgcccggcagtccgccacaagcacacgcgcacacaggggccaagcgcctacacctacagaggagagacaaggtctgccgtccgcgcgtgcgcggaagaggggacggaggaagaaggctgccagcaatcagagatggaggtggggttcttgggtctgggcatcatgggcaaggcaatggcgaccaacctcctccgccacggcttccgcgtcaccgtctggaacaggaccctcgccaagtgccaagagctcgccgcgctcggcgccaccgtcggggagacgcctgcctccgtcgtctccaagtgcagatacaccatcgccatgctctccgaccccagcgccgccctatcagtcgtcttcgacaaggatggcgtgctcgagcagatcggtagcgggaagggctatgtggacatgtccactgttgacgctgcaacttcgaccaagattagcgaggcagttaaacaaaaagggggagctttccttgaagctccagtttcagggagcaagaagccagctgaagatggccaattggtcattcttgctgcaggggacaagccattgtatgatggtatgattcctgcatttgatgtactggggaagaagtcattctttctgggagagattggaaatggggcaaagatgaagcttgtggtcaacatggtcatgggaagtatgatgaattctttgtccgagggactctgtttggccgacaaaagtgggctgagcccccaaacacttcttgatgtactggaccttggtgccatcgcaaacccaatgttcaagctgaaggggcctacaatgctgcaaggcagctacagccctgcgtttcccctgaagcatcagcagaaggacatgaggttagcgcttgctctgggagatgagaacgccgtcgccatgcccgtctcagcagctgccaatgaggcgttcaagaaggcgaggagcctggggctgggagaccaggatttttcggcggtctatgaggttgtgaagggcgcgggtggttctggatctggccagccgtgatagaaggaccatttgtgactgtgttagcccatttccatgccgatttgcaacatagcgacgtacgagtacgtgtgtattcgagatttggaaccagaccatacgttgcaaaagaaataataaatcaaagagatgatgctagcttgcacgatagtctt

SEQ ID NO: 119182 - DNA, 1317 bp, Zea Mays
gcattgcattgcatggctagaagcgttatatctaggaggcaaaagcaggaggagactggtgggaggggagtagaccatcgcctattcgattctcactacttgtccatgctgcttaaaagaatccctctggtcctgattaattagaagctgtagttgtccttgacttgcaaccatgtatccacagatggtatatcatgcagatgttcgggcgagggagaaggagttggcggcggcggagacggagacggagaccatgggctgctgctcctgcgctcccttgggcaggatgatatccagatgtatcatcaaacgcaacgtaggaagagaacggcgcatgaggtacgacgagaggacgggaatggactatgccatggcgtacgctcccccgcagacatgctacgtgcgcccaacagacgcgcgcaccgtcaccttggccaccaccaacgcccacgccgaccatccggatccacacccacagcgagcgcacgcagcgacgaccatgccgcttgaaccggcgggcggcgcccctgcccaacgcgccggcatgcagccaccgcgcaagcccaagaagaagaagaagaagaaacaagtccggttcacgcctccagggccaccggtgcccgcgcgcggtgacgacgccgcggcggcgcatgacaccgccacggcggcaagcggcggcggcgcctaccaccacggcccgccgcctgatccgtcgtcctactcccccgcgccaccgccggcatcacacgggtacgggtacgggtacgggcagtacgcgccgtcgccgctcccgcggtgggagatgctgggcacgccgaggcggcacgagtacttctccagcgagtaccgctggtactacccgacgccggtgcgcgagggcatctacagcttcgccaccgacgccaacggccgcctcaccaccatcttcagcgaggagaaccccaatgcctgcaccatcgtctgaaaccttatgatcccgcgcgcgtgctcacttgtcacatcatcatcatcatcatcgaccagaataaaaatgcatggtcttctttttttttcttactaatgtaaaattgtagttaattatgtcaaggaatatggttcttgcaggcctgcgtaagtatggattatatagttcgaatctctggtatgcttaggctttaattttataggagaatatcatcttaatttgactcgtgcgcgttgcctttccgtgagagtaagttggtgcgggaatggagatttataaaaaggactaacggtacataaattattttaataaatgttattacacaataattatatgaaataaataacatatat

SEQ ID NO: 119183 - DNA, 1386 bp, Zea Mays
atcacacatcacaaggaacgcagaacagcacagcacagcacagcactgccgtcaagcaagaggttgaggatgtgtacgctgcaactgcggtagcacgctaccgctacggttccaaggacaagaggcaagaacgtgccatggcgatggaagcagaggaagacggaggtgggatagaaggggagctcatcccggggctgcccgacgacgtggccatggagtgcctggcgcgagtgccgagccggtcgcaccggcgcatgcgccgcgtgtgccgcagatggcgcgggaccgtcgggtcggcggaattccggcggcgccggatggccgccggggcgtcggaggacatggtgttcctcgtccagaccgcgcccgcgcgcggcgacgggaagggatcgacgtcggaatgcgcgcttgtggcggcgaacctgaccaccggcgagtggcggcgcgtggaggggccggccgagacctggagacccgtcccgctcttcgcgcagtgcgcggccgcgggcgacgggcggcatgtcgcagtggtgggggggctgggacccggacacgctccgcccgaccagcgacgtccggttgctggacgtccccgccggcacgtggaggcgcggcccgaagatgccggacagccggagcttcttcggatgcgctgggggcggcggcaacgtctacgtcgccggcggacacgacgagtgcaagaacgctctccgctccgccttcgcgtacagcgtcgcggccgacgcctggcgcgcactcccggacatgttggaggagcgtgacgagccgcagctcgtcgtggcgaccccgggccgcgtcctcgccgccagcggctacccgaccgaagcccagggcgcgttcaaggataccgccgagtggtacaacgccggcggcggcgcgtggaccagcgagtgcgacgtggtacccgacggcgacacggctgggacgtgcctggcgtcggtgcgcgggacggtgtgggccgtcggggccgggaacggcggcgtgcgggaatgggacggcgccgcgcgcgcgtggaaggacgtggccgacgggccgccgggcatgaaggcctgcttgaaggcggttggcgttggcaacggcggggccgtgctcgtgttcggcacagtggcagacgcggcggcggagggcgtcaactactctgcgtgggtcatggaagcgagcagcggtgcatggaagcgagtgcccgtgccgtcaggattcggcgggttcgtttactcagccgcagccgtgcctgtttagatcctagcctatgtactgctacaataaacgggcgccttttgcaagtggcgcttaattacgtttgccatttggcgaagcaagttttgttttgcttttttaataattcgagtgtcagctcacggttta

SEQ ID NO: 119184 - DNA, 1267 bp, Zea Mays
gttttggacgacgagcacctcgtggtttccgcttttcccaaattgcccctctgaaatcctcgcaggcctacggtctcgcggtattgcgcttctcgtcttctctaatcctcttctgctccctccactaccagtccaccaccaccactgctaccatcggttccccaaaccctagccaagggacacggtggccagcgatggacggcgacagagaaggcgctgcggcggtgcaccaccacgcgcgctcccccgaggacgtcttccgcgatttccgcgcgcgccgcgccggcatcgtcaaggcactcaccacggatgtggagaagttctatcagcagtgcgatccagagaaagagaacttgtgcctttatggtttgccaaatgagacttgggaggttactcttccagctgaggaagtacctcctgagcttccagaaccagcactgggcataaactttgcccgtgatggaatggttgaaaaagactggttgtctctagttgcagttcatagtgatgcgtggctcctgtctgttgcattctactttggagctcgctttggatttgataaagatgcaaggagaaggctcttcaccatgattaataacctgcccactgtttatgaagttgtgaccggggttgctaagaagcaatcaaaagcccccaacggcagcagcaaaagcagcaaatctaactctaaaccatcaaaacagatcaattctaacagtaagcctgtgaagccagcccacccaaacgaagaggaggatagcggccgtgaggacgcagaggaggaccaggcgtacctgtgtgggtcctgtggggaaagctatgcgaatggggagttctggatctgctgcgatatctgcgagaagtggttccatggcaagtgtgtccgcatcacccctgcaaaggcagagcacatcaagcagtacaagtgtcccagctgcagcaccaagcggagccgggaatgacaggcgccctggggcaggactcgctcccacttgacgaagcatttagaatcattaggagcagtgaaagtgtgaaactgtgtcattagaatcacttcctctgtttagtggaccagtgcgtgtgctggctgttgtatttttctcgtcgtgtgttgtacactggtagtaatggacatggtagctagtggtgacgtgttgtgttagcaagcaggctgactgttgtcatcgtagagtcggatgaactgctggagtttggaaacacatgttcagtaattcagtgatgtttagcgtgtatgataattttcttc

SEQ ID NO: 119185 - DNA, 1255 bp, Zea Mays
aaattgcccctctgaaatcctcgcaggcctacggtctcgcggtattgcgcttctcgtcttctctaatcctcttctgctccctccactaccagtccaccaccaccactgctaccatcggttccccaaaccctagccaagggacacggtggccagcgatggacggcgacagagaaggcgctgcggcggtgcaccaccacgcgcgctcccccgaggacgtcttccgcgatttccgcgcgcgccgcgccggcatcgtcaaggcactcaccacggctgcttccgtggtgcgcgcagatgtggagaagttctatcagcagtgcgatccagagaaagagaacttgtgcctttatggtttgccaaatgagacttgggaggttactcttccagctgaggaagtacctcctgagcttccagaaccagcactgggcataaactttgcccgtgatggaatggttgaaaaagactggttgtctctagttgcagttcatagtgatgcgtggctcctgtctgttgcattctactttggagctcgctttggatttgataaagatgcaaggagaaggctcttcaccatgattaataacctgcccactgtttatgaagttgtgaccggggttgctaagaagcaatcaaaagcccccaacggcagcagcaaaagcagcaaatctaactctaaaccatcaaaacagatcaattctaacagtaagcctgtgaagccagcccacccaaacgaagaggaggatagcggccgtgaggacgcagaggaggaccaggcgtacctgtgtgggtcctgtggggaaagctatgcgaatggggagttctggatctgctgcgatatctgcgagaagtggttccatggcaagtgtgtccgcatcacccctgcaaaggcagagcacatcaagcagtacaagtgtcccagctgcagcaccaagcggagccgggaatgacaggcgccctggggcaggactcgctcccacttgacgaagcatttagaatcattaggagcagtgaaagtgtgaaactgtgtcattagaatcacttcctctgtttagtggaccagtgcgtgtgctggctgttgtatttttctcgtcgtgtgttgtacactggtagtaatggacatggtagctagtggtgacgtgttgtgttagcaagcaggctgactgttgtcatcgtagagtcggatgaactgctggagtttggaaacacatgttcagtaattcagtgatgtttagcgtgtatgataattttcttcggcttg

SEQ ID NO: 119186 - DNA, 1867 bp, Zea Mays
ttccctgcttccatgggcgctgcgcacttgcccctgctcggctccctttcctgcgcgtgcccagccgtggtctccagctcaccggacgcgggcctctgtctgtgccgtgctccctgcgcgcttggtcctgccatctccatggcactcggccgcgcagcgtcttcctcagccatggcgagttcctcgctgccacggttgtctagtggttggcccgcgccatctctgctcctctcggcctgctactgcgtgtgcttgtgtctgagctcatctggccacgacctcgtcgaactgcgaaactccctcgccgtgcgctctggcatcggctgccaccgattccgccattgagttcatgagcactccttgctctgttcgtttcgccgtgggcgatttctccactcttcaaatccgtgctgttcgccctgcgtgcactcgctccctatccatcgggtttcggcgtgttcatgtttgtcgttgagtcgccgaacccgtcatcccctgctcgactcccaagcaaaccccctgatccgtgtcctgctcgccatcgactctcggcaccataagctcattttcccttgcgcacatctccacagaccctgcctcatcacgcgtgtgcattatcgatctcgtcgttgttccgtgcagcatcaagaaatacaaagcatggggtgaagacgaagctagcagcgtaatagccaccaagtgctcgacaaaaagctcgaacaaatcgtcgatcgtcatcctcgtctacgccaaagatccgagaagattaggcacagaagaaaataaatcagtacgcagtcggagaattctcgatgtggatgaagatgaagcgcgattcgacacagcagtcaccctattttcggtgaaatgctgagctgaaaggcgtcgtcgatttcgtgatttcaagtcggatttaattgacggtaagttgattcgttattccagtcaactaggtatataaatagattaaatagaattgttggtcacgataattgttattaatttagcatacgtatattgtgatgttcgttctagatgaatcggtaaatcaagttaattaagatactcagtttaaagagttaattagattgtttctataactattttaagtcgttggcatttaataatagcgagtcgaggttttactagacctctgaaaaaatatgttactaaaaatgatagtgtgtgtttataatttattcttgcttgataataaaattagatgtgattggacaggagaaatgcgtgtgctgtaattagtatgtatagtttattattttgtgattattacgcgtagtcgtatatcgataactagtgtttccgtatgaaattgtacaacgcctcgccgctaggtgtttaattcgctatcgcgtagcactatttaagtttgtaatattcctgtctatatgcattcatgtgcataatgcatttcattcaggtacgtgaattaaccacgtgatgcggaagacgagccaagtcgaccccaagcgcgggctactccgcatggtgatgctgatggacgaacctgcctgatcatgtgctaggacaaggatgatcgtctaacaacactaacctagtgttacccaggcaagccccggtgcgtttgtcatctgtgataggagttgtgtgctaaacaactgatgcatttccttccttgaaaaattaattacccttccttgataccatttttgaaaagaattttatgatgcttagccttgctttagcaaacaaaatgttttgttttaaaacaaaagtgatgctttgaactaggatagaaagaactctagatgcaggtagctttacttaaccagacaagtaaaaatggattcttaaggatccactcatagtaagattttctgcaaacaga

SEQ ID NO: 119187 - DNA, 864 bp, Zea Mays
acgtacatctccatctctcagccatctcatttcttctccgttcctgatgacactagagggattagtccgcacatcagtgcttggatcttgctagcagccgagctacttctccagcatcaatgtttgaaaccgtcatatctgcaatttccggtcgtcgacctcgccctgctgcttatcccgtcgccagctgtacttgtcttcctcaccggtgtgccctctcggctcgctcggcttcaatctccatcgcgcagcggcaacttcccttttctctggtgccgcgcacgctgctggtccttgcgagtccaccttgctccggccagtgacaccggtgccggctcgctaatgcttgcgcgcgtctgtccacgtcgccagcagctcggtctctacgtgtctccctcagcatctcggcatcggaactccatcatgtctgtatgtgtgtggaagaacgagatcgagggatcggagaagaaagcgaagcccatgtggtttgtgcgttcgtttggcttggaattggaactgtggatattggagaagaaattccgagaaattagtggacggtgatggtaatgttcgtgcgatactcatctgatgctcgacaaaaagcccgaatcgggagtggctgcttcgtcttcttcgtcgaatgagaatcgtcgtgctggccacgcgtcaccagctcgataaaataaatcctatgggtatctggttaaggatagaaattgtgtgcatcgctcgccagacgtgtgtggtcatgggcgtcaagcgaaaaccatcttcgtttttccgactatcgtgtcggattggtcagggtaagccaatttgttattcgtgttagtggattgataaatggtctggctaggtatatta

SEQ ID NO: 119188 - DNA, 183 bp, Zea Mays
atggcaagcttaaggaagggactcaacgcagctagggagttcttccagcggtgggacgagtggaggaggcacccgatggtgggcaaccagctgcgccatgacgcacccgggctcgacatcgccattgttgcctttaggatctaccttgtcgacgagcccgcatacaaccgcctttaccgccct

SEQ ID NO: 119189 - DNA, 1874 bp, Zea Mays
ctacttcttcctcccccacgtcctcacgccgctccagggcacccacccaaaatcggccgcgtccgggccgacctcctcgaccaccccgctgccagggccagggaccccatcttctgggaggctattagggccagttcctcgtcgcgcgacgacggggaaggcggcggcgtcgccgtgcacgtcccgcccggcccgccgttccaccccaacctcaacgtggtccgcgttgctggcagcggtggcgggggaggtggcgctggcgacgagggtgcggggaaggagggctggggtggttccaatctcggcagggatttgcccacgcccaaggagatttgtaaggggctcgacaagtatgtgattgggcaggacagagccaagaaggtgctatctgttgcagtttacaaccactataaacggatataccatcaaactttacaaaaggggtctggagcagatttgggtggttttaatggggaagctgatgatgacgacaacgtggaactagagaaaagcaatgtgctgttaatgggacctactggctctggtaaaactttacttgcaaagacattagctcgttttgtgaatgtaccatttgtaattgctgatgcaacaacattgacccaggcagggtatgtaggagaagatgtagaatctatattatacaagttactcacggtggcagattttaatgtgcaagcagcacaacaagggatggtgtacatagatgaagttgataagatcacaaaaaaggctgaaagtcttaacattagcagagacgtatctggtgaaggtgttcagcaggcattgctgaaaatgctggaaggcacgatagtcaacgttcctgagaaaggagcaaggaagcatcctcgtggtgataatatacagatagataccaaagatattctttttatatgtggtggtgctttcgtggatttggaaaaaactatatcagagagacggcaggattcatctattggtttcggcgccccagttcgtgcaaacatgagggctggtggcatttcaagtgctcaagtgacatcatccttgttggaatctgttgagagtggtgatctaatagcttatggacttatcccagaatttattggacgcttccctatccttgtgagcctggccgctctaaatgaggaccagcttgttcaggttctgattgagccaaagaatgccctgggcaaacaattcaagaaattgtttagcatgaataatgttaagcttcactttacagatggtgcacttagaataattgccaaaaaggcaatgtcaaaaaatacaggtgcacggggtttaagaactatccttgagaatattctcatggattctatgtatgagatcccagatgcaaaatctggggagaagcgaatcgatgcagtggttgtagatgaagatgcagtaggatcagtggaccaacctggctgcggagctaagattctttacggtgatggtgctttggatcaatatctatcccagataaaggtgtcaggagacggagtggggagcgaaatggatggggaagctgagctttcgtcatcgagagccattggcatgtgattcctggttctgaccgcaccagtgtaacctgtaaaaatctaatcccagttatatcaatgtaagtagtagtagccttgtaaatgaaacgatatgtgcagcgtccattgttcttctgaagccctggcacacgttgccccgcccgcgctcacgcattgcatgatttgcagcaggattttaatgagtgtagtcgagcaggttcgtgtagataccagtcgcttataaatggcgcaatgccatgaattgtaatagctgccggatctatgttaaaacttgaaacaaagaaatggatcaagagggcatggagttgc

SEQ ID NO: 119190 - DNA, 1820 bp, Zea Mays
cgcgtccgggccgacctcctcgaccaccccgctgccagggccagggaccccatcttctgggaggctattagggccagttcctcgtcgcgcgacgacggggaaggcggcggcgtcgccgtgcacgtcccgcccggcccgccgttccaccccaacctcaacgtggtccgcgttgctggcagcggtggcgggggaggtggcgctggcgacgagggtgcggggaaggagggctggggtggttccaatctcggcagggatttgcccacgcccaaggagatttgtaaggggctcgacaagtatgtgattgggcaggacagagccaagaaggtgctatctgttgcagtttacaaccactataaacggatataccatcaaactttacaaaagggtaggtctggagcagatttgggtggttttaatggggaagctgatgatgacgacaacgtggaactagagaaaagcaatgtgctgttaatgggacctactggctctggtaaaactttacttgcaaagacattagctcgttttgtgaatgtaccatttgtaattgctgatgcaacaacattgacccaggcagggtatgtaggagaagatgtagaatctatattatacaagttactcacggtggcagattttaatgtgcaagcagcacaacaagggatggtgtacatagatgaagttgataagatcacaaaaaaggctgaaagtcttaacattagcagagacgtatctggtgaaggtgttcagcaggcattgctgaaaatgctggaaggcacgatagtcaacgttcctgagaaaggagcaaggaagcatcctcgtggtgataatatacagatagataccaaagatattctttttatatgtggtggtgctttcgtggatttggaaaaaactatatcagagagacggcaggattcatctattggtttcggcgccccagttcgtgcaaacatgagggctggtggcatttcaagtgctcaagtgacatcatccttgttggaatctgttgagagtggtgatctaatagcttatggacttatcccagaatttattggacgcttccctatccttgtgagcctggccgctctaaatgaggaccagcttgttcaggttctgattgagccaaagaatgccctgggcaaacaattcaagaaattgtttagcatgaataatgttaagcttcactttacagatggtgcacttagaataattgccaaaaaggcaatgtcaaaaaatacaggtgcacggggtttaagaactatccttgagaatattctcatggattctatgtatgagatcccagatgcaaaatctggggagaagcgaatcgatgcagtggttgtagatgaagatgcagtaggatcagtggaccaacctggctgcggagctaagattctttacggtgatggtgctttggatcaatatctatcccagataaaggtgtcaggagacggagtggggagcgaaatggatggggaagctgagctttcgtcatcgagagccattggcatgtgattcctggttctgaccgcaccagtgtaacctgtaaaaatctaatcccagttatatcaatgtaagtagtagtagccttgtaaatgaaacgatatgtgcagcgtccattgttcttctgaagccctggcacacgttgccccgcccgcgctcacgcattgcatgatttgcagcaggattttaatgagtgtagtcgagcaggttcgtgtagataccagtcgcttataaatggcgcaatgccatgaattgtaatagctgccggatctatgttaaaacttgaaacaaagaaatggatcaagagggcatggagttgc

SEQ ID NO: 119191 - DNA, 1934 bp, Zea Mays
cgcgtccgggccgacctcctcgaccaccccgctgccagggccagggaccccatcttctgggaggctattagggccagttcctcgtcgcgcgacgacggggaaggcggcggcgtcgccgtgcacgtcccgcccggcccgccgttccaccccaacctcaacgtggtccgcgttgctggcagcggtggcgggggaggtggcgctggcgacgagggtgcggggaaggagggctggggtggttccaatctcggcagggatttgcccacgcccaaggagatttgtaaggggctcgacaagtatgtgattgggcaggacagagccaagaaggtgctatctgttgcagtttacaaccactataaacggatataccatcaaactttacaaaagggtaggtctggagcagatttgggtggttttaatggggaagctgatgatgacgacaacgtggaactagagaaaagcaatgtgctgttaatgggacctactggctctggtaaaactttacttgcaaagacattagctcgttttgtgaatgtaccatttgtaattgctgatgcaacaacattgacccaggcagggtatgtaggagaagatgtagaatctatattatacaagttactcacggtggcagattttaatgtgcaagcagcacaacaagggatggtgtacatagatgaagttgataagatcacaaaaaaggctgaaagtcttaacattagcagagacgtatctggtgaaggtgttcagcaggcattgctgaaaatgctggaaggcacgatagtcaacgttcctgagaaaggagcaaggaagcatcctcgtggtgataatatacagatagataccaaagatattctttttatatgtggtggtgctttcgtggatttggaaaaaactatatcagagagacggcaggattcatctattggtttcggcgccccagttcgtgcaaacatgagggctggtggcatttcaagtgctcaagtgacatcatccttgttggaatctgttgagagtggtgatctaatagcttatggacttatcccagaatttattggacgcttccctatccttgtgagcctggccgctctaaatgaggaccagcttgttcaggttctgattgagccaaagaatgccctgggcaaacaattcaagaaattgtttagcatgaataatgttaagcttcactttacagatggtgcacttagaataattgccaaaaaggcaatgtcaaaaaatacaggtgcacggggtttaagaactatccttgagaatattctcatggattctatgtatgaggtttgttgcgtgatgattttgtattctctttctattcgcctaacccgtaaagtctctggagtaggcatactaatcgttgttgcaattgacttgtatctttacagatcccagatgcaaaatctggggagaagcgaatcgatgcagtggttgtagatgaagatgcagtaggatcagtggaccaacctggctgcggagctaagattctttacggtgatggtgctttggatcaatatctatcccagataaaggtgtcaggagacggagtggggagcgaaatggatggggaagctgagctttcgtcatcgagagccattggcatgtgattcctggttctgaccgcaccagtgtaacctgtaaaaatctaatcccagttatatcaatgtaagtagtagtagccttgtaaatgaaacgatatgtgcagcgtccattgttcttctgaagccctggcacacgttgccccgcccgcgctcacgcattgcatgatttgcagcaggattttaatgagtgtagtcgagcaggttcgtgtagataccagtcgcttataaatggcgcaatgccatgaattgtaatagctgccggatctatgttaaaacttgaaacaaagaaatggatcaagagggcatggagttgcaaatttgtga

SEQ ID NO: 119192 - DNA, 1395 bp, Zea Mays
gctattagggccagttcctcgtcgcgcgacgacggggaaggcggcggcgtcgccgtgcacgtccccggtggcgggggaggtggcgctggcgacgagggtgcggggaaggagggctggggtggttccaatctcggcagggatttgcccacgcccaaggagatttgtaaggggctcgacaagtatgtgattgggcaggacagagccaagaaggtgctatctgttgcagtttacaaccactataaacggatataccatcaaactttacaaaaggggtctggagcagatttgggtggttttaatggggaagctgatgatgacgacaacgtggaactagagaaaagcaatgtgctgttaatgggacctactggctctggtaaaactttacttgcaaagacattagctcgttttgtgaatgtaccatttgtaattgctgatgcaacaacattgacccaggcagggtatgtaggagaagatgtagaatctatattatacaagttactcacggtggcagattttaatgtgcaagcagcacaacaagggatggtgtacatagatgaagttgataagatcacaaaaaaggctgaaagtcttaacattagcagagacgtatctggtgaaggtgttcagcaggcattgctgaaaatgctggaaggcacgatagtcaacgttcctgagaaaggagcaaggaagcatcctcgtggtgataatatacagatagataccaaagatattctttttatatgtggtggtgctttcgtggatttggaaaaaactatatcagagagacggcaggattcatctattggtttcggcgccccagttcgtgcaaacatgagggctggtggcatttcaagtgctcaagtgacatcatccttgttggaatctgttgagagtggtgatctaatagcttatggacttatcccagaatttattggacgcttccctatccttgtgagcctggccgctctaaatgaggaccagcttgttcaggttctgattgagccaaagaatgccctgggcaaacaattcaagaaattgtttagcatgaataatgttaagcttcactttacagatggtgcacttagaataattgccaaaaaggcaatgtcaaaaaatacaggtgcacggggtttaagaactatccttgagaatattctcatggattctatgtatgagatcccagatgcaaaatctggggagaagcgaatcgatgcagtggttgtagatgaagatgcagtaggatcagtggaccaacctggctgcggagctaagattctttacggtgatggtgctttggatcaatatctatcccagataaaggtgtcaggagacggagtggggagcgaaatggatggggaagctgagctttcgtcatcgagagccattggcatgtga

SEQ ID NO: 119193 - DNA, 517 bp, Zea Mays
atgcagcgcgcttccgtcaccagtaccacgcttctctcgctcagccggcggaggaggggctacgcggccgcagcggagttgcgcgcggcggcggcggcaatggcggcgagagccccgggcgcgggcggtgccgctgacggcgcggcatcgtccaaggaggtcttctggatgagggacccccagacggggtgctgggcccccgaggaccgctttgccgacgctgacgccgccgacctccgcgcgcgcctgctcgccaccaggaaggactagggccttggcgtcgcgtctgatcaattgatgaacacctgcaccttaattggacggctgtgacgtgctgacgtccaactgagaattcaaactaactagcatcctacatttgttagaatttgacgtcgcgagcctcaaaactagggcggttcaaatcagtgaaacgccaagcaagaactctgcttttgtttagttgaggaggttccaatttctctgccgttgtgaaaatatatttgtggtcgccttcgtc

SEQ ID NO: 119194 - DNA, 364 bp, Zea Mays
gacgagccttcttcctgtccttgggctctggtcttgggttccctgcatgtgtagggtaatcctcgagtcttcaagcttgtgcagtcctcttcccagccagcaactcgggtctgctgatcggaacagggccatgtcgccgcagaacgcagccgtggacagctctaccactggccatccaatccatgttgatccgactgatcttgcacgagcactgaaggcgtgagctccgagcagaaggagtgtaaattcaagacgaagtggttgtggaagaggagtttgctcgagtgcctattcagcaagtggatggagctatctaactggttattgggtagaaaggtcttgagcctcttcactgcaacaaagg

SEQ ID NO: 119195 - DNA, 966 bp, Zea Mays
tgtgtctgtgtcggctggctgaccagaacacttgagcagactagcaaggccttcagaccgggagggctccctgtcctgtcccccgcgccgccgcggatggccggagccaccacgccggcatcaggcgccctcgtcaggctctgcctgccttcgctcctcctctttctgtaccggtgctgcagatgtgaggctgttgagatggagagaacccttgcgatgatcaagcccgatggtttgtcaggtaagtacacagaagcaatcaaggaggtcatcttggattctggatttcatatcgtcaaagaaaccgaggtccagcttgatgctgagagggcatctgtcttctatgcggagcattcccagagaagcttctttgacagcctagtcaagtacataacaagtggtccagttcttgctatggttctggaaagacctgacgccgttgcgcaatggcgcactttgattggaccaactgatgcaaaaaaggccaaaacctctcatccaaacagcattagagcaatgtgtgggctggactctgagaaaaattgcgtgcatggttcggattcaccagaatctgcagacagagagatctcatttttcttcggagaagctgaatccgtaactgtggaacatgatgagctatagacgccacactggtatcaggcaagtcagcaaactgaattttgatgtgtctttgaactcttaggctatctcctgtagcttcttactcgtacccgtttcttattattttaaaagttattatgtaaacagtataatttatagtgcaaaacagtgtcttgcatggccatatgcttgtggcttcatatgcagagtttactgatctgctgtgcacattgtgattgctaagactaggatggctgagcagctgaggcctattggccattcatatgcttctgcttgctcaagtgtttactctcgaagtaattatgggcatgtttggttcggatt

SEQ ID NO: 119196 - DNA, 1002 bp, Zea Mays
tgtgtctgtgtcggctggctgaccagaacacttgagcagactagcaaggccttcagaccgggagggctccctgtcctgtcccccgcgccgccgcggatggccggagccaccacgccggcatcaggcgccctcgtcaggctctgcctgccttcgctcctcctctttctgtaccgatgtgaggctgttgagatggagagaacccttgcgatgatcaagcccgatggtttgtcaggtaagtacacagaagcaatcaaggaggtcatcttggattctggatttcatatcgtcaaagaaaccgaggtccagcttgatgctgagagggcatctgtcttctatgcggagcattcccagagaagcttctttgacagcctagtcaagtacataacaagtggtccagttcttgctatggttctggaaagacctgacgccgttgcgcaatggcgcactttgattggaccaactgatgcaaaaaaggccaaaacctctcatccaaacagcattagagcaatgtgtgggctggactctgagaaaaattgcgtgcatggttcggattcaccagaatctgcagacagagagatctcatttttcttcggagaagctgaatccgtaactgtggaacatgatgagctatagacgccacactggtatcaggcaagtcagcaaactgaattttgatgtgtctttgaactcttaggctatctcctgtagcttcttactcgtacccgtttcttattattttaaaagttattatgtaaacagtataatttatagtgcaaaacagtgtcttgcatggccatatgcttgtggcttcatatgcagagtttactgatctgctgtgcacattgtgattgctaagactaggatggctgagcagctgaggcctattggccattcatatgcttctgcttgctcaagtgtttactctcgaagtaattatgggcatgtttggttcggattattattctcttttccacggagaaacaccagaatcgacggatagtc

SEQ ID NO: 119197 - DNA, 1040 bp, Zea Mays
tgtgtctgtgtcggctggctgaccagaacacttgagcagactagcaaggccttcagaccgggagggctccctgtcctgtcccccgcgccgccgcggatggccggagccaccacgccggcatcaggcgccctcgtcaggctctgcctgccttcgctcctcctctttctgtaccggtgctgcagatgtgaggctgttgagatggagagaacccttgcgatgatcaagcccgatggtttgtcaggtaagtacacagaagcaatcaaggaggtcatcttggattctggatttcatatcgtcaaagaaaccgaggtccagcttgatgctgagagggcatctgtcttctatgcggagcattcccagagaagcttctttgacagcctagtcaagtacataacaagtggtccagttcttgctatggttctggaaagacctgacgccgttgcgcaatggcgcactttgattggaccaactgatgcaaaaaaggccaaaacctctcatccaaacagcattagagcaatgtgtgggctggactctgagaaaaattgcgtgcatggttcggattcaccagaatctgcagacagagagatctcatttttcttcggagaagctgaatccgtaactgtggaacatgatgagctatagacgccacactggtatcagtggcaatattggccggctcattggacaacgtgggagagtatcgactctgctgcttctagtgttcgtcatgcttcttttatgaactaaacccgaagacgctgcaatttgaggaggggatgtcagttgtcacagaggagagagtcatttttagggctagtttggaaatctcatttttttcaagagatttttattttcctaaaggaaattagtttatttttctttgagaaaatagaattcccttgggaaattagagtttctaaacgagcccttaatttcgtaaaattatgtccggagtccatatttcctatcggagcaccatggtccttgaacttgcaaaactatatggtgcaaaccaaatattgttttttcatccgtgttga

SEQ ID NO: 119198 - DNA, 375 bp, Zea Mays
atggccctcgacttctccatcttccggtgcttgccctctgcttgggccgcgtccctgcttctctttctctccctcggatttgtctgcggcagtcggcacatggagctcctgcgggacaacatctccatggtgtccctggctgtcctgatgaccgcgcccttccccaattcctccctgctcgctgcgtcggccatctccaagctccctctgccggcgacttgcatcgtctccaatgcctctgttcctccctacgcgcccatgcggagctcggtcactggctcggtcctgttcgattcttcttgtgtcgcgcccctggctcctctgttggccgcgcggccgtttccggttccctgcgcaactgccgctactccttga

SEQ ID NO: 119199 - DNA, 528 bp, Zea Mays
atggccctcggcttctccagcttctggtgcttgccctctgcttgggccgtgtccctgcttctctttctcaccctcggatttgtctgcggcagtcggcacatggaactcctgcgggacagcatctccatggtgtccctggctgtccaagtgaccgcggtgcgcgcgcgtcgcgttctcgtggctctgccccggcctccctcatctggcgtcgttgctcccgatggtcgccttccttgccgcggctccctgacgtgcgcgagctctgtgtttcctggcgcgccccaagctttttgtttcccgcgcgagaagcccttccccaattcctccctgctcgctgcgtcggccatctccaagctccctctgtcggcgacttgcatcgtctccagcgcctctgttcctccctacgcgcccatgccgagctcgttccctggctcggtcctgctcggttcttcttgtgccgcgcccccggctcctctgttggccgcacgaccatttcctgctccctgcgcaactgccgctactccttga

SEQ ID NO: 119200 - DNA, 139 bp, Zea Mays
aatgtgatagctattgtgttaactattgtttataatataacttacataggcatcctttttttcttgtccaatgcaactctttcacggttcaatacggctggctccatcaaaaccttttatcatttgaaaatatttaaaa

SEQ ID NO: 119201 - DNA, 318 bp, Zea Mays
gtctaccggactcttttaagttgcaagtttttttcctaggcacccaggactttctttttatgagaattcgacaattttttgcactgtctaggtggcatgaaggttaaagctgatcgtgatgagtcatcgccttatgctgctatgcttgcctcacaagatgtcgcgcaaagatgcaaggagcttggaattactgcattgcacattaagctctgtgctactggtggaaacaagaccaaaacccctggccctggtgctcagtctgctcttagagctcttgctcgatctggcatgaagataggccgtattggtaagcatgct

SEQ ID NO: 119202 - DNA, 827 bp, Zea Mays
aaacatttcttactactgtgttgcagtcctagaactttctgagaaatatcagaagaaatttggtccacatcgatattttgtggctggaatactaaaatttttatgtttgcctagttacttctatgaactggaatatcttccttcgtcgaaggagatggccatgaatggaaaaggtacaggtcaagacaaggcccacctgtccaatgtctataccgatgtgatgcatagtatatcaaagaaagaaggaattcaagagcctccagtttgtccagtattgattatattatgactctgagacggatgtcgcttggggatgttgatacatcaggtagtacagtggcaagcactgaaccatcagactatgtacatggtctcgatcagaaagcaaaacacttgtctctgggaagaaataacattgtttcagaacctgaagaagtgctacaccctcaaccatgtcatggatcattctggccaagaaccaagtccaaagcaagggctgatagaaattcagttggtataacgtctactaatgacacacggtcgtcttgggcagccccatcaatgcacgataaggaacacatttcctcaacaatatcatacccaggacctatttgggactgtgaaccaaagtgggacacagggccaaaatgggatagtgagctaacttgggagcctgaccaccccattgaacttcctagaccacaagaggacatgggaattggagcactgatggaacttgtgccaaattgggatgataaatgggtagttaggaaagggcactttcttggtgtcctagtatgcagccattcatgcatgacagtgcaaag

SEQ ID NO: 119203 - DNA, 122 bp, Zea Mays
ccgtcttattcaaatttgttatcgccggtattcgagtgtgaattattaccattaccatttacgttacatttcgtgaaccaaacgacacctttatgaagtcaagccaaaaaggagcaaaagag

SEQ ID NO: 119204 - DNA, 1821 bp, Zea Mays
ccccaagcccgcgccctcccttccctctccacgcgcgctgctcccgtttcctgctcgagccgcggctttttctcccccaagctcccagccgtgtcgcgcccctccctctcccctctgctcgtctgccgcgcccatgcccactccctgccgagcggctccctccgcgcgtcaatggccccagctcggaatccctcccatggcgagctcgccggtcatccctgccctagctcggatcccctccctcatccctttcccagccaagctcctcccctgcggctccctcatggcgcccaggatctcctcccacgcatctccctactggagctcacgtccacccccaactcggtctccagctcccccttgcgcggctccctagagctaggctcctcaccagcggtcgccccatcttcttggccatggtgcttgcgcccctcctcggtcctcgacgtcgaacgccgctggctctcggcgcccaaggatgtggatccctccctgctcaaccctgcttctgccccaagcaccttcgacggtcctgctcatcttgctaccaccagaaaacgccaccgggacatcgtgcaggtctgcagaagtaatatctggccgcgctctgtgctactctagttcgcgttcatgcctaggctcgagtttgtgtaccacatgttcagcaaaatgtgtgaaccagttgtcgaccccgccatggttagccggtgcgccacctatcgcgcctcgccgagcggttccctctgcttggtccctgctatggctcgccggcgttttccccagctcgaatctcgcccgacccaagctgaacttcatccatggccacggtcgattctccctggacggtctcaagcgccctcgcctccggtggttttagcttgtcgtcaactatccttgccgcgcgtgcttttgtccgagctcgcccttgtcgagctcccttggtgtccctcccatgcccgtgcttgcccatggtcgcgcgccgtcgcgcagctcgcccaagtcgtccatggctgcgcacggtgttcttgtcgatgttgtgtcgttgccgatgctgtagagctcgccttgctcctcgcgtcgccgttcgtcggtctcgaatgcttgggtctctagccacgcgtccatctctagttctgatcgcattccagaagctctttccggttggtcgtgtcggccttgctggccatggagctcgccccgcgtacgctcgccaattttcttagccatgtatgccgagcttcccagcgctccagctagccgatatcgtcaggtccgattgtcccagctcgtcctggtggccatcgatttggagctctgcgcggactcggctatgcccaacactatccatgtagccgtcgtatgtctccgcgtcatgtacagcaacatcactgaccgtgccttcgcatgctttgacgtgtcgagccctttcccgttgtgactcgcgcgctatctattcgtcaataaaatactattgagcttctccttgcgacgcagtttttttgtgtcgttgttgcgccagaagacgaaaggaaaccgctaatgcaaagcttgtcaggtgttggtgttgtgcgcggaccggatagcgccatcgatttcgtggtttcaaatcggattttagtagggatcgacgaaaagtccgaattagtattcattgatcgatgtagatgtttgagctgaatctcagacgaaggtcatgaaggacataccttcatgattgcaacatatgttaatgaaaaaagaatcatatgaaatataagagacaacgtgaataattatataacattattaagatatttttattatatgaacaaatatgaataa

SEQ ID NO: 119205 - DNA, 110 bp, Zea Mays
tcacaattataaatatttatttattcatttttaccaaatttgggctttacacagtgtccggtggcgcaccggactgtccggtgcgccatgcgacagcagccttcaccaaa

SEQ ID NO: 119206 - DNA, 1900 bp, Zea Mays
tctctcctctctttccgcctccatccgaccacccccgcgagcttcgacagttcgacacacgcggccgccccttcccggctccagccacaccccccggaggcggcgatgcagatggcagcggcagttgcccccaccgacgccccggcctcggcgtctgcggcggcggcgccctcccgcccccacgcgcacgccgcggcagcggtggcggccgcgtcgcctcacccgcacgcactgcatccgcatcaccatatgccgcaaccgcggtgggtggtcatcccataccctcctccacaccatcccatggtggccgcgccgccgccaccttctctgcagtttgtgaagcattttacgccgccgtcctcggtaacaccgccgccgccgactggatccggcgggaacgggggcgaggataaccggaccatctgggtgggcgacctgcagtactggatggacgaaaactatcttcacagctgcttcggctctagcggcgaggtggtgaatattaaagtcattcgcaatagacactcgggagtttctgagggttatggttttatagagttttatactcacgtttcagcagagaaggcactgcagaatttttctggtcacgtaatgcctaatactgaccgggcttttaagttaaactgggcatcatatagtatgggagaaaaacgctcggaaatttcgtctgatcactcgatatttgttggcgatttggctgttgatgttactgatgcgatgttgctggaacttttttctaacaaataccgatcggtgaaaggagctaaagttattattgatgcaaacacaggccgttctagaggctacggctttgttaggtttggagatgataatgacaaaattcatgcaatgactgaaatgaatggtgtttactgttccacaagaccaattcgtgtaggaccagcgactcctagaagatctcaaggtgattctggcacttctccaccaaggcaatctcatgttgactctactaacaggacggtatatgttggtgggcttgaccccaatgttagcgaagatgaactgaggaaagcatttgcaaaatatggtgatcttgcctctgtcaaaattccttttgggaaacaatgtgggtttgttcaatttgtaaacagagttgatgctgaagaagcactgcatgggttgaatggatcaactattgggaagcaggcagttcgactttcctggggccgcagccctgcaagtaaacagtctaggggtgattctggccaccggcgcaatggcaactgcaacggcatgtactacgggacaccattctacggtggatatggctacgcctccccgattccgcacccaaacatgtacgccgcggcctacgaagcctacccgtactatgggaaccagcagctagtgagctgatgtagtgatgtggcgagatgctctctgctcagttttcctcccttggaggaaacgagtttttggtcccagtaaaagcatagtagctatgatgagatatatgataggtggccataaaaatgggcgcgagagacgagacaggcatatgatggtaacgctacctgcagatttgtgctgctagtagaacctaaaagagcttgtagtagacaaataaaaccttttcttttgtcttggaaattttgactcgctaataaaaagtgaagctatctgttgttgtggctgtctgtttggttggtgtgctgtgttttgggtcggtggtccttgcatgttcggtttctcacttcgcatcagttgctgttgctagcttggagttgcatgatgtcacaccgcctgtattattttttgcatgctatgttgatacacgtatccatgttgctatcctgcagccaaccgcggctatcctgtcaatacgaacttcggggatttaggttttttggttctggga

SEQ ID NO: 119207 - DNA, 282 bp, Zea Mays
atgggagaaaagaagagagggatggctccacagcagcgcaccaagaagagcccgagcagagggggagagatggcgtgggggaagagaagggagagggcaagggctgccatttatagagccaagctctggacatgtcagctagctgcagcaggtggcaggtgctacagtgacatctttgggcgacgtgttttggcagtttctgcttggaatcggatcttggttgctgcacaaaatatcttccttgatctatactctacaattgttgtacaggacttgaggtga

SEQ ID NO: 119208 - DNA, 1428 bp, Zea Mays
ggattgagagaaaaattagtttatttccttcgtaatccctgtaatgctcttgtgaccaaatcaaaagatagaaataagaaaaaacaacagtccgacggtgggcggtgggcctgcgatcactcgcaagtactagtacgtaggcaacgcgaagggtggaggtagaagcctgcgtctctttctcaacctcacctgctcccaaacccccgagctgcacagctcaattctgtttatgtaatctcaactcactctcatgccactgtcagttgccatccctataaaatgaacggctccgttttattgcgctttccggcacgggcagctccgcagcggggcagggcagggcaggctgtggacgccgccgcacttgctctgcgaactgcgacggaccagccgatgcagccgtcttcctgaattgttgacgacttctcagatccaggtcctgggggtccgggccgtggaccactactccgcctctgtctcccaggcagatgaagcctcggcacgagcgcagcaggtccaccacgtccacgttcgtctcccaggtccaggtgcctacctctccgtctatgttactatttagacaagaacagagtgcacagtagtagctgtaaacgtgtcgacgtgacggactcatcgcagcagggtcaggacggtggcgacgccaacggcagcgcgacggaccaggaggtgatggcgcagccggaaaatggcgtccggccgccgctgctgcggacggacatggaggagccgccgcgggtgagcgacggaagcgccaccaaggagcgtgtgcggctcctggagcgggaggtggcgtcggcgaagcagagggagatgaagatgctggagtcgctggtccagcagaccaaggagctggagcaggccaagatcgcgctcgaggaggcctcgctcgaggtcgccacgctgcgtcagcagcagcagcagcagggcgagggcggcgccgctgctgagccggccgtgcaggcgcagcagtggagcgtcatggacctcatgttcggcggcgtcgacgaggagatcaacgggctgagggccaagctccgcgcggcgcagcaggccgaggagcggagccggaaggcggccgacgagctcgccgcggcgctgtccgcggtcaccgtggaggcgaagcaggtcaaggcgtggctctccggcgcgcaggccgaggtggaggccagcaacgccgaggccgacaggctccggggcctgctccagggcgccgaggcggagctgtggtctgccaccgagcaggtcggcgcgctcacgtccaactggaaggacgccgcggccgggtggcgcgccagggagaaggcacttgtggcgcgcgcgcgcgccgccgaggaggacgccgccgccgcgcggagggacaacgccggcctgcgccgcgcgctggagcaggcggtcgaggaggccaac

SEQ ID NO: 119209 - DNA, 1529 bp, Zea Mays
ccgcagcggggcagggcagggcaggctgtggacgccgccgcacttgctctgcgaactgcgacggaccagccgatgcagccgtcttcctgaattgttgacgacttctcagatccaggtcctgggggtccgggccgtggaccactactccgcctctgtctcccaggcagatgaagcctcggcacgagcgcagcaggtccaccacgtccacgttcgtctcccaggtccagcagggtcaggacggtggcgacgccaacggcagcgcgacggaccaggaggtgatggcgcagccggaaaatggcgtccggccgccgctgctgcggacggacatggaggagccgccgcgggtgagcgacggaagcgccaccaaggagcgtgtgcggctcctggagcgggaggtggcgtcggcgaagcagagggagatgaagatgctggagtcgctggtccagcagaccaaggagctggagcaggccaagatcgcgctcgaggaggcctcgctcgaggtcgccacgctgcgtcagcagcagcagcagcagggcgagggcggcgccgctgctgagccggccgtgcaggcgcagcagtggagcgtcatggacctcatgttcggcggcgtcgacgaggagatcaacgggctgagggccaagctccgcgcggcgcagcaggccgaggagcggagccggaaggcggccgacgagctcgccgcggcgctgtccgcggtcaccgtggaggcgaagcaggtcaaggcgtggctctccggcgcgcaggccgaggtggaggccagcaacgccgaggccgacaggctccggggcctgctccagggcgccgaggcggagctgtggtctgccaccgagcaggtcggcgcgctcacgtccaactggaaggacgccgcggccgggtggcgcgccagggagaaggcacttgtggcgcgcgcgcgcgccgccgaggaggacgccgccgccgcgcggagggacaacgccggcctgcgccgcgcgctggagcaggcggtcgaggaggccaacgcggccgccgaggcgctcgaggccgccggcgccgacaacgccggcctgcaggaggccgtcgcggagaaagagcgcgccctggaggccctgcgacgggacaacgagggcctcagggccagcgaggccgcggccagggcgcgcgccgaggagctccagggccagctcgcggcgaaagagcgggagattccgcttgtggagaagtggagacgcgaagacgcgcagggcaagctggtgagctccggaatgttcctgggatccgggcggctggtcccgggacggaaggaccggatgttcgcgtcgctgagcaacatcgcggagctcaagtcggcggcggcggccgcggcggccatggacgactacggctacgagttcgaccacctggacgtggggcagccctgcgacgacgccacggagcacaagatcaagaggcggtcgatcctgcgcaaggtcggagatctcttcaggaggaggaggagcccgaacctcgcgccggtgctgcatgaccactactag

SEQ ID NO: 119210 - DNA, 1526 bp, Zea Mays
ccgcagcggggcagggcagggcaggctgtggacgccgccgcacttgctctgcgaactgcgacggaccagccgatgcagccgtcttcctgaattgttgacgacttctcagatccaggtcctgggggtccgggccgtggaccactactccgcctctgtctcccaggcagatgaagcctcggcacgagcgcagcaggtccaccacgtccacgttcgtctcccaggtccagggtcaggacggtggcgacgccaacggcagcgcgacggaccaggaggtgatggcgcagccggaaaatggcgtccggccgccgctgctgcggacggacatggaggagccgccgcgggtgagcgacggaagcgccaccaaggagcgtgtgcggctcctggagcgggaggtggcgtcggcgaagcagagggagatgaagatgctggagtcgctggtccagcagaccaaggagctggagcaggccaagatcgcgctcgaggaggcctcgctcgaggtcgccacgctgcgtcagcagcagcagcagcagggcgagggcggcgccgctgctgagccggccgtgcaggcgcagcagtggagcgtcatggacctcatgttcggcggcgtcgacgaggagatcaacgggctgagggccaagctccgcgcggcgcagcaggccgaggagcggagccggaaggcggccgacgagctcgccgcggcgctgtccgcggtcaccgtggaggcgaagcaggtcaaggcgtggctctccggcgcgcaggccgaggtggaggccagcaacgccgaggccgacaggctccggggcctgctccagggcgccgaggcggagctgtggtctgccaccgagcaggtcggcgcgctcacgtccaactggaaggacgccgcggccgggtggcgcgccagggagaaggcacttgtggcgcgcgcgcgcgccgccgaggaggacgccgccgccgcgcggagggacaacgccggcctgcgccgcgcgctggagcaggcggtcgaggaggccaacgcggccgccgaggcgctcgaggccgccggcgccgacaacgccggcctgcaggaggccgtcgcggagaaagagcgcgccctggaggccctgcgacgggacaacgagggcctcagggccagcgaggccgcggccagggcgcgcgccgaggagctccagggccagctcgcggcgaaagagcgggagattccgcttgtggagaagtggagacgcgaagacgcgcagggcaagctggtgagctccggaatgttcctgggatccgggcggctggtcccgggacggaaggaccggatgttcgcgtcgctgagcaacatcgcggagctcaagtcggcggcggcggccgcggcggccatggacgactacggctacgagttcgaccacctggacgtggggcagccctgcgacgacgccacggagcacaagatcaagaggcggtcgatcctgcgcaaggtcggagatctcttcaggaggaggaggagcccgaacctcgcgccggtgctgcatgaccactactag

SEQ ID NO: 119211 - DNA, 1032 bp, Zea Mays
atgatggttgggttcacggggaagaggaatgagatggagcaagcgtcccgctgcaaagagccacagactgctgagtcggtgcgggagatgccaaatgttttaattcttccgcggagtgcagactacagtaaagaagtgtggatggaaataagagagaaagcaataactatgttacagtcctttttcttcgatggtgttcttccaagtagtgcaatttctgatgaagatgaggaaataagtgaagctaaaaatgaagatgactatctaggcccacaggcaaaggatagccagtcacagatttttgatgctgaaatagatgaaagccacataacgctggagtctgaaaagaaaagagccatatcccaccataaagagcctcaggcgtctggaaagtctgtaaacattggctcccgatctgaagggaggcgtagtcgttctggaaagaaagggaaaaagaggcctgcccatcgcagacctcaacagaaaccagatgacttatctgatgttgaatctatctttaaatgcttcaaaattatcttgaatagtataaactcaatgggtgaggagggtgagagttctgggggtggtgaagtaccctcagtgtcaccactaccacaatcacctgtgacccctcaaaattcaagaactcaagctatactttcaggatcacaagcacaaaatccaggctcagtttcagatactagttacaattcacagccatctagttcagaaagttcaggaattgaaatggatttgaccttctcgtacctggggtttttctctggcggcgctcgctccactacgctgaccgcgcccagaagcccgactcgccgcccaggatccaacactcgacctaaacagggagcaggggcgcacctcagcgcacgaacaagagcggggcagaggcgggggcgtggcggagcttgggcgctcgacctaaacagcgagcaggggcgcacctcggcgcggcggcacagaccgctcgacggacgtctgaacgtggcgccagggaggagctcggcgatgctgtaa

SEQ ID NO: 119212 - DNA, 1479 bp, Zea Mays
aaatccgaaccaaccaatcccaatatccgcaggcctccctctgcactggaccacaccacaccctcgcctttcccgcaacccagagcccctctgccaatctctgcacaacatcatcgattccccaggcgaaaaaaaatactctggaccctttttttcaatcagattttcaatcagaggagggtagattggatttgtcagattatccgatctccactgcagcctctctgaagagaagaggcccatccagtccagcctttccgcagttcctggagcaatcctggctcagtgcgtgaagcagcttgattcgcctgcgcaactgatagtcatagaagggagccaagagcttgttcttggctgcttgaccgattcttgattgagctgctgcggatcttgccaaagggccaagagcttgctgtgtctggaattcttggtcagccgtgccggatagggtgagggtgccatgacagcatcgcagtcctcgatgagcggcggcggggagccgggggtgcggacggtggtctggttcaggcgagacctgcgtgtggaggacaacccggcgctggcggcggccgctcggacggccggggaggtcgtgccggcgtacgtgtggtcgccagaggaggacgggccctactaccccggcagggtgtcccggtggtggctcagccaaagcctgaagcacctcgacgcctcgctccgccggctcggcgcctgccgcctcgtcacccgccgctccagcgacgctgtcgtcgcgctgatcgacctagtccgcagcaccggcgccacccacctctttttcaaccgactctacgacccgctatcgctggtccgggaccaccgcgtgaaggagcagctgtcggcggagggcatcactgtgcagtccttcaacgccgatctgctgtacgagccgtgggaggtcctcgacgacgacggcttccccttcaccatgttcgcgccattctggaacaggtgcctgtgcatgccggaccctgccgcaccactgctgccgcccaagaggatcaattcaggtatccaaatgcatttgcctacagagttctaatggccacactggatgacgtgaaaaatgctgagctccacaggtgacctgtcgaggtgtccgtgggacgagctcatctttgaagacgagtccgagaagggcagcaatgcgctgctcgcacgagcgtggtcaccagggtggcagaacgctgacaaggcgctaacggccttcctcgacggtccgctggtcgactactccgcgaaccacaagaaggccgacagcgccagcacgtccctgctgtctccgtacctgcacttcggcgagctcagcgtccgcaaggtcttccaccaggtgcggatgaagcagctgatgtggagcaacgacggcgaccgcgccggcgaggagagctgcacgctattcctccgcgccatcggcctgcgggagtactcgaggtacctcaccttcaaccacccctgcagcct

SEQ ID NO: 119213 - DNA, 3000 bp, Zea Mays
aaatccgaaccaaccaatcccaatatccgcaggcctccctctgcactggaccacaccacaccctcgcctttcccgcaacccagagcccctctgccaatctctgcacaacatcatcgattccccaggcgaaaaaaaatactctggaccctttttttcaatcagattttcaatcagaggagggtagattggatttgtcagattatccgatctccactgcagcctctctgaagagaagaggcccatccagtccagcctttccgcagttcctggagcaatcctggctcagtgcgtgaagcagcttgattcgcctgcgcaactgatagtcatagaagggagccaagagcttgttcttggctgcttgaccgattcttgattgagctgctgcggatcttgccaaagggccaagagcttgctgtgtctggaattcttggtcagccgtgccggatagggtgagggtgccatgacagcatcgcagtcctcgatgagcggcggcggggagccgggggtgcggacggtggtctggttcaggcgagacctgcgtgtggaggacaacccggcgctggcggcggccgctcggacggccggggaggtcgtgccggcgtacgtgtggtcgccagaggaggacgggccctactaccccggcagggtgtcccggtggtggctcagccaaagcctgaagcacctcgacgcctcgctccgccggctcggcgcctgccgcctcgtcacccgccgctccagcgacgctgtcgtcgcgctgatcgacctagtccgcagcaccggcgccacccacctctttttcaaccgactctacgacccgctatcgctggtccgggaccaccgcgtgaaggagcagctgtcggcggagggcatcactgtgcagtccttcaacgccgatctgctgtacgagccgtgggaggtcctcgacgacgacggcttccccttcaccatgttcgcgccattctggaacaggtgcctgtgcatgccggaccctgccgcaccactgctgccgcccaagaggatcaattcaggtgacctgtcgaggtgtccgtgggacgagctcatctttgaagacgagtccgagaagggcagcaatgcgctgctcgcacgagcgtggtcaccagggtggcagaacgctgacaaggcgctaacggccttcctcgacggtccgctggtcgactactccgcgaaccacaagaaggccgacagcgccagcacgtccctgctgtctccgtacctgcacttcggcgagctcagcgtccgcaaggtcttccaccaggtgcggatgaagcagctgatgtggagcaacgacggcgaccgcgccggcgaggagagctgcacgctattcctccgcgccatcggcctgcgggagtactcgaggtacctcaccttcaaccacccctgcagccttgagaagccccttctgtcgcacctcaggttcttcccctgggtcgtcgatgaggtgcacttcaaggtctggagacaagggaggactggctaccctcttgtcgacgctggcatgagggagctctgggccaccggctgggttcacgaccggatacgtgtcgttgtctctagcttcttcgtcaaggtgctccagctgccatggcgctggggcatgaagtacttctgggacaccttgctggatgctgaccttgagagtgacgcactaggctggcagtacatttctgggtctctccctgatggccgtgagcttgaccgcattgacaaccctcagtttgaagggtacaagtttgatccgcacggggagtacgtacggcgatggctaccggagctggcgaggctgccgacggaatggatacaccacccctgggatgcacctgagtctgtgcttcaggctgcaggagtcgagctaggctccaactacccacgccccattgtggagttagatgcagccaattccaggttgcagggtgccctgtcagagatgtgggagcttgaggcagcctcttgtgctgccatcgagaacgggatggaagaaggcctcggcgattccacagatgagccgccgatcgacttccctcaagaattacggatggaagtggaccgacaaccagctcaacctgctatcatccacacgccggtagtggctggttggagacgagaagaccagagggtgcctagcatgacttcctcgttaattagagctgagaccgaactcactgcagactttggcaacaccagtgaggacagtaggccagaagtgccgtcaaacattcatctgcaggctcgggcggagagggaagaaacagttgacggtgccactggcaatactgtcagggtgaatggcaaccaacagcagcagaatcttcagaacaacatgcaccgcgtgctaggtatcgctccatcaatttcagaggcatcgagcagctggacgggtagggaaggtggattggtaccggtctggtcacctccggcagcttcagtacattctgatccatatactgccgacgaggctgacatttcgagtaggagttatttggacaggcatcagcaatcaaatacgatgatgaactggagtcaactctctcagtcattgacaacaggatgggaagtggataattagtgctgtgtgaccggatttaattgattaggagttcggcagagagaattatattatacatatgtaaattatcacattttgttcgtctatatagccttggtgtgcatgcaagtcatcgaacatgcagcttcttggatgcaataattgttgtgaacctagttgtgtagaaccttgtggtttaggttgctaggtgcccacaagatatgtattattcgtcagataagagttttctagcatcaggttcattttgtatctggttattgtcatattgcagttcttggtgatgggatagtcaacacaggtgtattctcagttttatagacagcacttaccttttatctgtgacaacgaggactcaaagggaacatcttggcagtgagattgtgtgccactcttaccttctgctcctttgcctcaat

SEQ ID NO: 119214 - DNA, 84 bp, Zea Mays
gcatcagtttattcactagctagtagtagcagcgatgcagacatgccttctttgctgtcgcattcttgcccttgcataatttct

SEQ ID NO: 119215 - DNA, 808 bp, Zea Mays
cattttttccggtcatcgcgtggaagaggaaaaagtaaaagggtgtggacttattttgaggatgaagcattggtgaaggcactctatgagctatcccttgatccaaagtggaaaagtgagggtagtttcaagaatggttatctatctgtcctagaagttacacttgctgaaaaaattccaggttgtggcctcacttcaattccacatattgagtctagggtcagacactttagaacaaagtatggtgcaattgaggttatgctagcaaatagtgggttttcttgggatgagaacaggaagatggtacaatgtgagaagcaacaatatgaggaccattgtaagagatatcctgatgcaaagagatgaccatgctttttgcacttccagagactctaaggagggagttcatactacatatgatccaattcatgttctcgttgaggacctgttagttacaaccaaggaggttcaacaggaacaaaagattccagaggaatgtggtggttatcagcctatgatgaatcaacctcaactatgagataatgacagtattgtgattctgaatttggaaatatatgctgtgaccgacctttgaccccagcgtttttggctggagccttttcactgctagatgcctggattccccatgcttgagcgatgctgaaagttctgccatggtaccattgtttatgtagttgtgatttggatttttttgtttggggggggcggtgcggagcttaagtgcatagtgtgaaacggtgtagtcaattgtcaaacaactgcataaaggcaaggaagaaacacaaac

SEQ ID NO: 119216 - DNA, 1410 bp, Zea Mays
atgcagtcgttcctgaaggccttcttccccgacatcttggagaagatgaacgccgcgacgcaggacgagtactgcatcttcgacagccagctgctcaccacgtttgtgtcgtcgctgtacctcgccggcatgttcgcgtgcctagtggccggccacatcacgaagaagatcgggcggcggaactcgatgctgatcggggcgtcgctcttcttcgtgggctccgtcctcaactgcaccgccgtgaacgtggccatgctcgtcatcggccgcgttttcctgggcttcgccgtggggttcacgaaccagtccgcgccggtgtacctggcggagatcgcgccggcgcggtggcgcggggccttcaccagcatcttccacttcttcctgaacgtgggcatgttcgtggcggacctggtgaactaccgcgccaacaccatcgccgtgtggggctggcgcctgtccctgggcgtgggcatcgtcccggccaccgtcatcctggtgggcgcggcgttcatcccggactcgcccaacagcctggtgctgcgggggaagacggacgccgcgcgcgcgtcgctgcagcgcatccgcgggcggtccgctgacgtgggcgtggagctcagggacatcgtgcaggccgcggaggaggaccggcggcacgagtccggcgcgttccggcgcatcgtgcgccgcgagtaccggccgcacctggtgatggccgtcgccatcccgctcttcttcgagctgacgggcatgatcgtggtgacgctgttcacgccgctgctgttctacaccatcgggttcacgagccagaaggcgatcctggggtccatcatcaccgacgtggtgagcctggtgtccatcgccgtcgccgcggtggccgtggaccgggtcgggcggcggtcgctgttcatggtgggcgggggcatcctgctggcgtgcctggtggccatggcgtggatcttcggcgctgaactgggcaccaacggcgagaaggcgatgtcgcggccgtacgccgtggcggtggtggcggtggtgtgcctgttcacggccggcttcggcgtctcgtggggcccgctcaagtggatcatccccagcgagatctacccgctggaggtgaggtcagcggggcaggcgatgagcgaggccatctcgctggcgctcaccttcgcgcagacgcagtccttcctcaacatgctctgcagcttcaagtacggcagctttgcgtacaacgcgggctgggtggtggtcatgaccgtgttcatcttcttcttcctgccggagaccaagggcgtgcccatcgagtcactccgcgaggtgtgggcgcgccactggtactggaagcgcttcgtcaagccgctgccgacgccgccgccgccgtcgtcagcgtccaaagtggtggatgggccggtttga

SEQ ID NO: 119217 - DNA, 1326 bp, Zea Mays
atggagcacgacatgaccgccaccgcaggcgaggaagcattggaggtggagcgggaggagttgagcgactccgagtcgggctgcgagtccatcgagatctccgacctgaagcgccgcatgtggaaggaccagatgctgctcagcaagctagagggccgcgcgggcggcttcgtcgtcggggcgggcccgtcgtcgtccaggccgcttgcgccaccgacggcagcgggcgcgggcggggacgaggagacccccgaggtgcggtgccggcgcaaggcgatgctgcgcgcgcaggacggcgtcctccgccacatgctcaagatgatggaggcctgcaacgcgcgcgggttcgtgtacggcatcatcgacgaggccggcgaccccatgtccggatcctccgacagcctccgcggctggtggaaggacaacgtcagcttcgaccggtctggccccatggcggtcacggcgcccaccggggagagcccgctgggggccgcgtcctgcctccaccgcctccaggacatccaggacagcacgctggggtgcgtgctctcggcgctcatccagcactgcgtgccgccgcagaggagcttcccgctggaccgcgggctggcgccgccctggtggcccacgggggacgaggcctggtggggctcccagggcgaggtccaggcgcaccagggcgtgccgccgtaccggaagccgcacgacctcaagaaggcgtggaagatcagcctgctcagcgccgtcatcaagcacatgagcccgcgcttcgaccagatgcgcaagctcgtgtggcagtccaagcgcctgcagcacaagatgagcgccaaggagacggagacgtggtccaagatcctgcgccaggaggagacgctcggccgccgcctcaagagctcgctcaagatcacgcccctcgacggcgatggtgacgaggaggaggaggaggaccgaggcctagacggcctggagcacgtggtccgcggcgtgcaggacaagcgcaagcgagagctcatcagtacaggaggtaacagcggacagagcagcagcagcagcagagaggtcggggagctggtggccggcctcgtggcggatgaggacgaccttatttgcccgatcgacgagctcctgaagcgttactacagctgcgtgcctgctggtcagcacgacagcgtcgtcgcgccggagaacgaagcaggcatcatgacgatgcctctcggagagctcgacctgtgcggcgtcgtcgacgacgtgccggcagacgtgctgttcgatctcatcgcgagctgctcgggaggggacgacgcgttccgcctgatggaggactga

SEQ ID NO: 119218 - DNA, 1371 bp, Zea Mays
atgggctccattctaagtgctactagtactacggctaagtctatggatcagcatgaggcatctggaacagatcctaataagagggtgaagatatctacttatgagtatgggtcaaacccaaggataattccaactcttcctgatgagctctcactccagatcctggcaaggtcaccacggatccattaccttaacttgaagctggtttgccgagcctggaaggcagcaatcatcggctatgaactttcccagctgaggagagagcttggtgtaagtgaggaatgggtgtatgtactgaccaaggctgaggcatacaagctccattggtatgccctggatccagtgtttcagaaatggcagaggttgccaccgatgccttctttcgtcaatcaggaggaatccaatcggacagcatcttcggcgttctggatgtggaatgttgtgggatcaagcattaggattgctgattacgtgaggggcttattttggcgcaggaacagtttggaccagatgcccttttgcggttgttcagtgggtgttgctgatggttacttgtatgtcattggcggtttttccaaagctgttgccctgaatcgcgtttgtagatacgacccttttctcaatttgtggcaggaagtgagcccaatgatgactgggcgggctttctgcaaggcggcatttttgaatggcaagttatatgtagttggtggagtcagcaggggtcggaatggcttgcttcccctgcgttcagctgaggcgttcgaccctaaaactggattgtggagcgacctaccagaaatgcctttcgcaagagcgcaggtactccccactgctttcttggtcgatgtgctgaagcctatcgccacaggaatggcaccctacaagggaaagctgtatgtccctcagagcctgtactcatggccattcttttttgacattggaggtgagatctacgacccagatctgaatgcctggtcaacgatgccggatggtctcggcgatggatggccagccagacaggcaggcacaaagttgggtgttgtgatcgatgacagactttacacgctagagccttccagctctttggacagtggtaagataaaaagatacgactccgaggaggacgcatgggtaactatcaccccacaagttccagttaatgatttcactggtgcagaggccccttatttactcgctggcctcggtggaaggctccatgttataacaaaggcggcgaacaacactcttcaagttatgcaggctgtggtgcagaataactcggtatctgaagaaaatgtggtatggacaacagtggcttctaggaactttgggacggctgagcttgtcagctgccaggttctagatgtttaa

SEQ ID NO: 119219 - DNA, 273 bp, Zea Mays
atgtctcacgtccctgccgcgcccaggacacaccggcacgacggcaagaaagggcggcggcaggaggagcagcagcggcgaaaggctgtcgttgtcggaaacgccggtggcctcgtcagcccggctggctcgtcccgctacttgctgagcgaccgcttcgccgccaccgaggagatccaggaggtggagtctgccccggccgtcgacgtcaagcccaagcgggaggaagtaggtgaagctgctgatgcgaagagcgcgcaggcgcaagagtag

SEQ ID NO: 119220 - DNA, 726 bp, Zea Mays
atgggggtggagtggtacttctactgcctccgcgaccgcaagtacccggtggtcctgtgcaccaaccgcgccacggcggtcggctactggaagatcaccggcaaggactgtgaggtccatagcggccgcagcggcgcgacggctgaacaacgcactattcgaagtatacttgatcggggcaagacaacaactacattgggaaaagtaaataatgataacctcagcaggcttctcacagagtacattggaatggataatatgcttgctcttgtttgcaagacttatgatggtgttaagggtcttgataaatacgacaaggatgacatcattgataagaccagtggcgttcatggacttggtcgcgctgttggaaaatttctgtatggaagaattactgtcttttgtcttgaaaacttgagcaagaatcttaaagtgaaatttgttgtaaccactgatgtttcaagtttacctgaaaatgtcgttgaaatggaggaacaagttaaacgtaagaattggcagaaggaaatggttcttgaagatatgaaaagggaggaagatctgctgaaacaagttaaggaattatacagaaagcagaagcaagagctcatggattatgtcactcaaccagcagtgacacagacgtcacgtgattcgccagcaactcattcacccgcaactcctgggagtaatccgtttggagccaagctctccaacaagtggtggtaa

SEQ ID NO: 119221 - DNA, 2857 bp, Zea Mays
gctactccgtcaccgtcagcccgacgccccgccagaccaccctcttctgcctctccataataaaatctccctccctcctctcttctctctctctccttctctgcgctcgtgtaattctcttcagctgggatgcaagaccaggttttggccactggaatctctctctgcgtctccgacgaagcatatttttttgcatgatctgtacaagcatccccatgtaagacgatttcatagttttcggggatgccaacaagttttggctcaagtgaaccgattctcatggccctggtgttattttgcgcggctattggagtcagctgtatcgtcgagtcaactgaatcgctcttcctattgtcttagaaaatttgctcaaagtactgcagtctgaagaattcagtggcaccacctctgcttcttattgatgataaactgtcagtgaacataagtcaccatctcctggatcacagtttttgtactggagcaagacagtaatggaccgggcagacacatctggctttgttagcggtggatcagatggtacttcactgctgctgatattctttcacttcgtctactcgactctgcacgtataagagatcagtaaaccaccttcactgtatttttcaagtacgtagcctagatgaataccatggatgattctgcagtgtcaattggtttctcggtgacgaactacacaacaggtagccatggtcagagtcaggtaacattaggcatagaccagctgggttcagcagtgaacaatagcagcggccatggccgcagaggttttcagaggtcgattcatgcgcctgctcaagatgatggatgcaggctagtcctcggactgggtccgacgcccgccccagacgttaactcttgtgattgtgatcagcagcctgccggagcagacaagtcgagaccacctgtaactttgtttggccagagcttctccttcgctgatccaggggcgctcagccttggaattcatcgggggcgtgataatgctggagcaactaaacacttgggcgtgcccgtgcctgccggaaccgtcatctccttttccactgttgacgagggctccacgtctgccaggagaagctccggcggctacatgccattgctgctcttggcgcctctgccaaactattcgacagctgaagaggagcagggtttgctagatgacacggacaacagtaataatggtggcactgatccccgcggttttcggttcagccctgaaccttcggcatccatgacggaagcttcctttggtggcgcgagctctgatgttgtgacggtggcaagcaatcctggacagcagactcaacgccggcatcccaagaagtgcaggttcaaagggtgctccaagggcgcgcgaggcgcgtcgggcctgtgcatcgctcacggtggcgggcagaggtgccagaagcccgggtgctacaagggcgccgagagccgcacggcctactgcaaggcccacggcgggggacgccggtgcctgcagctcggctgcaccaagagcgccgaagggaagacggatcactgcatcgcccatggcggcggccgacggtgcggctaccttgactgccctaaagccgcgcggggcaagtccgggcggtgcatcaagcacggcggcgggaagaggtgctcggtcgagggttgcatcaggagcgccgaggggagggtggggctgtgcatctcccacggcggcgggcggcggtgccagttcccggactgccgcaaaggagcccagggcagcaccctgtactgcaagtcgcacggcggcgggaagcggtgcgtcttcgaggggtgcggcaagggggccgaaggcagcacgccgctgtgcaaggcgcacggcggcgggaagcggtgcatgtacgagggcggcggcgtgtgccccaagagcgtccacggcggcacggacttctgcgtggcgcacggcggcgggaagcggtgcgcggtgcctgagtgcagcaagagcgcgcgcgggcgcacggactgttgcgtgaagcacggcggtggcaagcggtgcagggtggatgggtgcggcaagagcgcacaggggagcaccgagtactgcaaggcccacggcggcgggaagcgctgcaacttcggaggcgtctgcgagaagttcgcgcgcggccggagcgggctctgcgcggcgcacggcacgctggtggcctcgcggcagcgccgcagcggcggcggtggcatgattgggccaggcctcttccgcggcatcgttcggtccgccagcgcggcgaacatgtatagcgagtactcgtcgtcgggcgtgagcacggtgtcggactgcgacggctcgcctgaggcggcgacagggaggcatgagttgatccctccccaggtgctggtcccccactctatgaaatctttgacagcggcagccgtgcagccaccggcgaggagcagagagggaggggtggtcgctgtccccgaggggagggtgcacggcggtggtctgctgtcgttgcttggcgggagcttcaggaacgtcgacgtcgacaagctctgaaaatctgaagcaggctgcagcaggcagcgcttgaggctcgaattctacttctacgcctacgcctctttttcttaaaaaaggacggaagatcttccttttttccagtcatagctgtcagattattgtctgtgtataaaaatgtttcttgtctgcagatcgatcttatatggtaaaatttagattaatttcgtttcccttgtgtcaacataataagggtgaagacatgaatttgtcggggcttgtatatggttgaattattcgtagcagatccgaaaagcttcccacggcatcctgtacttgtcgtgaataagatcaatgtgtaac

SEQ ID NO: 119222 - DNA, 2812 bp, Zea Mays
gctactccgtcaccgtcagcccgacgccccgccagaccaccctcttctgcctctccataataaaatctccctccctcctctcttctctctctctccttctctgcgctcgtgtaattctcttcagctgggatgcaagcatatttttttgcatgatctgtacaagcatccccatgtaagacgatttcatagttttcggggatgccaacaagttttggctcaagtgaaccgattctcatggccctggtgttattttgcgcggctattggagtcagctgtatcgtcgagtcaactgaatcgctcttcctattgtcttagaaaatttgctcaaagtactgcagtctgaagaattcagtggcaccacctctgcttcttattgatgataaactgtcagtgaacataagtcaccatctcctggatcacagtttttgtactggagcaagacagtaatggaccgggcagacacatctggctttgttagcggtggatcagatggtacttcactgctgctgatattctttcacttcgtctactcgactctgcacgtataagagatcagtaaaccaccttcactgtatttttcaagtacgtagcctagatgaataccatggatgattctgcagtgtcaattggtttctcggtgacgaactacacaacaggtagccatggtcagagtcaggtaacattaggcatagaccagctgggttcagcagtgaacaatagcagcggccatggccgcagaggttttcagaggtcgattcatgcgcctgctcaagatgatggatgcaggctagtcctcggactgggtccgacgcccgccccagacgttaactcttgtgattgtgatcagcagcctgccggagcagacaagtcgagaccacctgtaactttgtttggccagagcttctccttcgctgatccaggggcgctcagccttggaattcatcgggggcgtgataatgctggagcaactaaacacttgggcgtgcccgtgcctgccggaaccgtcatctccttttccactgttgacgagggctccacgtctgccaggagaagctccggcggctacatgccattgctgctcttggcgcctctgccaaactattcgacagctgaagaggagcagggtttgctagatgacacggacaacagtaataatggtggcactgatccccgcggttttcggttcagccctgaaccttcggcatccatgacggaagcttcctttggtggcgcgagctctgatgttgtgacggtggcaagcaatcctggacagcagactcaacgccggcatcccaagaagtgcaggttcaaagggtgctccaagggcgcgcgaggcgcgtcgggcctgtgcatcgctcacggtggcgggcagaggtgccagaagcccgggtgctacaagggcgccgagagccgcacggcctactgcaaggcccacggcgggggacgccggtgcctgcagctcggctgcaccaagagcgccgaagggaagacggatcactgcatcgcccatggcggcggccgacggtgcggctaccttgactgccctaaagccgcgcggggcaagtccgggcggtgcatcaagcacggcggcgggaagaggtgctcggtcgagggttgcatcaggagcgccgaggggagggtggggctgtgcatctcccacggcggcgggcggcggtgccagttcccggactgccgcaaaggagcccagggcagcaccctgtactgcaagtcgcacggcggcgggaagcggtgcgtcttcgaggggtgcggcaagggggccgaaggcagcacgccgctgtgcaaggcgcacggcggcgggaagcggtgcatgtacgagggcggcggcgtgtgccccaagagcgtccacggcggcacggacttctgcgtggcgcacggcggcgggaagcggtgcgcggtgcctgagtgcagcaagagcgcgcgcgggcgcacggactgttgcgtgaagcacggcggtggcaagcggtgcagggtggatgggtgcggcaagagcgcacaggggagcaccgagtactgcaaggcccacggcggcgggaagcgctgcaacttcggaggcgtctgcgagaagttcgcgcgcggccggagcgggctctgcgcggcgcacggcacgctggtggcctcgcggcagcgccgcagcggcggcggtggcatgattgggccaggcctcttccgcggcatcgttcggtccgccagcgcggcgaacatgtatagcgagtactcgtcgtcgggcgtgagcacggtgtcggactgcgacggctcgcctgaggcggcgacagggaggcatgagttgatccctccccaggtgctggtcccccactctatgaaatctttgacagcggcagccgtgcagccaccggcgaggagcagagagggaggggtggtcgctgtccccgaggggagggtgcacggcggtggtctgctgtcgttgcttggcgggagcttcaggaacgtcgacgtcgacaagctctgaaaatctgaagcaggctgcagcaggcagcgcttgaggctcgaattctacttctacgcctacgcctctttttcttaaaaaaggacggaagatcttccttttttccagtcatagctgtcagattattgtctgtgtataaaaatgtttcttgtctgcagatcgatcttatatggtaaaatttagattaatttcgtttcccttgtgtcaacataataagggtgaagacatgaatttgtcggggcttgtatatggttgaattattcgtagcagatccgaaaagcttcccacggcatcctgtacttgtcgtgaataagatcaatgtgtaac

SEQ ID NO: 119223 - DNA, 2663 bp, Zea Mays
gctactccgtcaccgtcagcccgacgccccgccagaccaccctcttctgcctctccataataaaatctccctccctcctctcttctctctctctccttctctgcgctcgtgtaattctcttcagctgggatgcaagaccaggttttggccactggaatctctctctgcgtctccgacgaagtactgcagtctgaagaattcagtggcaccacctctgcttcttattgatgataaactgtcagtgaacataagtcaccatctcctggatcacagtttttgtactggagcaagacagtaatggaccgggcagacacatctggctttgttagcggtggatcagatggtacttcactgctgctgatattctttcacttcgtctactcgactctgcacgtataagagatcagtaaaccaccttcactgtatttttcaagtacgtagcctagatgaataccatggatgattctgcagtgtcaattggtttctcggtgacgaactacacaacaggtagccatggtcagagtcaggtaacattaggcatagaccagctgggttcagcagtgaacaatagcagcggccatggccgcagaggttttcagaggtcgattcatgcgcctgctcaagatgatggatgcaggctagtcctcggactgggtccgacgcccgccccagacgttaactcttgtgattgtgatcagcagcctgccggagcagacaagtcgagaccacctgtaactttgtttggccagagcttctccttcgctgatccaggggcgctcagccttggaattcatcgggggcgtgataatgctggagcaactaaacacttgggcgtgcccgtgcctgccggaaccgtcatctccttttccactgttgacgagggctccacgtctgccaggagaagctccggcggctacatgccattgctgctcttggcgcctctgccaaactattcgacagctgaagaggagcagggtttgctagatgacacggacaacagtaataatggtggcactgatccccgcggttttcggttcagccctgaaccttcggcatccatgacggaagcttcctttggtggcgcgagctctgatgttgtgacggtggcaagcaatcctggacagcagactcaacgccggcatcccaagaagtgcaggttcaaagggtgctccaagggcgcgcgaggcgcgtcgggcctgtgcatcgctcacggtggcgggcagaggtgccagaagcccgggtgctacaagggcgccgagagccgcacggcctactgcaaggcccacggcgggggacgccggtgcctgcagctcggctgcaccaagagcgccgaagggaagacggatcactgcatcgcccatggcggcggccgacggtgcggctaccttgactgccctaaagccgcgcggggcaagtccgggcggtgcatcaagcacggcggcgggaagaggtgctcggtcgagggttgcatcaggagcgccgaggggagggtggggctgtgcatctcccacggcggcgggcggcggtgccagttcccggactgccgcaaaggagcccagggcagcaccctgtactgcaagtcgcacggcggcgggaagcggtgcgtcttcgaggggtgcggcaagggggccgaaggcagcacgccgctgtgcaaggcgcacggcggcgggaagcggtgcatgtacgagggcggcggcgtgtgccccaagagcgtccacggcggcacggacttctgcgtggcgcacggcggcgggaagcggtgcgcggtgcctgagtgcagcaagagcgcgcgcgggcgcacggactgttgcgtgaagcacggcggtggcaagcggtgcagggtggatgggtgcggcaagagcgcacaggggagcaccgagtactgcaaggcccacggcggcgggaagcgctgcaacttcggaggcgtctgcgagaagttcgcgcgcggccggagcgggctctgcgcggcgcacggcacgctggtggcctcgcggcagcgccgcagcggcggcggtggcatgattgggccaggcctcttccgcggcatcgttcggtccgccagcgcggcgaacatgtatagcgagtactcgtcgtcgggcgtgagcacggtgtcggactgcgacggctcgcctgaggcggcgacagggaggcatgagttgatccctccccaggtgctggtcccccactctatgaaatctttgacagcggcagccgtgcagccaccggcgaggagcagagagggaggggtggtcgctgtccccgaggggagggtgcacggcggtggtctgctgtcgttgcttggcgggagcttcaggaacgtcgacgtcgacaagctctgaaaatctgaagcaggctgcagcaggcagcgcttgaggctcgaattctacttctacgcctacgcctctttttcttaaaaaaggacggaagatcttccttttttccagtcatagctgtcagattattgtctgtgtataaaaatgtttcttgtctgcagatcgatcttatatggtaaaatttagattaatttcgtttcccttgtgtcaacataataagggtgaagacatgaatttgtcggggcttgtatatggttgaattattcgtagcagatccgaaaagcttcccacggcatcctgtacttgtcgtgaataagatcaatgtgtaac

SEQ ID NO: 119224 - DNA, 369 bp, Zea Mays
ttttctgttctgtctttatgtggttattctgatgctgattttgccagaatttttcacaaagaatcgaagatccattgccatatttacatgtcaatcaagacgtgcgtgagatctagggaagcgcccaaggaggtgcttgatttcaagaattaatccattctagatatggtagtccactaagggcttgttcggttattcccaatacatgtggattggatgagattgaaaaaaattgagaagaagtttgacttgtttgggattcaaactcatccaatcccactcaatccacatggatagagagctaaccgaacaagccctaatttggtggaataaactcattcctcttattattattaattattagtctat

SEQ ID NO: 119225 - DNA, 868 bp, Zea Mays
cctcggcgcacgttctgccgcgcgcatccgctcgcatcccgcaaccgccccgcaaccacccgcagccgcggcagcgccgcagccgctcctttcatcctccgcggatcccagcgctccctcccgcgctccctcccgcgcccgcccgcagccggcgtcggcgcaacggctgatgctcaaggggtgtgagtcactgctgcggcggcagtgccggccgcgcacccccgcggggtacatggagcccacgccgctgccggttggcggtgaagagcaaggggacagataagcccaaaggcagcaagggaaacgtcgacaaggaccccaacaaagcctgactcccaacacttttttgttcgctggtgctgcggcgacggtgctggcgagctctcccgtgctgggctctgggatgctcccaggcaccgggttcggcgagacgtggagtcaccacacggcggatgcgccgccgctgctgccttgcagttcctcggtcgattcaagggaatattgtcagtggaagagactggtgaatcaaaggcagtcaatgctagatggaggcgaagtgcctgctgcattggggcaccatgtttttggtgcgggttgttcctcacggaaccaacatatctacaaatatttttcatcttctcatcaagggagtatatgggccgggctcaaggttctacatgacctgccagggtaggtaaaaattgtggaagtagggccacgagatggtctatagaacgagaaggacattgtgccaacacctgtaaaggttgagcttatacgaagattggccacatctagattacctgttgtggaggcaacgagttttgtatctccaaaatgggtacctcaggcatgactgaggctgttt

SEQ ID NO: 119226 - DNA, 630 bp, Zea Mays
atggaacgctgcgcagaggcgagcaagaagctttgcgagctggagcagaagcgcgtcagagagggagcagagggaaccgccatggcgagcgcgcaatttgtggaggctgatcagggagcgcccaccaggggatccgccatgggaacgagcagaggtggaccatggacgtccacggccgggcgaacagggaagcttgagggagctcgacggccaggagaaaaatgccgagcagagagggactggggcgagcaggcacctgggcgcacgaccatgaacgagggggagcgcgggcctatcgagctgaggaagtaccacgcgcagggaaatgctccatgtcgaggggggctcagccggcagagggagaccgtcgtgcagaggaagaagatggccagcagaagaactctggcgcgcgcagggaggagccatggagaggggcgtcgcgagctggggcaaccaggaagaaacgccgggcatggaaatgggggccggagagagctacgcgcgggagttctagagaagaacagcggagggaggagatgggcactggcggcctggagaagaggagcaggggcgcgggtggccagggagaacgacgacgagatttgtaggaatccaggtgtggcagcttga

SEQ ID NO: 119227 - DNA, 100 bp, Zea Mays
atttagtctgtttgcatttcgatcagacacaaatcccagagcatcggatatttgtgtattcaattgtttcaggaaaggaaaatcttcttcattcctattc

SEQ ID NO: 119228 - DNA, 78 bp, Zea Mays
atatttataagatcaaacgccacaaatgatttgctttccgaaacagtggctgcaatatctcatctcctaactcatggc

SEQ ID NO: 119229 - DNA, 1404 bp, Zea Mays
ttttagcagcttcttggcgaccagcgtcgccaactcgccatgaacagcagctgctccgacagcggcagcaccagcgggcccagcgtccttatgtttgtatggctgtgcccctttcttttctgtcatacatgatagtgttacctttttgccaatcggagtttaaaacgttgggggtaatgtattagggcaatttttatctaactgttattctatatggtagcttctatagtgtgctatttattcaatattgtagtgtgcttattgcactccttatttatgcagttctactcatgcctagtttcataaaagttgggtactactatttcttttcaagacatgttattagaagtgtaatctatggagaacaaccaagaaataggttggatttgtacatacccaaagataatagcaaatcaagttcagtagtggcattcgtaactggtggagcttggatcattggttacaaggcttggggtgctctccttggaaggcggttagcagagagaggaattatagtagcttgtattgattacagaaatttccctcaaggaacaataagcgacatggtcagtgatgcttctgaggtgatatcattcatttgtaacaatgttgttagctttggaggggatcctaataaaatctacttgatgggtcaatcagcaggagcacatatcgtggcctgcgctctcttagagcaagcaattaaggaatctaagggagagaatacctattggaatgtggctcaaataaaagcatattttggtttatctggaggatacaatatccaaaatttggtcgatcactttcatcagtgtggtctttattgttcaatatttctcagcataatggagggagaggaatcactgccacattactcacctgaaaggtcactcaagcagatctaaagttattctttgagtccatatgtggtgaggttggttgttctttactccaaacacaatctcccttctgtacagctaaaagtttgcagaaatggcaccatcaagatcgatctggagaccaacaagatcatggacttcatcaagtttgatgtcggcaacgtggtcatggtgaccggtgggaggaacaccgggcgtgtaggagtgatcaagaacagggagaagcacaagggtagcttcgagaccatccatgtgctgcttggagctttttgctatgtctagttttctcctatttgttgtacaggaaaacatagaatggaattcaaatttggtggccgcaaaagtgtggagacttgaattcatataaagttaggcttaacattagtgcaaacagttatattttagtttagatttagagtacacttatgtatgcgttgtttgacaatgcttatttatgatatattgaatggtacttatttatattatattaattataatgttgttc

SEQ ID NO: 119230 - DNA, 851 bp, Zea Mays
gtgtgcgagctcacagtcacaaaagaaacgatgtccactggcgaactgacggctccgtcatgcggcgatcgataaaaatgccgcgaggccaccacgcgagacgaacgcaaacgaagtgcggaaaataggcctattttttcttcttcctcgtagagatatttcggaagagggaacgagggcttcgattcgatccaggagtcgcccaaatcgtcttgtcttcgacttcggacacgagatcctctagagggttgtgctgtttggcgtgaggctttgggggcgatttgctttgctcgcatgggggatcatgtcgctgtggatgttggggagctcgttgcgtcccgagtcggtgaggcagcggggctattgtccggcggcaaggaggaaatgaaggcgctggctgggatggtggagtgccgcatttgccaggaggaggacctcgcaaagaacctcgagagcccctgtgcttgcagcggcagcctcaagtatgctcacagggaatgtgtgcaacgttggtgcaatgagaaaggagatataatctgtgaaatctgccatgagtcgtacaagcctggttacactgccccaacccaggtgcatcatgatgaaactaccatagagataagtggtggagattggaccatctctggcaaccgtttggatttacatgatcccagaatattggcaatggctgctgctcaacaccgtttacttgaagacgagtacgatgaatatactgcaacaaacaataacgctgctgtgttttgccgctctatatttctgattgtgagttttgtggtttgtattatagaaatatgtattgttttacctctattatctgaaaaccataaaatgtg

SEQ ID NO: 119231 - DNA, 1279 bp, Zea Mays
gtgtgcgagctcacagtcacaaaagaaacgatgtccactggcgaactgacggctccgtcatgcggcgatcgataaaaatgccgcgaggccaccacgcgagacgaacgcaaacgaagtgcggaaaataggcctattttttcttcttcctcgtagagatatttcggaagagggagtgcgtgccttcctctcagctgattcgccgaggtacaagcccctgctaattcacaagcttgcatcataactcaaccttgcgttttgtggaatttatccagacgagggcttcgattcgatccaggagtcgcccaaatcgtcttgtcttcgacttcggttcaacccccgaaacgaaatttctagggttttagtgtcaattttgtcccccttcattacatttgattggcggtggattggttcccgttttgatgattccctgggttcgttggacggcaggacacgagatcctctagagggttgtgctgtttggcgtgaggctttgggggcgatttgctttgctcgcatgggggatcatgtcgctgtggatgttggggagctcgttgcgtcccgagtcggtgaggcagcggggctattgtccggcggcaaggaggaaatgaaggcgctggctgggatggtggagtgccgcatttgccaggaggaggacctcgcaaagaacctcgagagcccctgtgcttgcagcggcagcctcaagtatgctcacagggaatgtgtgcaacgttggtgcaatgagaaaggagatataatctgtgaaatctgccatgagtcgtacaagcctggttacactgccccaacccaggtgcatcatgatgaaactaccatagagataagtggtggagattggaccatctctggcaaccgtttggatttacatgatcccagaatattggcaatggctgctgctcaacaccgtttacttgaagacgagtacgatgaatatactgcaacaaacaataacgctgctgtgttttgccgctctatatttctgattttgatggcccttctgctcctgaggcatacattgaccattactaacagtgatgatgaagatgatgcatctgctattttctcgctatttcttttgagagccgctggatttttgctgccatgctatattatggcttgggctattagtatcatgcagcgtcaaagacaaagacaggaagaagcaatgctgttaccaacggaagtggcgatcattctgcacccggacggaagaacaatgcaatttgcggtggcaccagcggaatctcctgcatcacatcagtga

SEQ ID NO: 119232 - DNA, 1266 bp, Zea Mays
gtgtgcgagctcacagtcacaaaagaaacgatgtccactggcgaactgacggctccgtcatgcggcgatcgataaaaatgccgcgaggccaccacgcgagacgaacgcaaacgaagtgcggaaaataggcctattttttcttcttcctcgtagagatatttcggaagagggagtgcgtgccttcctctcagctgattcgccgaggacacgagatcctctagagggttgtgctgtttggcgtgaggctttgggggcgatttgctttgctcgcatgggggatcatgtcgctgtggatgttggggagctcgttgcgtcccgagtcggtgaggcagcggggctattgtccggcggcaaggaggaaatgaaggcgctggctgggatggtggagtgccgcatttgccaggaggaggacctcgcaaagaacctcgagagcccctgtgcttgcagcggcagcctcaagtatgctcacagggaatgtgtgcaacgttggtgcaatgagaaaggagatataatctgtgaaatctgccatgagtcgtacaagcctggttacactgccccaacccaggtgcatcatgatgaaactaccatagagataagtggtggagattggaccatctctggcaaccgtttggatttacatgatcccagaatattggcaatggctgctgctcaacaccgtttacttgaagacgagtacgatgaatatactgcaacaaacaataacgctgctgtgttttgccgctctatatttctgattttgatggcccttctgctcctgaggcatacattgaccattactaacagtgatgatgaagatgatgcatctgctattttctcgctatttcttttgagagccgctggatttttgctgccatgctatattatggcttgggctattagtatcatgcagcgtcaaagacaaagacaggaagaagcaatgctgttaccaacggaagtggcgatcattctgcacccggacggaagaacaatgcaatttgcggtggcaccagcggaatctcctgcatcacatcagtgacaggctcacaggcctgcctcggaatctcagcatctggtcttaaaggtggaaagacgaggacgttgtgcaattcatgttgtgccttcgaatttagttaactttcaagcggagattcaatgtttgttcgatgggctctcagcaccttctgtacataaagagatttatctaataactaataagtgaatataagttaaatcaacacaaagtttgattttgtattgtggtatata

SEQ ID NO: 119233 - DNA, 602 bp, Zea Mays
tggtggagattggaccatctctggcaaccgtttggatttacatgatcccagaatattggcaatggctgctgctcaacaccgtttacttgaagacgattgatggcccttctgctcctgaggcatacattgaccattactaacagtgatgatgaagatgatgcatctgctattttctcgctatttcttttgagagccgctggatttttgctgccatgctatattatggcttgggctattagtatcatgcagcgtcaaagacaaagacaggaagaagcaatgctgttaccaacggaagtggcgatcattctgcacccggacggaagaacaatgcaatttgcggtggcaccagcggaatctcctgcatcacatcagtgacaggctcacaggcctgcctcggaatctcagcatctggtcttaaaggtggaaagacgaggacgttgtgcaattcatgttgtgccttcgaatttagttaactttcaagcggagattcaatgtttgttcgatgggctctcagcaccttctgtacataaagagatttatctaataactaataagtgaatataagttaaatcaacacaaagtttgattttgtattgtggtat

SEQ ID NO: 119234 - DNA, 643 bp, Zea Mays
gcatggattgaatatatatattaacggagttaagcaaccttttttccccattggttgcacacatccttttctttagggatggctgcacacatatccttgtttgaactgaggagttggatcttgggatgatcgtatctgtcctttctgatcaaacatgagatttctaagttagagaaaattgagatcatttgttgtctgtttagtatttccgtagttttataccccattaagtgcgtgggctgggctacatagtctttgttcctaattgccataccagtgaagaacgcatggatggttcttgttcatttttgatatgtcaggaagaagcaatgctgttaccaacggaagtggcgatcattctgcacccggacggaagaacaatgcaatttgcggtggcaccagcggaatctcctgcatcacatcagtgacaggctcacaggcctgcctcggaatctcagcatctggtcttaaaggtggaaagacgaggacgttgtgcaattcatgttgtgccttcgaatttagttaactttcaagcggagattcaatgtttgttcgatgggctctcagcaccttctgtacataaagagatttatctaataactaataagtgaatataagttaaatcaacacaaagtttgatttt

SEQ ID NO: 119235 - DNA, 1261 bp, Zea Mays
cttaacaactccactcccgcggaaaaaaaacccatatccctccggcataaacccaaaaagccaggcagcaggagatggagcacgacgtgcaccaccagcaccagcaggccatggagctgccgccggggttccgattccaccccaccgacgaggagctcatcacgcactacctcgccaggaaggccgccgacgcccgcttcgccccgcgcgccgtcggcgaggccgacctcaacaagtgcgagccatgggacctgccatcccgggcgacgatgggcgagaaggagtggtacttcttctgcgtcaaggaccgcaagtacccgacggggctgaggacgaaccgggccaccgagtccggatactggaaggcgacgggcaaggacagggagatcttcaggagcaaggccctcgtcggcatgaagaagacgctcgtcttctacacggggagggcgcccaggggaggcaagaccggctgggtcatgcacgagtaccgcctccacggcaagcacgccagcagcagccgcctcatgccgtcgtcggtcagagctggcgcgtcaaaggacgagtgggtgctgtgcagggtgttcaagaagagcatcgagccgccgccgtcagtgggcaagaggtcgtcggtcgcgtgcacggggacgatggtggtggaggacgtcgtgggaccgccgtccatgtccatggaggacgacctcaccgcgtgcgcgctgcctccgctgatggacgtgtccggcggtggcggcgccaacatggcggcggcgtccatcgagctgctggcgccaccggcaccacacgtgacctgcttctccaacgcgctggagggccagttcttcctgaacccaccctgcctccacccctccacgtcgccgctccgcctggcgagcatggtgcaggcgcaggcgcaggcgcagtacgacggcgacgcgggcatggtgctccagctcctgcaggaggccggcgggtggtacagcaagctgggcgagggggagcggctgagcggcggcgcgtcgcaggacaccggcgtcacctcggaggtgaacgtgaaccccgccgagatctcctcgacgcggcaccacataatggaccccgaggcggcctccttctggggcttctgaacttccccccacatctttttttttccgcgatcgctaaaaattggattagaattagtcactggattggaaactgggattgtaattgtgccgttgaatattactatatgcaaaatggggcaaaaaaaaaacaaaaagttgtg

SEQ ID NO: 119236 - DNA, 1313 bp, Zea Mays
cttaacaactccactcccgcggaaaaaaaacccatatccctccggcataaacccaaaaagctgcaagcagtgtgaccaaaagcaggcctgacggcgatcctcggctctctagccaggcagcaggagatggagcacgacgtgcaccaccagcaccagcaggccatggagctgccgccggggttccgattccaccccaccgacgaggagctcatcacgcactacctcgccaggaaggccgccgacgcccgcttcgccccgcgcgccgtcggcgaggccgacctcaacaagtgcgagccatgggacctgccatcccgggcgacgatgggcgagaaggagtggtacttcttctgcgtcaaggaccgcaagtacccgacggggctgaggacgaaccgggccaccgagtccggatactggaaggcgacgggcaaggacagggagatcttcaggagcaaggccctcgtcggcatgaagaagacgctcgtcttctacacggggagggcgcccaggggaggcaagaccggctgggtcatgcacgagtaccgcctccacggcaagcacgccagcagcagccgcctcatgccgtcgtcggtcagagctggcgcgtcaaaggacgagtgggtgctgtgcagggtgttcaagaagagcatcgagccgccgccgtcagtgggcaagaggtcgtcggtcgcgtgcacggggacgatggtggtggaggacgtcgtgggaccgccgtccatgtccatggaggacgacctcaccgcgtgcgcgctgcctccgctgatggacgtgtccggcggtggcggcgccaacatggcggcggcgtccatcgagctgctggcgccaccggcaccacacgtgacctgcttctccaacgcgctggagggccagttcttcctgaacccaccctgcctccacccctccacgtcgccgctccgcctggcgagcatggtgcaggcgcaggcgcaggcgcagtacgacggcgacgcgggcatggtgctccagctcctgcaggaggccggcgggtggtacagcaagctgggcgagggggagcggctgagcggcggcgcgtcgcaggacaccggcgtcacctcggaggtgaacgtgaaccccgccgagatctcctcgacgcggcaccacataatggaccccgaggcggcctccttctggggcttctgaacttccccccacatctttttttttccgcgatcgctaaaaattggattagaattagtcactggattggaaactgggattgtaattgtgccgttgaatattactatatgcaaaatggggcaaaaaaaaaacaaaaagttgtg

SEQ ID NO: 119237 - DNA, 3078 bp, Zea Mays
atggatttgtctcgtctgtacttccggccgggggtgctttttgaagctgatgtttggcgctggttttcctctcctgtttgccccggaggcccgcgctccccatcggtattctggcttgttgtctcgtttggaagatgcatcttcaggcttgatcctgtctcggttcgtcatatccttcaagctgcttttggtggttctgccaggggattcatggtcctctcgcttgccgatcgggttttccgcttctcggtttcctccagggatgttgggttccacatctacaattccagatgcatcgctcgttctgaattcaaagctttcttcaacttgtggaactcgggtggaccaaattggaactatgagctcaaactattccttcaggaggagaatgccaactggtggtttgtctcgggcaggaaaaaaatctcattcactgatgtggttaggcgcccgcctttgactggtgcaaatgctgtcccagttcgtcgacatcgtcgttctttctgttcagctggaaaattgattgctccgaggacttctgttttcaatagattgggtttccctttcggagctcggggtccgaggtctcctgccaactcttcgacctcgggggcctcctcgtcgcgtgatcttcatcgtgagactgcccctacggcgggttttcccaggcctaacgggtgcaggactggacgcggatgtcggggctgtgatgattgctcccgttcaaattcaaagtcaatttcaaattcaactgttgggcggcattggcctcgtaggttgcagtggcggcccattctgcgtaatgggcccctcaggcctgggcttgggcctggaaggatggatttgtcgggctcggttacttcagccttgctctgccttttttgtaaagccagggggcatttggaattgttctgcaaacgtaaaaaatcagaatttggtttccctctctcctcgttcccttccttcgaaagtatctgccctttggaagggtcaccccgtcccttggacttcgggtcctggttccgctcgtcctcccggtctctgacgggtgggactccaccttcatttgcctccttcggtgaattcgccgaagcggtttcattattaaaaaaatccgaacaggcgccagaaacgtccttggagctcgcgttgggtgtcacttcaacaaaaccccaacctgcttctccaccctttgctctccggcgatcgtctgagaatctgtcaatggcgtaccggcgcgtggacccggggccgttcctccctccagggttcagcgccgcggtggtccagcatcgcggggttatggtcaggtcagtttcgcagcgtttgccgccatttcacgaggactgggcgattataaatatccatcctttaccggagcacgaggtcttgttccctgcggttagggatgtggtcagggagtaccttgttgagcatcagagggttggtgtccgtgccattcagcgctcacatttgggacaagtgttggtgcaattccgtagtgtgctggagcgggataacttggttcttcttggtccccagcagtatttggacgctactttcaccgcagtccgtcacaatgatgcctggaaccaccgtgcccttctcttcaaccatgaatgttggcttatgcttctaggatttcccttggattatcgttcttcagagtatctgcaggccgccattgggtcgtttgggaggttgattctgtgggaggaggaccgaagtaatatctctagaaccctgctccgtgttcgggtcacttcgctagaggaggttccccaatttattgttttttcggaggccgagggttttgctggggattcctggacggtgcaatgtgaaattatccagcagcttatgcttggcggtcaggctcaggatgaggaccccatccctccgccacctgaggatggtcatcagctccccctggccttcttcgggctgggccaacctttgcccccggctgggcttgacctaaactttcctccggggcctgagggtggagtgttgccggctcagcaggatgacttggggcatggagagtgggatcagtggattgtgaatgagcagcccattcagcaagaccctcaaccccccttgccagatgagcaacacattcagctggaagagctgcaacacaacaatcagcattctggcttgtcgtctgatagctccaatggtgctggtcagcttgcacccctcgcgaatggtcatcttgcggtaaatggtcatgctctgattgggaacggaatggaaatcaatgctgcccccttcaatgggccacaggaggttgatggaccggcacctcaggtggatcaggcccaggatttggaggttgtgccccctcaggtccatgttgatgtgcctaacaacattcaccatcagaatttggagatgaatttcatgctacatcaggattggcagcctgaccccgtctttcagatgattgaggagagaaatagagctgtccagttctctaggctctgggccaaattctttgctccggctggaccgactaatcactcggtgggtgtctctgagaagtgggcacctttttttctttcgaatcttcttcagccggaatctttcaactggtccaagacttttcttctgtcaggtatccctttaaagttgcaggagcaaggagtgaattccatcccttttgtggttcctaaggattgcccagttgacccctccctgggggatgtcacctctggggcctccaaggattccattggttctggtgggctgactccaatcactgtggagtcagggctcagaagaagcaaacgattgaaggaatcacgtgatgggttcaggcatggggcatgtccaaaaaggaactgcctcatgtgccaacataactttgatggcccacccccgctatcctccaaggtgctgcggaatctgggaaccaggctttgcaacctgtctgaggaggacctgtctgagcagaggctgaagcaaaaaaaatcgtctgtgggacctgttgggccgcggaaggttgacaggaaggatctggcagatgagaaaactgatgattcttctgatgaggatcaacaagataatcattag

SEQ ID NO: 119238 - DNA, 900 bp, Zea Mays
ggcaccagcatcacatcgagccgggagattggaatccagttgagatttcgctcctctcctcccctcccccgccctggtgagcccctccgggcgacgtgtgtcccgttgcctttccttcgctcgacggccacctgttgccctcgcatggctctgcctgctcctgccaagcgtccaagctcccgctcgcccggcggctgcacgccgcagcgtctatccacccagatccgcacgatccccgctaatcgccgcaccccctacctcccatgcaacttctctagctcacccgcatcccggctcggcactgccttctccttgcacttcacttctgtatctagaccacctcatcacaattcgtcgtcagcgtcgcgccgtcgtctcagattgatgcaaggcgtgatgagaagctagaggcagcaactgcatatattgcaagaaaattgtaagtaattatttgataatcactcacattatgtattagaaaatgactgaattgcaaaattacttttgattcattgttgtgatttatcttggaattgtttaaagaagaacgatggtggaataattatccacattattattattattattattattattattattattattattattattattattattgttgttgttgttgttgttattattattattattattattattattattatttgcatggtttgtgttggtttggagatagtgtttgatgtgttctgaaatgttaaattgctagactgccttcctctccctccggtcggctctctccccctctttcctctcctataccctagtgttggtccttgttgcggctagtcttcccttccccgaccctcagcagctgcctacccctcggctggccctggcctgggtgttgcaggcttggccacccttgac

SEQ ID NO: 119239 - DNA, 1180 bp, Zea Mays
atgaagtgccgctctgattcgtcaggcggtggcgacgaccacccgggccccagcacccgctgccacgggcgtcggtggtggctcgcccgtgggcgaaccgagtaagaagcagcggacggaggagccggtcgcaagctccagcatggcgggcgagtgctcgtcttcgttcttgcaggctccaccgccgctggcggagcagttgccacaggacgcaagagtgggcgagcagccgccgccaggttcggaggccggaggtgacgagcaggccagggtgccggatctcggggaggacctggtgttcgaggtgctgatgcgagcggaggcccggacgctggcggccgcggcgtgcgtgagccgcgggtggcgactgctggcgcgggacgagcggctgtgggaggcggcgtgcgtgcgggagtgggcctacactggattctccgagcagatgcttcgcagcgtcgtgctttcgcttggcggcttccggcggctacacgagatgtacattcgtccggtccagcagcgtgctgctggagcgccgcccgggcagcagaggcggcagttgccggtgaggatgggccgtgaccaggtccaagtctcactctctctgctctcgacttcgttctttctgaagatgcctaatgctcctccacctcctcctaaggacaaggatagagatagagataagaatggaggtggccaatcatttaactcaaaaatttcccttgaaattcgagttgattctgagaagtatgaagagctgattgagttcatggagaaggtggctaagacagttgattctgaggagcactacgttctgtcaattgcttacaagattgtcatggaacccaatgtgcttcatggtgcatcatatcctccattgagtagggggaagaaggccgtgtcaacgtggactgtgtcactctcattgaggactaccataacaagattgaagttgaactcagcaagatctgtgatggaatcctcaagctccttgattcccaccgtttccgcctcattaacagctgcagagtccaaggtcttctacctcaagatgaagggtgattactacggtatctttttagttgaattcatgtgtattaggtaccttgcggagtttgaaactggatctaggagaaaagatgcagctagaataccatggtggcacacaaacctgctcagataa

SEQ ID NO: 119240 - DNA, 463 bp, Zea Mays
tgtggaaaaagctgctgtaggctgtatgctgttaaaaagctaaaaaacaattggtggaaaccactaaaagtcgttaaaagttcttcgatatatgttttcacagttccatccaaaagccactaaaagcaggtccaggggtgctttcagttttgcactacgagaaagtcggcttttagaaaaagctgcttcttggatccaaccctttggttggcttttggcttttagggggcaaaagccaaagccaaaagccaaaccaaacacaccctaaaggtgagttgaatctaaactgcagatgaagaactgaagatagtggtaagttattatgatcaacctgggattgccctcaccaacgggcgtgaatcgctcaggagccatcgatcccgtgtatcttttaactagaagtaatttatgctgggacaaagtctaacaacatttttgagcaagttactaataacatcagtaa

SEQ ID NO: 119241 - DNA, 659 bp, Zea Mays
tgtcaacgggtagcactctagggtagtcagtggactgactagagtgtgagattatgcttgtgcaaccatgttggtcgacttgtggtgtgtaggtgtggagcacaggaacagtggtcgatagctgaggtgaaggtcatgcgggctcgtgctgatggaccaagagcggtgaagggcgagtgctgggtcttgactgacggatcagagcagccaggtgaccaaccgcggtggctgacacctaggacacgcacttgtgcgaggacgtggtggagtggactgtggtgctggcgtggtcgatgactggcgggacacacgtctgattgtggaggatgtgcacgtggtgcggtgctcacggcaggtttggtggtttgggcctcaaaaccacccagcgctacggatgtctggttttgctgagtttgggcctcaaaagtcggcgatggcggttctggagggaacgggtggcggcacgcgacatgatcgcggagggtgcgtcaaggcgaagcaactccgtgtgaaggacgtggtcgtcggatcaaaaacttaggagttggtccatttcgcccccggtggagtggattagctctatgtaaataggggtagtttaggaagtgagaataaccccctataaatagaggggatggctggttggttcagcatccctt

SEQ ID NO: 119242 - DNA, 672 bp, Zea Mays
ctggaccaaggacgacgacgatgcgtccatgcgcgcactcgcgcgctctctctctctctcgcgagacgtctcctccgcgccatgcgcatgccccggcgggcgctgcgcaagacgtggccccctcagcgcacctgccgctgccgtgcctggaggagctgctgccgtgcacggcgtacctcaagaccaccaaacacccctctcccacgtgctgcacggccatgcacaacgccgcggcggccgagatgccgtgcatgtgccgcctcttcgccgacccggagcttctcgccaccttcaacgtcaccagggagcagatgttcaagctccccgcccgctgcggcctgcccgtcggctgccgtaccggggcctcccacgagcctgtcgtggaagcgccgccgccgcccgccccggcacagcagcaccatcatggtgcctcgtcgaggggtgtccagttcagtagcatctggagcctggtggcgtcgttcgttttgggccagatgatccccatggctgcaccattttaatttagtctgttctgcatcgttctgttttatcgcctcagttagctataatggacagcgacagaatacatttcagatgtagtagtgataggcactgcatgacagcatgagtgctgcttgttaatactaataatacagtattaactgaacaaaa

SEQ ID NO: 119243 - DNA, 102 bp, Zea Mays
acttattgtttcattaatataagttttgttagttatctgtattcaagtaatgagtttcttttcatgatgcttcaattagatccaggcagacagttgtgtagt

SEQ ID NO: 119244 - DNA, 522 bp, Zea Mays
atgagactctacatgctgctgctgacaagcttgcatatcttgtgtgtaggagctgacaagaatgctaatggttttagttgtcataatgtaattatattacaatggccaaaagctccccttggcagctgctcaaattgggtttttgaaagggagttcactcaagaccaagtaattatgaaggctactagagcctcccggatagaaaatcaagatgctattgatactgcaatagttggcatgctagctgatccaaaagaggcctgtactagtattcaagaggttcatttccttccatttaatcctatcgacaaaagaactgccttgacatacattgatagtgatgggaagattgacatgctgattctcaacctcgcctacaataagtcagggatagaacaaagagttcatgttctaattgacaagtttgctgagtgtgaacttagatcacttgctgtagtgtatcaggaaactggcaagtcggttgtgctgaacaacctcatgggggaccctgtgttgtgctga

SEQ ID NO: 119245 - DNA, 607 bp, Zea Mays
attcggtgtttctggtactattagtttatatgagtttagaatttcacattgtaatctgaatacgatcaagatacttagtttattttcctatgttgaaggtatacaaataccttccaagagtaccacccagtgcaggcaacgttctcggtcaaataaagtgccactaaggaatcacttgcataaattgttgccttcgaggtgccatacttgataaagaatggaactggcaaagcttttagatcgtgtgccaatacctgtgaaagaggggttggaggaacccagtgcaaagatcaatggtttgctgcaagcgtatatttctaggttgaaactagaaggcctttctcttaattctgatatcgtctacattagacatttctcgggtgttcttgcttggcccttctcagcactactgtctactacacttcaaaatgtgcttttaaccagggctgttgtctattgtacctcagttggggatttgccagtacaccagggatgctgatttaacatttttagtgtttcatgcaaagatggtataggatatatgcaattaattgcaacgatgtacgattgctatttccgtatacagttatggtgtccctctctttgg

SEQ ID NO: 119246 - DNA, 1991 bp, Zea Mays
aacaaccaactccctcctcccctaatctcttcccactccaaaatgacggactgccaggtggtggccatgaaaaaggcgtacgccaggatcatgctcaacatggcgcaggagtcggcggcgcgggtgctgacggcggagcgtcgagccgtggccctcgcggccagtctcgaggccgccaaggaggacggcgtcgccgcgctcctgcggctcaaggccatcatggaagtcaggataaaagagaaagaactggaatctttggtgcatgttaagatgatcaaggaactagaagagcaattgaatggttcacaaaatgccatggcctctcttaaggttgagctgcagagggcaaatactgaattagagctgacaaggaaaactttagctgatgaaagaatgaatagccttcccacatccaataatgtttattattctaataaaaacgtcagcccttgttctaagatacatccacaaggaggaaatatattgttaaagaataaaaaaaacgctgacaacagtgatgacacttgccttgttctgataaccgaggagaatgaagcagtggacaaattggaggacaaggatcgtcgcagtcctgatctaccatcattcatgaaaagaaataagaaaccaaagttctgtcataatgggtgtacacagcgtatccatgcacttaaacagcagactcaaagtacagatgcattcctgaagcaaaatcagaagcaggccactgcattcaatagccactcaaaggccagaaagaaaaatgctgccaaaaactcatgccacacaaggtccgtcacggagcagatacttcaaacgaaatttcttggtaagttcaagcgcaagagaggtagaagaaacaggcctagctataagcatgataattccagtgagcacggggaagcagaatacaagttatctgatagatctgaatctgacggaaatggctgcttgctgctacttcaggcacttgaacaggatctttcacctccaaagttgtccactgaacatgatggggaggccttaactgacctgaaggaagatttcgaaatgagcgggggggatgctgagttaagtcggtgtactgctttctcggaactggttaatgtacttgcagtcaacagtgtgcaaatcaaaagaagaaaaagaacaaagactgtcagggttttggaagttgatttttccgatactaaaagtgttcctgaaccagctaacacccagcttaggaccagttcgaaaagcatgtctggtaatcaatcggtctctgagatgactgagaatcgctctgatacacccatcagaaacagtagccctttcttgaaatgtgctactgcaaacttaatgcatcagattgctgctggtaatggtcaatttgatcctgaaatcggctctgcagtgtcccttcagtcgaccaaaagtgaaactacagattatggtaacttggtggtggaccagcaggagctgataacaccaaataataatactacaagcttgaaagaagtaaatgaggatggaagctgcagtttggcttcacctaaggctgatgcttcgactcctgtgcaagctttagagaaatatgatatttcagttggcagctccctgaacaaagaagagcatacaaaggcatcttgtggagcttccatacaagctgaaggtgccagacaaatcaaatacacattcaatcgcagaaagcgcaagggtatgtctattgacagcacccctcagcgtgctgtccctgaggagagcagtgacctgtgtagtccaactaacaagcaaaagcttcaccccgattgtgtggaacaggatcatttgatagattctccacaaggccacagtcaactagttcaggttgccgaacagctcattttgttgtcagagcatatgtgatgagagttttgaaacataaagctgaaggaatgactagtttggtgatgtaacatttaggaggcttctgataagtgaattttgtaatattctaaatccgtttgatt

SEQ ID NO: 119247 - DNA, 90 bp, Zea Mays
aaaacgacgcgccctccacgcgcgactccatgcacctcgatcgtgggcgctgatcatgaaaatggtgtgcagatgagagattcacggtgc

SEQ ID NO: 119248 - DNA, 844 bp, Zea Mays
aattacaaactctactcagctctctcatcatcagctagtggtctcgaccgcggctcatcactgccgcgccggcgttactgaagaacttgcttgtgagttgtgacaaatatagccaggggcgactagctagccagctagctagctagccagctggtaactgaacgaagaagaagagagcagagcttcccgcgcgcacgccgcccgccgccatgggaggcaagtcgtccttcttctgccccatcttcagcttcctgcgcaagtccaggcggtacgagtacgacgacgacatgagcgactgggacggccggaccgggtacgtgcgcaaggtgcgctccagcgacgaggactacggcggctggtgggtcggcgagcgcgacgtcgacagcaaggcctccgacttcatcaacaacttccaccagaagaaggtcgccggctagcactgccgccgctaccgtttcgccgccttcattccccaatccgatcgacgacgccgcgcgtgccactgccgatcgacgacagcaccgtaccaccgcccgatccacgtgctcctccatatatatatgcagctctcgtcgttacatttattactaggttccttgatcgatgctcttatatgtcgttaatgtatgtttattatacatgtcgtgctcatttaatatatcagagagggtgatgaataattcgatcgatctgctggacagacctagctagctagatcgatcgtcgctagtttgttcgttcgtgtgcgcgcgctgtatgtacgtgtatgtgtgtgtaaagaggtatgcatgcatagggacgatggagacgcatgcatgtgttgtacgtacatcgcacattctca

SEQ ID NO: 119249 - DNA, 1230 bp, Zea Mays
tctaaatcttcggatataagtaactggtaaaaattgtttgaattccagagtgttcgtcaaatcaaatattcgagatgaaagcagatgagtttatctgatttcgaaatatctacgaatttctaaaaaaagaagaaaaaaagaaaaaatgagaaatatctcaccaccgatgaagtcatctgctccttatctctctcgttgcgtcagtcatcctcatccatcgtttggattttttccacagccgccgtctccaagcttctccctccctccccttctccctcacgcactctctctccagcgcctagccgctcctctttctcctccagcgctgcgcccctggcccctctgcccgagctcgcccatggcacgcagctgcgtcttcaagctcggtctccatctccatggcgccgtctgcccttgtcctgctccctagttccggctgagctcgcgccctgctccctggcatcgcaggctcgtcggtgttcctcccgttccctgctcggaccgcggcttttcccccggagctccctgtgctcgccatggccaccgcgcctgctccctggacggcgctcggattcctccttctcggccgtttccagcgcgcccatctccaacggcgcccggccaaagcctccctacgcgcgcgcctgctcccatgtcgcgccaccttagctcgctccctcaagctcgctgtgcccctgctttccacttccggtcgtccatggccgcgcgtcttcctcctacgcaggccactcgataactctccccaccgcacgctctccatggtcctaccaccggacgccattgcgcttgtctccctcggcgcgcctcgagctctctctactgcgtacccagcagtctcggatctcgccgatggttcatgctgttcttgtgctcgccttcatctccatggccctggtcgtcgcatagctgtacgcagcggaagcatggtgggttttggccgcgggcatggtcatgcgacgcgggatctgggcacgccgttgtggactccccgtcgatgcccccatgtactcgacgaaaagcctgagctataaatcatcgtggttcttgcagagttcgcgtcgaatttaatcctgcgtgagctgattcgctactactattattttgttatcgtggttcttgcaaagttcgcgtcgaatttaatcctgcgtgagctgattcgctactactattattttgttttaatgaatggattgatagatatgtaggttg

SEQ ID NO: 119250 - DNA, 1595 bp, Zea Mays
ggaaaagggtaaattcgctttcagaggcaagcgctgcgttgccacacagcgggaatcctgcccagagctgccgaatcgggtccaatcccgtcgacctttctggccgccgccgccactggactccatccagaaattaccttcgattcggccggggccgtgggagcggggatggggctcggggaggcggcggggcggctcctggcggccgtggactgggagcgagaggcctacccggcgtacgacgacttcctcgcgctccccgtcttcgtccttttcttccccaccgtccgctacctcctcgaccgcttcgtcttcgagtgggttgcaaggaggcttataaatagaaatggacatcagagcactaataatgaaacagaagaaggaaggaagaagataagaaaattcaaggaatcagcttggaaatgtgtttatttcctgtctggagagcttttagctttgtcggttacatataacgagccttggttcaccaataccagatatttttgggtaggaccaggagaacaggtctggcctgatcaaaagataaaattgaaacttaaggctgtatatatgtatgctgctggattctacacatattccatatttgcacttatgttttgggaaacaaggcgttcagactttggagtgtcaatgtcacatcatgttgctactgtcgtcctgattgttctatcttacgtgttcagatttgctagagttggctctatagtattggcaattcatgatgcaagtgatgttttcctggaagtagggaagatgtccaagtacagtcattgtgattggcttgccaatgtttcgtttctgttttttgttatttcatgggttcttctccgcctcacttattttccattctggattctgagaagtacaagctatgaggtcttgttgactttggacaaaaagaagcacaattttgatggtcctatatactattatgtgttcaattcccttctattttcactacttgttctccacatatattggtgggtcttaatatatcggatgcttctgagacaaatcaagacaagaaatgttggagatgatgttcgatctgattctgaaggagaagacgaccatgaagactgattggcgtcaccatcttagtttgcatattatgtcggtgctagaagcatcacccccaataccgtccctgagcttatacattctttggctggattccaagaatacgtgcagattatgagaggacgagcatttgttcctcacgagaatcaccgaagccgggctacgatttcttctgtctcgactgctcatttgtgttgtactaagtatgcattagaaacagcgctgcaatgtgttaaaaaagttggatgtcggatataacattcttgtgagtgttcagacaaagtgcagcggtaaatgtagcattccagaaaaaggactggctgtaaactatatggcctttctttcgacaaaccattgtaaaaattgtgtatgccaggatagccttgcttgggatttaccacaatcccaatcagaaactgtcccttctgaagcatgtatttcaccattcagtgattcgcctgatgataatttgataaattcatttatccaacaca

SEQ ID NO: 119251 - DNA, 921 bp, Zea Mays
tgtggccttcatcatgtgagttggtgttgttttctgttgtaactgtagttttccctctgttcttctccttctcaattaatacataggcctactgttaacctgctggcttttttaaaacaaacaaacaaacccagtttcaccacttcgctttagaataaactaattgaatgtttctggattcttttcacatgatctgactgaacccatttgtctcagctatgaggtcttgttgactttggacaaaaagaagcacaattttgatggtcctatatactattatgtgttcaattcccttctattttcactacttgttctccacatatattggtgggtcttaatatatcggatgcttctgagacaaatcaagacaagaaatgttggagatgatgttcgatctgattctgaaggagaagacgaccatgaagactgattggcgtcaccatcttagtttgcatattatgtcggtgctagaagcatcacccccaataccgtccctgagcttatacattctttggctggattccaagaatacgtgcagattatgagaggacgagcatttgttcctcacgagaatcaccgaagccgggctacgatttcttctgtctcgactgctcatttgtgttgtactaagtatgcattagaaacagcgctgcaatgtgttaaaaaagttggatgtcggatataacattcttgtgagtgttcagacaaagtgcagcggtaaatgtagcattccagaaaaaggactggctgtaaactatatggcctttctttcgacaaaccattgtaaaaattgtgtatgccaggatagccttgcttgggatttaccacaatcccaatcagaaactgtcccttctgaagcatgtatttcaccattcagtgattcgcctgatgataatttgataaattcatttatccaacaca

SEQ ID NO: 119252 - DNA, 111 bp, Zea Mays
gacgactctttgaatatgttcattgttaatgattatatcaaactcatgtcatatattaagctaagaaataagcatatttgataggtcaaaatgggacaaaaaagaaaaaaa

SEQ ID NO: 119253 - DNA, 297 bp, Zea Mays
atggcgaacggaggctccaccatgacgctcggctcctttgctcgactttcttgtgctccaaaagatctcatgcccatctacgcactcgtgcacattccacttgatcttgcgatgctcccttactcgccccaaggcctcgccaccaacccgatcgtgactagcagcagcaaaaagcaaaaggaaagcacaactacaaactattttcctaaaccgtgcaatgaacgtgtccatctacaattctcttggactggctcgattacacatggtactaagataagggatgttcaaaaaccataa

SEQ ID NO: 119254 - DNA, 1388 bp, Zea Mays
attgcgtgttgcgagaagaaaagcacgtccagtagctcgcgaaaaacaaggggagattagagagggtatgcagatgtagggaagagagaggcaacgtcctttttcatggccgcgttcgtgatccgttcgtgatccgctagatggatctacagtgcttcgcaaccctctaaaacgcgtatctgcgacgctttacgcgagcagggcgagctgttggactcagccttatctagtcaacgcatccactcacttcctttcgtcctcctgctctctgtgtgtgccacgcaagcgccctatccaccattagagtcgctcgttctacaacgacgtgctagctagccgatggctacgaccacgaaaccactcagatcgtccgctgctctgccgcacggggatgctggatcggatcgatccagtttaggagcattggaataacatatcttgtattcaagtgcaagtattgtaaggaacaatggaaggagggcggtgctactcgttttagacaataccttacatcacgtggacgaaatgtgcaaggttgtcgcaacgttccgtcggacgtttgcaattactttcgacgggagcttgacaagggacaatatagaagggaaagcaagaatactggaggaggtatgaaagttagcattggcgggttcacctcaatgatgacgatgttgagttgcaggtcgcattacatgctttaagagatgaggaggaacttaggaggcatgcttgcgcgagtagtggcacgtatgagagggtgatggctcctcccatgggggtgttcatggcatgtttggaagaacaccttttaggaaggagaaaccacgcatggtccgaccaaggattgataaggcctcgttttcgaaggcagtaaggaatgacgtccatttcattggtaagcctattggacccccgagtctggtagtgatagacaaggttcatcttcaccccttcttccctatatcaattatccaattggtgaagtgactcagtaacccatgaggtgggtgtatcaatgggaggagcctgagtactaaatattaatggactcatggagtacgacttctgcgtggaccagacagacttggacggagtacaaaggaatgttgatgtgtgagcaaggtattatattattctcatcggaagggtataatgtgacatatgatcaatggaatgcttacccgtgggcatgatgttcaccggagggtgtattgtatctttgatgctattcatgaactatgaaattgtggcattaatgtatttgcacttctaaatattgtgattggacttgtgataagatatggaccatttttgttgaatttttgtaatcataatggactttatttgacaaaaggggtcaatttccctttgtctacaaccagtttatc

SEQ ID NO: 119255 - DNA, 256 bp, Zea Mays
ctctgtgtgtgccacgcaagcgccctatccaccattagagtcgctcgttctacaacgacgtgctagctagccgatggctacgaccacgaaaccactcagatcgtccgctgctctgccgcacggggatgctggatcggatcgatccagtttaggagcattggaataacatatcttgtattcaagtgcaagtattgtaaggaacaatggaaggagggcggtgctactcgttttagacaataccttacatcacgtggac

SEQ ID NO: 119256 - DNA, 962 bp, Zea Mays
ttttatgattttttgaataagacaaatagttaaagttagggttaaaaaagtcaaacaaattatattttgaatcgaagggagtacaatataaactctattttttttcaagatccacttctagagcggttaggcaaaaccgcgcgccatttggccagagcccaccgcccagccagcgaggaatcctgatttggagcactggacgggacgcgttgccattagctgtcgcgtcagttacgttttgcttgccctgttctcgttcggccttgacaacccggaaatcctccagccctctagtccccaacgacgcaggaagcaggatcgagccgaatcctccggaactcgccgccggggccaaccgacctcacactattgatcgaggatgtcgtacgcctacctcttcaagtacatcatcatcggcgacacaggcgtggggaagtcatgcctgctgctgcagttcacggataagcgcttccagcccgtgcacgatctcaccatcggcgttgaatttggcgcccgcatgatcaccatcgacaacaagcccatcaaactccagatttgggacacggctggccaagaatcattcagatctattactaggtcatactacagaggagctgctggagcccttttggtttatgatatcactaggagggagaccttcaatcatctcgcaagttggctagaagatgccaggcaacatgcaaatgctaacatgacagtgatgctgattggaaacaaatgtgacctttctcataggcgtgctgtcagctatgaggaaggcgaacagtttgccaaggagcatggtctggtttttatggaggcatctgctaaaactgcacaaaacgtcgaggaggcattcattaagaccgctggtacaatatacaagaaaatccaagatggcatatttgatgtatcaaatgagttcgggatggagggagtgcatgtcttccgtatgaattgtc

SEQ ID NO: 119257 - DNA, 1239 bp, Zea Mays
gcgcgccatttggccagagcccaccgcccagccagcgaggaatcctgatttggagcactggacgggacgcgttgccattagctgtcgcgtcagttacgttttgcttgccctgttctcgttcggccttgacaacccggaaatcctccagccctctagtccccaacgacgcaggaagcaggatcgagccgaatcctccggaactcgccgccggggccaaccgacctcacactattgatcgaggatgtcgtacgcctacctcttcaagtacatcatcatcggcgacacaggcgtggggaagtcatgcctgctgctgcagttcacggataagcgcttccagcccgtgcacgatctcaccatcggcgttgaatttggcgcccgcatgatcaccatcgacaacaagcccatcaaactccagatttgggacacggctggccaagaatcattcagatctattactaggtcatactacagaggagctgctggagcccttttggtttatgatatcactaggagggagaccttcaatcatctcgcaagttggctagaagatgccaggcaacatgcaaatgctaacatgacagtgatgctgattggaaacaaatgtgacctttctcataggcgtgctgtcagctatgaggaaggcgaacagtttgccaaggagcatggtctggtttttatggaggcatctgctaaaactgcacaaaacgtcgaggaggcattcattaagaccgctggtacaatatacaagaaaatccaagatggcatatttgatgtatcaaatgagtccaacgggatcaaagttggctatgctgttcccaactcatctggaggtggtgctggctcgtcctcacaggctggtggctgctgcagttgagcggtggcagcaagtcatacaattgcaagggttctctctgcagtatcttgatgtttgcctatagctggccccggatgatttgttctttcagccatcacgtttcaatccatgaacaaaccatcttcagtgttagttgtcattcaaacttgtgcgatctttctgtaaagccaatcattcacgattgctaacgtatgtgctttctgtaaccaaattgaaatcagttctatggtattcatttgttcaaaatgtatatatatgcttctctgcaaccctatcgctacgatgaaatctggtggtgcttatagcaacaacctgaggcatagatcttgctggacaaactcccctaattgtattactggattctg

SEQ ID NO: 119258 - DNA, 1225 bp, Zea Mays
gcgcgccatttggccagagcccaccgcccagccagcgaggaatcctgatttggagcactggacgggacgcgttgccattagctgtcgcgtcagttacgttttgcttgccctgttctcgttcggccttgacaacccggaaatcctccagccctctagtccccaacgacgcaggaagcaggatcgagccgaatcctccggaactcgccgccggggccaaccgacctcacactattgatcgaggatgtcgtacgcctacctcttcaagtacatcatcatcggcgacacaggcgtggggaagtcatgcctgctgctgcagttcaccatcggcgttgaatttggcgcccgcatgatcaccatcgacaacaagcccatcaaactccagatttgggacacggctggccaagaatcattcagatctattactaggtcatactacagaggagctgctggagcccttttggtttatgatatcactaggagggagaccttcaatcatctcgcaagttggctagaagatgccaggcaacatgcaaatgctaacatgacagtgatgctgattggaaacaaatgtgacctttctcataggcgtgctgtcagctatgaggaaggcgaacagtttgccaaggagcatggtctggtttttatggaggcatctgctaaaactgcacaaaacgtcgaggaggcattcattaagaccgctggtacaatatacaagaaaatccaagatggcatatttgatgtatcaaatgagtccaacgggatcaaagttggctatgctgttcccaactcatctggaggtggtgctggctcgtcctcacaggctggtggctgctgcagttgagcggtggcagcaagtcatacaattgcaagggttctctctgcagtatcttgatgtttgcctatagctggccccggatgatttgttctttcagccatcacgtttcaatccatgaacaaaccatcttcagtgttagttgtcattcaaacttgtgcgatctttctgtaaagccaatcattcacgattgctaacgtatgtgctttctgtaaccaaattgaaatcagttctatggtattcatttgttcaaaatgtatatatatgcttctctgcaaccctatcgctacgatgaaatctggtggtgcttatagcaacaacctgaggcatagatcttgctggacaaactcccctaattgtattactggattctgattcacgattactgtccaa

SEQ ID NO: 119259 - DNA, 282 bp, Zea Mays
atgggtcttcgaaaggaaaaagtctatttgatatccctcaagtccgatggggaggtggaggattcgctttcgctgacgcctgacggcaacgtgtcgcaccggcggccttggccactgtcctcgagctcgtcggcccgcccaccttcaggtccagcgccttcaccttcaccaccggctacggctaggcgcgctctcaacttcgagagtgcggactatgtcgctgatcgcagccgtgaactccaccccaacttcgacaggcatgcttacaacatactaaaataa

SEQ ID NO: 119260 - DNA, 115 bp, Zea Mays
tatgtttttgttggttatatgggtgcgaataaatgtttagaggtaaaaggcaacacaatgtaaaatgttacggacattcgtccctgaaagcgttatcttcttcaaagataatgat

SEQ ID NO: 119261 - DNA, 2895 bp, Zea Mays
tcttgtatcacacacagacacagctcagcagcagcagtatcgccccgccacccggtgcttttgtctctctctcgctgggtcttaaaaatccaacgccaacgcggccgccggatgcgcattgcccccctcctccctgtctcgtctcctcgtcgtggccacctcttcctctgctcccccttccaggggtcgttcttggagccccagttcctcgagctgcgtccgccggtggtcgcgtaggtggcggatgcccgcaatggggaggagcagccgcgcctgctcccttcttggttcaactcacctgctcctcctgctgctgctctcggtcggctccgccgtcgcccagaatggctctacctggaagaccctgagcggcaaggctccagcagtcgttgctaagggcgggttctccggactatttcccgattccagtgactatgcttatcagtttgttggcatatctagttcccctgacaccaccgtgtggtgtgatgttcggctgacgaaggatggtgctggtatctgcctaccgagcataaacatggataactgcacaataatagccagtgttttcccacaagggaagaagacctacaaggttaatggtgtatctacagcgggctggttctccgtagactatacaagcactgttctgctgcaaaacgtatctttgaagcaatcggtcctatctcgtacccctgcatatgatggtttgttccaaataaatcctgttgaaaatattttcaccttatataaggcacctgctgtttggttaaatgtccagcacgacagtttctacagccagtttaagcttagcatgagaagctatatcctgtccttatcgaaacaattcattgtcgattacatctcatcgcctgaagtgaacttcctcaccagtatatctggaagagttagcaagaagacaaagcttgtgttccgatttctcgacgaacgctctattgagccatcaacaaaccagacatatggctcaatgctgaaaaatctgacatttgtcaagacttttgcctctggaatacttgttcccaaaagctatatctggcctgttacaccagataattacctgctgccttatacttcagtggttgatgatgctcacaaagcaggactagaaatctatgctgctgattttgcaaatgacttaaccatcagctataactacagctttgatccattagcggaatatcttttcttcattgataacggtgccttctctgttgatggtgtattgactgatttcccgattactccttcagaggcagttggttgctttagtaacctgaacaccagcaagattgatcatgctaaacctctagttatctcgcataatggtgctagtggtgactacccagactgcactgaccaagcttatgaaaaggcagttgccgatggtgcggatgtcattgactgtcctgttcaagtgactaaagatggcatactgatatgcatgagctctgttgacctaatggatgttactactgttgcaaaatcacaatttgcttcgcaagtaactaccatcaacagtctgaaggctgggtctggagtcttcaccttcaaccttacttgggatgatatttctaagaacctaaagcccatgatatcgaacccaatgagcacctataatctgtacagaaatcctagaaacaagaacgcaggaaacttcatgagattgtcagactttttgacctttgcaaacggaaaggatttgtcaggaatcatgataactgttgagcatgctgcattcatggcagaggagcttgggtttggtgtggtagatgcagtgatcaaagcacttgatgactctggttatagcaaacagactgcccagaatgttatgattcagtcaaccaacagctcagttctggtgaagttcaagcaggaaaccaagtacaaccttgtctacatgatcgaagaaagtgtccgagatgccgcaccttcctcccttgcggacattaagaagtttgctgatgctgtttctgttggcaccacatctgttttcccggaaacccattactatttgacaaaccagaccaataagcttgttccgacccttaagtctgccggcctccaagtttacgtttacgtgctcatgaatgagtttgcttcccagccaaatgacttcttcgcagacgccacttcacagatcaatgcttatgtgcaaagtgctaaggtggatggtgtcatcactgatttccctgggactgctcacagatacaaactgaactcctgcacgagcatgggaaagaacatgccactattcatgcagcctccgcaaccaggtggcctcctttcaaccattctcccagatgcacagccaccagcagcagcgccaatgccgctcttgacggacgctgacgtcgcagaaccagcccttcctccggtcagcaacaccaccacggctgcatcgccttcgcatgccgccctcagaatgcgaacccatgtcttgagcatcgccacattgctgatgctatgtgcttccctcctcatctgaagatagtcctgctcaacatcatacgcggcgtggcgcattagagctgaggattttcacattgagctgctaatagcaattctttccaccacctttatgtagctatttttttcttgttctgtccggtgttttggaggatggatggatgttcagcttgatacctcaaaggtggcacttgagcgtgctgccagctgtctctaggtacattttggtacatacgtgtggtgatacattgtccatgtcaccgtttctactgccaacctgcctgtggagggcaaaatattccctacaaacatacagtttagggtctgtcttggatacacctcaatcctgtcagggtgttctatgatttggtaagaggctgtctccaatagatctacatatagttatgc

SEQ ID NO: 119262 - DNA, 893 bp, Zea Mays
acctgtaagccgccgcacagatatatatgccgtgaccaaaccgtcgcttccatttttcgcccgccgcccccagtcccgatccgaagctgtgcctcgtaccatttcgatccaatggcgccgacgtcgaagctgtcgacgggcatcaagcgcgcttcgcggtcgcacgcgtaccatcgccgtgggctgtgggccatcaaggccaagaacggcggcgccttccccaaggccgacaaggccgccgccgccgtggaacccaagttctaccctgccgacgacgtcaagccccgcgttcccagcacccgcaagcctaagcctaccaagctcaggtcgagcatcacgcctgggacggtgctgatcctcctcgcagggcgcttcatggggaagagagtggtgtttctcaagcagctcaagtccggcctgctccttatctctgggcctttcaagatcaatggagtaccgatccgccgtgtgaaccagacctatgtcattgctacatcaaccaaagttgacatctctggtgttgatgtcgccaagtttgatgacaagtactttgccagggagaagaagcagaaggtgaagaagaccgagggcgaactttttgagacagaaaaggaggtaggtgtctgagtaaaaaagatccattattttgtcgacccttgcttcatatctgttgaatctgcaggcatccaagtcactgcctgacttcaagaaggatgaccagaaggctgtggattctgctctgatcaaggctattgaggctgttccggagctgaaaacctatcttggcgcccggttctctctcagggatggtgacaagccccatgagatggtcttctaagctcttagttttggagttcggaggaagctgttttgtctgtgttcttgtacttctg

SEQ ID NO: 119263 - DNA, 1078 bp, Zea Mays
ctgtaagccgccgcacagatatatatgccgtgaccaaaccgtcgcttccatttttcgcccgccgcccccagtcccgatccgaagctgtgcctcgtaccatttcgatccaatggcgccgacgtcgaagctgtcgacgggcatcaagcgcgcttcgcggtcgcacgcgtaccatcgccgtgggctgtgggccatcaaggccaagaacggcggcgccttccccaaggccgacaaggccgccgccgccgtggaacccaagttctaccctgccgacgacgtcaagccccgcgttcccagcacccgcaagcctaagcctaccaagctcaggtcgagcatcacgcctgggacggtgctgatcctcctcgcagggcgcttcatggggaagagagtggtgtttctcaagcagctcaagtccggcctgctccttatctctgggcctttcaagatcaatggagtaccgatccgccgtgtgaaccagacctatgtcattgctacatcaaccaaagttgacatctctggtgttgatgtcgccaagtttgatgacaagtactttgccagggagaagaagcagaaggtgaagaagaccgagggcgaactttttgagacagaaaaggaggcatccaagtcactgcctgacttcaagaaggatgaccagaaggctgtggattctgctctgatcaaggctattgaggctgttccggagctgaaaacctatcttggcgcccggttctctctcagggatggtgacaagccccatgagatggtcttctaagctcttagttttggagttcggaggaagctgttttgtctgtgttcttgtacttctgagttttgtaccagtagcgaatgtttcattgtggttgaagtcttcctgccaaatattataagatctaagaaagttctatccgtgttggtggttcagcattgcactatctgcatttggttccttaggtagtccatggtatcttgaggtcccattttgtttgaattgctgactgtccggtgtttttgctgttggtttggaataaacttggcatgtcgcttgccaaaactggaataaacttgacatgcatcgtacaaa

SEQ ID NO: 119264 - DNA, 222 bp, Zea Mays
atggagacagagctggggaaaatagaagtccatgcgccagggaaacaagggaggagggagcgctccctggcactcgcgcgtccagcggccagcagaggagccaggggcgcggagcgagatggagaagatctcgtagggcggcggctggaagatgaaggttgggcatgggatgaagaaaatttgagctcgcctgtgggagaagaggataaggagcacgcgtga

SEQ ID NO: 119265 - DNA, 878 bp, Zea Mays
ggggaaccatatgctgctagtagaggtaattctttaggtgggggaagcaccggtggggaaaccatatgttgttgcttactaatattgttgcgtcgtggctggatctgccgctcctagctacaactatccctgtccataactagtttatgtactgcgcatttatttaatcatatacttggacctatgtattaggttggttctcatattttcttgaagagttggaggaatcaaaataagaaggttgcattaggtacaataatttggttgtgatccaaagcaacaagttggaggagatccattgggcaaagaattttggaaggtttgtctcggtcttgtatttgtgcgtgatgaaccactaatacggccctacaacaaatttcgtggttctaggagacataaataacgaccctatagcatggtattcaagctgtatagaaaaggcagctctttaatgtcaaccattgaacaacagcagatctacatgagggctatgactttgattcttctttaaattggcgttattagtgatgagagcgatgagtctactgagtccggtttatgagtcaacctttgtttgtttcatactatcatagaaaaaatgtcaattcacacattgtgtaatgaattaagttgtggatgatattttataacgacactactatttttaatatagactggttccagattatttgccatgtgtgagccaataatagtttggaaattgataatgtgcaatgcacatgctttgcatatttgttttgatccaaataaaaaataattataaatagtttttattcggtgattacttgcaacgtttataaaagtgttgccgtaataaaataaataaaacaataaaattgaataaaataaaaaattcc

SEQ ID NO: 119266 - DNA, 243 bp, Zea Mays
cacgaagacatttttgttgcaattgcaatgtatcttcagcgaaaaacttgtggaaggttgcaaaacattgacctaggtgccattcagcgaggcacccttggtagctttaggagtgtaattgtttcgtcccaaagtagattttgggccaacaacaaaaggatttgggttctctgaaaggatacttgagttgtccacgctgtaacaaacaaagtttttctagtctagtactaagtgatttattat

SEQ ID NO: 119267 - DNA, 2631 bp, Zea Mays
cccacgaccaggccaccacttcgccatcgccacggctccacccacgtctcggcttttgcttgcttgcttcctcctctcccgtcgggcactcgggctcgtcagactgcgcccgggcgccgaatctccagacgggatcgcgccccccatctgacgccaccggcgccggagcccacggcgaccgcgcgcctctgcctccgatctaaaagaaacattggagaaccgtactgaacaaaataagtactggtatttcatcatttgtctcggtattccaataatgtggaaactcaatccctttggaggtaaagcacagagtgggttggatggtcgtactattgatgttggaaatttgaagatcacagtacaaaatgccattgcacaaggaggtttctcttgtgtatatctggcatgtgacacagtacatccatcaaagatgtatgcactaaagcacattatttgcaatgactcagaatcgcttgatcttgtcatgaaggagatccaggttatgaacctcctcaaagggcatcctaatgtggtcacacttgttgcccatgatgtttttgacatgggtcgtacaaaagaggcacttcttgtaatggagttctgtgagaagtctttggttagtgcaatggagagcagaggtagtggttactatgaggagaagaaggtgcttttgattttcagagatgtctgcaatgctgtctttgctatgcatggacaatcaccgccaattgcacatagggatctgaaagctgaaaatgttcttcttggttgtgacggtgtatggaaaatatgtgattttggaagcacatcaactaatcacaaatgctttaacaaaccagaagagatgggcattgaggaagatgtcatcaggaagcatacaaccccagcctacaggcccccagagatgtgggatctctacagaagagaagttattagcgaaaaagttgacatttgggctttggggtgccttctatatagaatatgctacttcaagtctgcatttgatggagaatccaagttgcagatactcaatggcaattatcgtatccctgagcaacccaagtatagcactgctgtcacagggttgatcaaagatatgctggaagcctctccaaattcccgaccagacatcacacaggtctggtttcgtgttaatgagctactgccgcttgagttacaaaaaagtttacctgacggaccttcgccagccgtttccttgagtttgcaagatgaaggtgctcataaaagggcacatgtgatgcctagaaggaaccctcctccacctccaagagagcaatctaatagttctctatcgcatggaagctcaaaggcaggagatgcacccttaggtgcattttgggcaacacagcatgcacaaggtgctcaagctgcagataataggaatcctttgtttgacgaggagccaagtaaggtatcattgtcatcaaagcagaaccaaagtcgggtggacaccagcatcagtattcctggtgataggcatggtcattctggtcagacgtcacgaataagcaaaacaccgaataactccttgtccaatgatggtttcagaggtgtctctgacacggagatacataattctgtgaaaactaaagtgcaacaacctcaacccaagccaaaatgtgataaagatccattcaacatctttgttgcagattttgacactcacaatctcaacattgccgttggtaaggcatccgaacttgaacttgaagtgtccagtctgaaggagcagttgaagaaaaccacattagaaaaggctgagatgacagccaagtatgaaaagttatctgcaatctgccgatcacagcgtcaggagatccaagagctgaagcgcacccttgctgaggcaacgcctccctcaaacaaagtcagctcaaggacacaagactctggatctcagcgaaaggaaaagatccaaggaaccttgtgggagcttgaacaagggatgcttgctagcaatacctcatcagccagttctgacgtcaaaacatggcaggctttccctgatacacagactcaggcccgaccaaaggtcgatcatggaactaacggaagccaaaacataaccaagaacacaacatcaggtgcttcccccgacgcgtggggttttggtactgatagtttcagaacatcgtcagcaccagtaaaggctgctacacagatcaacagggctgcccaagggagctcatcccaaagatttaattctggtgtggccaagaaggtagagcaaccatctggatgggctggtttttaactccacatcgacatgcgttaaccatcattctggtcaaaatttgcaatctgcgttacgcaacagttgccgacggagttgtgatccttggccggcccctgggcgtcaaaatcggttatcttgagcgtgttcatcattttggttgaaccaacttagacattggttcatgggatcactttacccgttaataagtaaatgtgtattgacagtattgtgagtgtttctgtgtatggtgattatgaacatgaacggatgaatgtaatgtctaaatgccaagatataccgtctcataacaaagacttgagccttctgagctcaaaacagagagctagtcatatttgtcttttttggaaccagtc

SEQ ID NO: 119268 - DNA, 126 bp, Zea Mays
gtaactatttggaacagaggacatgtagtaaaagaaacaagaacttgccgtggtcaaagaaacaagataagaacttgttgtaggtcaatgaatacaaaggcacatttaacaatttctgaaacagag

SEQ ID NO: 119269 - DNA, 97 bp, Zea Mays
ctaccaattttgggtcttacattaatctcaatgttgtcggcgttatccgaagcctctagcagttcatcatcacgtccttctgcgtatgcaccggtgg

SEQ ID NO: 119270 - DNA, 1224 bp, Zea Mays
attttctgaaaataggacttaaaaacaaaaaattcggcccagttgggagttgcccacccagttccgaacttcgaacacgacgttctccctcaccccaccctccaggctccgagctccaaaaccctagctatgcagaaacagacgggcaagtccggcgggaccggtgggggcacgccggcgaagcgcggccgcccgtttgggagcaccaccggcggaggggccgctgctgctgccgcggcggcggcggtcgttgacccgggtgcacccgccgctctggtcgggccgtccctccaagtcctatcagccctgtcagatcagaacaacaaaagaattgtccttgcattgcaaagtgggttgaagtcagagatactgtgggcactgaatgcccttacagtactctcatttaaggagaaggatgacctccgacgtgatgcaacacctcttgctaaagttcctgggctcctagatgctcttcttcaagttattgatgaatggagcgatatttcaatgcctaaggaccatacgaaaccacccagactaagaactttgggtgccaacacaacactctcgggctttggccaggagaatatggaaaaagtatactctgacactgccactacctctaatgaccaatccaaggcggaagattccagtgtcacaaagaagcgcgctgcaagcttttggtttgatgaggatgggttgtttaacaacgatgatgaagggagggcggaaaggcagcagtgtgctattgcagcctccaatataatccgcaatttctcttttatgccagaaaatgagattatcatggttcaacataggcattgcttggaaactatatttcattgcttagaaaaccagaatagagaagatgatgagctcataacaaacatgctggagacccttgtcaatttagcacctgtgctggacctgaggatcttcagctcatcgaagccttcgttcattaaaatgaccgagaaaggtgcaattcatgccataatgggtatgctttcttcttccgtaaagccatggcactgtgctgctgctgaattgattggccgtctgataataaatccagacaacgagccatttcttcttcctatcattccacaaatatacaaacgactcgttgacctattgagtgtaccagcatatgatgcacaggctgctgctgttagtgcactctacaatgtagccgaagtgaatatggattgcaggctcaagctt

SEQ ID NO: 119271 - DNA, 301 bp, Zea Mays
gattatattgaaacttggatacttacactaatttcacatgtaactcatacaaataagtgaaagtgaaaggaaagaaacgtggatatcttatagatcttatgatccaaacattttttatggttacatatggacatatgttgtatctccataaaatttcacgattttttgaggctatttatgtattattaatttcttgtcatagaaaatcatcaaaatacaattaaatcattaaaatattgtttaaacaaaaaattgatgtattacaaagtcatagatctcttcaagctctacaattttcata

SEQ ID NO: 119272 - DNA, 828 bp, Zea Mays
tggatactaaacgaattctagcatatttcaaggactaaaacaaacaaagcactgctagcctatatataaaaagaggcagattactttccctcgtctcagccaaaaaaaaaaagaataaatcggaaaagcaagagacgccgaaaattcgaagggggaagaggagaagaggggaaagaagcaaatgacggaggccccgagcaagatcgaatccatgaggaagtgggtcgtcgagcacaagctccgagccgtaggttgcctctggctaggtgggatcagcagttcgatcgcctacaactggtcgcggcccaatatgaagactagcgtcaagatcatccacgcaaggttgcatgcgcaggctctaaccctagctgcattagttggttctgcatgcgtggagtactacgaccagaagtatggttcttctgggccaaaggtggacaagtacacaagccaatatctggcccattcgcataaagattaaggtccccatgttggttcatctcttgactcttggtgctcatgacccgcccgtggatgctggatgtttattctttttgtcttcttactttaaaaatggtgtacttgccagagaaatgataatgggggatataatgcagataattatcatcataatttagcgttatgttgcattgtctaaccgctctgttgactctcagcatcttcgaatattctttttatattttttgagaaaaggaaagaagatcctgatttgttgttagattattgtgtgtattagtgatgtaacgggccttggtctagcccaggtactcttatagatgaatgcactaacaaattgctgtgctacag

SEQ ID NO: 119273 - DNA, 3222 bp, Zea Mays
ctgaacctttgccgcctgcggcctgcccgggaggcggcggctcattgtaggatgccacaccgatgcggactccggaaaccatcggttcggccctggcccgcttcggcacgtcgcggtcgctgttcgccggagcgcacctccactcccacctcctcaagtccggccttctcgccggcttcagcaaccacctcctcacactctactccaggtgccgtctaccgagcgcagcacgcgcggtgttcgacgaaatccccgacccgtgccacgtctcctggtcctcgctcgtcaccgcctactcgaacaacggcatgccccgggacgcactcttggcgtttcgggccatgcgcgggcgcggcgtcccgtgcaacgagttcgcgctccccgtcgtgctcaagtgcgcgccggacgtccggttcggcgcgcaggtgcacgcgctggccgtggccacgaggctcgtccacgatgtcttcgtcgccaacgcgcttgtggccgtgtacggcgggttcggcatggtggacgaggccaggaggatgttcgacgagtatgtaggcgttggaggggagaggaatgccgtttcgtggaacaccatgatatcggcgtacgtcaagaacgaccagagcggggatgccatcggggtgttccgcgaaatggtgtggagcggggagcggccgaatgagttcgggttctcgtgcgtggtgaacgcgtgcacgggatcgagggatttggaggctgggaggcaggtgcacggtgcagtggtgaggacgggatatgaaaaggatgtgttcacagcaaatgcgctggtcgacatgtactcaaagctgggagacattgaaatggcagcaacggttttcgagaagatgcctgcggcggacgtcgtctcatggaatgctttcatttctggctgtgtaacccatgggcatgatcaccgtgcactggagctgctactacagatgaagtcttcaggattggtgcccaatgtgttcaccttatctagtgttctgaaggcttgtgctggtgctggtgcattcaatttgggccggcaaatccatgggtttatggtcaaggccgttgcagattttgatgagtttgtcgctgttggccttgtcgacatgtacgcaaagcatgggttcttggatgacgcaaggaaggtgtttgatttcatgccccgaagggatctgattttgtggaatgcactgatctcaggctgctctcatgacggacggcatggtgaggtgctgtcactctttcacaggatgaggaaggaggggcttgaccttgatgtcaataggacgacactagcttctgttctcaagtcaacggcgagctcggaagcaatctgtcacacaagacaggttcatgctcttgcagagaagatagggctcctatctgactctcatgtcatcaatgggcttattgattcatactggaagtgtggtcagctagattatgcgattaaggttttcaaagaaagccgttctgatgacattatatcttctacaaccatgatgacagctctctcacagtgcgaccatggtgaggatgcaataaaactgtttgtgcagatgttaagaaaaggccttgaacctgattcttttgtactaagtagcctcctaaatgcttgcactagtctgtcagcctatgaacaagggaagcaagtgcatgctcatctgattaagaggcagttcacatcagatgtatttgcaggaaatgcacttgtgtacgcttatgcaaagtgcgggagcatagaggatgcagacatggcattctctggcctgccggagaggggaattgtctcatggtctgcaatgattggggggcttgcacagcatggacatgggaagagagcattggatttgttccatagaatgcttgatgagggtgttgccccaaatcacatcacgttgaccagtgttctctctgcttgtaaccatgccgggcttgttgatgacgcaaagaaatactttgaatctatgaaggagacgtttggaattgacaggactgaggaacattacgcatgcatgattgatattcttggtcgtgcagggaaactagaggatgctatggagcttgtcaacaacatgccattccaagcaaatgctgcagtttggggcgcacttctaggagcctcaagagtacaccgagatccagaactcggaaggatggcagctgagaagctcttcaccctggagcctgagaagtctggtacacatgtcctgcttgcaaacacttatgcttcagcaggcatgtgggatgaaatggctaaggtgcgaaagctaatgaaagacagcaacgtcaagaaggagcctgccatgagctgggttgagataaaggacaaggtgcatactttcattgttggcgacaagagccatccaatgacaagagacatatatggaaagctagccgaattgggagatttgatgaacaaagctggttacgttccaaatgtggaggtcgatctgcatgatgtagacagaagtgaaaaggagctgcttctttctcaccacagtgagaggctggccgttgcgtttgcattgatcagcaccccatctggggccccaatcagagtcaagaagaatctgcgcatatgcagagactgccatgtcgcattcaagtacatttcaaagatcgtttcaagggagattatcatcagagatatcaaccggttccatcatttcacaaatgggacatgttcttgcggtgattattggtgaaaatggttcagcagatgataatttagattttagcagcttgttgagaattctgatgttttagagcagttgcatgccttcatggaagtttatagtttcacaagttttgtagccagtcagaggagcgatgcaatgcaatttttttgtttgatatgcccacagccatgcattttgcagctaaatctgcagtagacactgcgtagaaataatcctcatgtcacggctttttaataacacccatacaattattttggatacatcaatgcctcaacggggatgaaaaacttcagttatagagtctttgttgggcggaggatgaacacaatctcaagcaaccggacgaagaccatgtttatgtcctaacggctttcgcagatccatgagcgaaggggccatcagcgaagacatcattcgctctgacagaatgccgcggaggggctacatcatacgaaggcctcaggatgtctgagcagccaaagaccgaacatgccctcgatcacagagccaagaccat

SEQ ID NO: 119274 - DNA, 231 bp, Zea Mays
aggtttcccagcaaataatcagacgccatatttttttaaactttttatactaccttgtatgtctatcacaagattgaatattgtaacttcttgtagagttattatacatatagatgtaatgattggtaaaatttcttcttgcaaattgcaatcatatcacatgaatccgtccattgccaatcatcctagaataagagatctttcctctatagaaaatatgacaaaaacaag

SEQ ID NO: 119275 - DNA, 758 bp, Zea Mays
agaacatctagatagcaggagcgactcagggattgcgaaatacagactgggcagtggggatggcgacgctcaaggatgccggcgaagcatggggggagcggggagccgcctgggtcaaccagtctcctggtcgaagtcatcgccatcagactcctcgacgttgtctgcatcgtcgtcctccacctcagcgtcatactcctccttggtgtcgcctgtgggcttcccgatgataatcaggtggctgttggtcttccggatctcattcaactgagcgacgatcaaagtgaaacaaagggaagcgtcatcaatcacccattgacatcgcgtgggctctggccagggcaaggaaaggggacgcgagaggggggggggggggggggggggtgattagagaaggggcaagggattggagaggaccacagcaccttgtcctcgaggtcggactcggccatggcgaggaggacctcgtcctcctgggaggtggccggcacggggagcagcgtggacgccgggatcagcggcggcgatggccactgccgcatcagcgccgggaattgcagcatctctgctctctgttgctgccgccgcaggcccgcagcttcgttttggtttggggtgacgagtggcctgtggagcagtcgggcaggactcggagcggctgtggcttgtggcggaggccctcaattgatgagtgctgcttcctccatcccaaatcaaaatccattttagatttttaataaatttatacaataattaat

SEQ ID NO: 119276 - DNA, 1750 bp, Zea Mays
accaaacctcaagtactttctaaaagttgaccttatttaagtttgtagtcggttcatgtgaccccacaggacccaaaacagattgccgccatcaaagatggaatctgggagcacgttctatggaggggaaggtctctccatcgaccccaagtggtttatcgacccgaagcttctctttgttgggccacgcatcggcgagggcgctcatgcaaaggtctatgaggggaagtataagaaccaaaatgttgctatcaagattgtgcacaaaggggacacccctgaggagatgaccaagagggaggggagattcttgagagaggtgaccatgctgtcaagggtgcagcacaagaacctcgtcaagtttattggggcctgcctagaacctgtcatggtggtcgtgacagagctactagtggggggttcgttgcgcaagtatttggtcagtctccgacctaggagccttgagcctcgtgtagcagtggggtttgcattggacattgcccgagctatggaatgcttacatgcacatgggatcattcatcgtgatcttaagcctgagaatctgttgctgactgcagaccagagaacagtaaaacttgttgatcttggtttggctagggaagagacactaacggagatgatgactgctgagacaggaacataccgttggatggctccagagttgtacagcacagtaacactgaggcatggagaaaagaagcattacaaccacaaagtagatgtctacagctttgcaattgtgttgtgggaactcctccacaataaactgcccttcgagggaatgtctaaccttcaagctgcctacgctgccgctttcaagaatatcagaccaagtgccgataacttgcccgaggagctgtcagaaatcctaacatcctgctggaaggaagacccaaacgacagaccaaacttcacacagataatacagatgctcctacactacctatccaccctttcgccacaagagaccttggcgggcccccgccgcacgttcagttcggagaacacaatcctgcccccagagtctcccgggacaagctcgctgatggcttcgcggggcgacctcggcgacacgcccaagggcaagaaggaagacaagccgaggggcttcttcttctgtttcagcgagtgctattagcacgagcccccccaaagggggaacactccgataagcttgcaaatactgaacgaacaccgtctctccccagctccgatgccctgcgactcaagccatgtccagccggtcaagtcccaggcatccatagtccgcaccctgaagaacggaagtgtagtcgaacactgttttgttttcttctgctaatcaaggtctcctgcatcgctgacatgctgatgacatataccagcagggtaaaacgacgggtaaaccttttgactccagatagtaatggtgggaatagcttacctcccctgtgttttctggcgcaccatggtgtaacggagttgctagagcgcgactatagattgccttcctgcctgcctgtctcgcccgacatcgtatagaaataaaaccaataattcgcatctgtcggtttgtctggttgcaaagggtaagctgccagtccttttgtgttcttgttctgccagttctttgtgttcttggcctggtcgtcttccgttgctgtacagctgcgttttgttgcagctgcaagatttgtgtagcaggggagactgttgcagctatgtgtatgcgttgcagcagcagcaataa

SEQ ID NO: 119277 - DNA, 498 bp, Zea Mays
atggaaggcgatcggcatcagcgtccgcgtccgctatgccaaatcgaggaatccgcgccccaaatcgaggaatccgcctccgctatggaaggagatcgcccggtcggcatcatcgtccgtgtccgctgcgcccaggttctcggtccttcgcccacgcgttgccacgaagagatggcagagcctagggtttggtctgcctcccacagccaccgctatgctttggctgcatcactcgctcctcttcggagcctcccttttgctggcggcgtaggaagagatggcagagcatttgacaagtgcaagcccaagaagtgccgccaggagtgcaagaagagctgccccgtcgccaagcccgtggttgataagcagccacaggaccaggagcacatgaaaattattgaagacgacggtccaggtgcagccttctatgccagtgctaagtccatgaccaatggaaatcacactttctatggacctgtcaagcaacaacctcaatga

SEQ ID NO: 119278 - DNA, 546 bp, Zea Mays
aaattaagtatggatgttggggataaggatcttgtgtacagtttgttacttgtcttctctagaatgttgatggatgaaaaaggcaaagagtgcattctggacaacatccaaatcacaatcagcgttcttagtgaacttgtttcctatcctcacatgatgtgaccctactgctatttttattaatccatccatactaattgtattcctgttacatgtgcgaattagtatgtcagtttaacaaccttttccccttaggttgtgcgggagacaacattacaatgtttagtagccttttcgacatttcctcacccaaagatttatcttgtgcggcgaaaggttagttttctatgtgttattagggattcagggtatccttcctagcgtggctgactgctgttacattttcgcattagtaaccaatctgcccttactaaaaagaactcaccagattgaccgttcatccaggatgtgcaggcagcaatcagggctctcgatgataagaaacgagttgttcgtcaagtggctgtccgatgccggcacacatgg

SEQ ID NO: 119279 - DNA, 2136 bp, Zea Mays
atgaagtttatgaaactcggcacccgcccggacaccttcttcaccgccggctccgtgaggtgctgctctgcgatttggggtctcgcttccgtcaggttctccgtgcgtccatggtctgtctgcacagaggtggccacagacctgcagatccttgtggataactgcctctaccatctccacaagttccctctgctctcgaaatgcatgctcctgcaagcgctctgcgccgacgccgtcgccggcgacgtcgtcgagctccggggattcccgggcggcggtgaggcgttcgaggcctgcgccaggttctgctacggcatcaccgtcacagtgagcgcgcgcaacctcgtgccgctccggtgcgcggccgcgcacctcgggatgtccgaggccaccgacaggggcaacctggccgccaagctcgacgcgttcctcgcctcctgcctcctccggcgctggaaggacgcgctgggcgtgctgcactccacgcgccactacgccccgctctgcgaggacctcggcctcacgtcccgctgcgtcgacgccgtggccgccctcatcgccagcccggataccgccctgccgtctaggtcgacgtcggcgtcgccgtggtgggcgcacgacatcgccgagctcggggtcgacctcttctggcggatcatagtcgctgtcaaggcgaccggtgccatccacgacaggaccgtcggcgacgcgctcaaggcgtacgcgcggcgttggctgcccaacgtcgccaaggatgggcacgggctctcggcgggccagccgttcgaccacgacgccggcagtgcggtcgtgaagcaggtcaccacgaggcaccgcctcctgctcgagacgatcgtgagcctgctcccagcggagagggacgccgtctcctgcagcttcctgctcaggctcctcgaggctgccaacatcctgagcgcgtccaaggcggagctggtcaagagggtggcgtggcagctggaggaggccagcgtcgccgacctgctgatcccgtcgctgtcctgcgtcagcgagacgctgtacgacgtggacgccgtgtcggccatcatcgacgagttcgcactgcggtgcgcggcggtcccgccggcgctggctctgtccgggagccccgacgacagcccggcgcactcggccgggcaccggcggtcacgttcggcggagagcgtgagcttcgacggcacgcgacgctccctgtcagccgcacccgtgtcgcagggcgctctggtgcaggtgggcaggttggtggacgggttcttgattgaggcggcaaaggatcccaacatgccgctggacaagctgctcgccattgccgaggccgtgccagacagcgcccggccggagcacgatggcatgtacaaagtcgtcgacacatacctcaaggcgcatccggagatgagcaaaagcgcgaggaagcggctgtgccgggtgctcaactgccggaagctgtcggagaaagcgtgcacacacgcggcgcagaacgagctcctcccgctgcgcgtggtcgtgcaggtgctcttcttcgagcacgcgcgcgccgcggcgctggcgccgggcgcgcacgccctggccgcggctgacctgccgagcaacatccgggcgctgctgtccaagtccgggtcgtccgaggacgaggaggcggagcgcgccgacgagcagcggctccgggcgctggccgccggcgcgtctcccggcggcgactggagcgtggagggcctccgtcgcgccgcgtccaagatcgccacgctgcggatgaagctggcggaggacgaagaccgtgacgccgacgagttcgcgcgcaaggccggcgtggcgcgcagcgcgtcgctgcggttcagggcgttctgcgcctttcccgccgggaagccgaagcggatgctcagcaggctgtggccgctgggcagaaacggcgttagccactagtagcagccatggttaggtacttaggtcctgtgatctcctgcctttttcttttctgagggtgatctgtttgtctcttctactagtactttctcggctcctccccttttgagttataattccaaggcaaattgtaccttgcattgcatgtagttgtgaattcaatggcaacaataaagatagaaattgcgctgggaactt

SEQ ID NO: 119280 - DNA, 261 bp, Zea Mays
tatttcacaaacacgaacacaatcatattgtatatatatctactaatattcttcacataaatctgtatctaaaatctagacttcaacacctaacgcgaccacttcacaatcatctcactgaatgaaacgatgtgtttgaacaacactaatataatcacaagatcatcacgactaacacagctagcctagccattcatcaaactagctaacaaaaataataaatcagctcactctagctaaatccgacttgaaaccatgaaa

SEQ ID NO: 119281 - DNA, 988 bp, Zea Mays
cactgatggatagatgtattggcaacctcatatcgaaagcccataatcccaacaaaattgactatgcggcagtaaaatctcatatcagaacttgataacttctattgcacgccattttaatcgcttaatttaatcacgcttcaaactacataaccagaagcaagtacaaaatcgtcgtcgaactaaccttgccaactcaacgccgccacagaacagatacagagagatcgaggcctgtcagattcaattttcgagtccaggcacctgcatgcgccggttggccaccgacttcttgccgccgaggaactcgtcggggacgaccttgagctgcttgcgcttcttggacttggcgatcttctggatcgtctttgggttggtgaccctctgcagtttggtgcccgtgcggagcacgttctcctgcttccgcttctcacgctcctcgcgggccttccgcttggccaccttgttctgccggatctcttccttgagctccgccttgcgggcctggtacgcgcgcttcagcgacttctcccggacgcgctgctccagcggggtcggcttccgcgacaccgccacggccgacgctcgccgggtgcgggcctccttccaccgccgtcccgacaaccgccctgcgatgacgccgtcgtaggtgggctggccgaaggaggccggcttcgaggggtcggagagggaaggcatggcgcggagcttagacggccggtgcgcgtcggcatcgaggtccatggaatccgcggccgccgcctcggcatcctcgcgacgcttgcgcttgccgcgctcgccgccgaggccctcatccaagcagcggaagtcgatgtgggaagccatgcggaaagcggtcgggtgcttggtgccgcgatttgggaggagatggaggacgaaccagaggcggagatggatttattagggtttgtgatgaagagtagcagcggatggtggatgggccgggcttgggcgaatacaaaaactt

SEQ ID NO: 119282 - DNA, 115 bp, Zea Mays
gtggcatagtcataacgacagcattacaaaacatcaaaagttaaatcaatacttggactttaggtccaccatttgttacatcaaagaaaaatgtcatgaaacaaattaaaaaaat

SEQ ID NO: 119283 - DNA, 86 bp, Zea Mays
ccgggtctttgaacgtcctgttagtcagattgcaatgagtcgacgaagtctgccaatgcaattggtgctggattcatcttcaaatg

SEQ ID NO: 119284 - DNA, 1967 bp, Zea Mays
attggacaactgtaccccacgccctctcgctgcgtttcccagtttcccttcttttagataagcagcgcagacccctaccctcgctcgcgtctccctatccattcccaaataatccccacctcccgctgctgctccgccgcccgccatggcctccctcacctcggcgtccacttcactcctcttcccgcaggcctcctcatccaggagccgcatccgtctctccacccccctgggcttctccgcgcagcctgcgcggctgcggagccagggggcggcagtgggcgcgcggcggcgcgggcgcctgctggtggtgcgcgcggcgaggggcaagttcgagcgcaccaaaccacacgtcaacataggcaccatcggccatgtcgaccacggaaagaccactctcaccgccgcgctcaccatggtgctcgcctccgtcggtggcagcgcgcctaagaagtacgacgagatcgacgccgcccccgaggagcgcgcccgcggtatcaccatcaacaccgccaccgtcgagtacgagaccgagacccgccactacgcacacgtcgactgccccggccacgccgactatgtcaagaatatgatcaccggcgctgcgcagatggacggtgccatcctcgtcgtatccggtgccgacgggcccatgccgcagaccaaagagcacatcctcctcgccaagcaagtcggtgttcccaagatcgttgtcttcctcaacaagaaggacatggtcgacgacgaggagctgctcgagctcgtcgagctcgaggtccgcgagctgctcagcaactacgagtacgacggcgacgacgtaccaatcgtcgctggctccgccctcaaggcgctcgaggctctcatggtcaaccctgccctgaagcgcggcgacgatgagtgggtcgactacatcttctcgttggttgataaagtggattcctatattccagtcccgcagaggcagactgacctcccgttcttgctcgctgttgaagatgtcttctccatcaccggtcgtggtacagttgccactggccgtatagagcgtggcaccgtcaagattggtgacacagtcgatatcgtcggaatccgggacacccggaactgcacggtcactggtgttgagatgttccagaagaccatggatgatgccatggccggagacaatgttgggctgctgctccgtggtatgcagaaggatgacattgaaagaggcatggtgctggcaaagcctggctctatcacaccgcacaccaagtttgaggctgttgtgtatgtgcttaagaaggaagagggtggccgacactcacctttcttccctggttaccgcccacagttctacatgcggacaactgatgtgacagggagtgtgactacgattatgaatgacaaggatgaggaggcgaagatgtgcatgcctggtgaccgtatcaaaatgattgttcagctcatccagcctgttgcttgtgagcagggtatgaggtttgctatccgtgagggtggtaagaccgttggtgccggtgtcatcaacaaaatcattgagtaaactggatataacatatccaccatgagaattttccttgtttactcaaagcgacatgctccgtagttgttattatgtggtgagttttaggggttgctcatgtgcaattgtagtatgacactttttttttgtcaagtgaatttgcataatttatgacattcacgacaaagattcacatatctggttgcaactcatttggctaagaggtgccatctactgttacatgtccagttgtttcttggttgtgttgcattatattgttcatatgcttaaagatgaatctcgaagatgccacaagcacatgactgtagcttatttgcagcctttagagtttaaacagcactaaaacgaatacaatcttacttgctggactttcttagcaaacctatcctgattcatttataatgcttttgtgatatgaatc

SEQ ID NO: 119285 - DNA, 2107 bp, Zea Mays
atggcctccctcacctcggcgtccacttcactcctcttcccgcaggcctcctcatccaggagccgcatccgtctctccacccccctgggcttctccgcgcagcctgcgcggctgcggagccagggggcggcagtgggcgcgcggcggcgcgggcgcctgctggtggtgcgcgcggcgaggggcaagttcgagcgcaccaaaccacacgtcaacataggcaccatcggccatgtcgaccacggaaagaccactctcaccgccgcgctcaccatggtgctcgcctccgtcggtggcagcgcgcctaagaagtacgacgagatcgacgccgcccccgaggagcgcgcccgcggtatcaccatcaacaccgccaccgtcgagtacgagaccgagacccgccactacgcacacgtcgactgccccggccacgccgactatgtcaagaatatgatcaccggcgctgcgcagatggacggtgccatcctcgtcgtatccggtgccgacgggcccatgccgcagaccaaagagcacatcctcctcgccaagcaagtcggtgttcccaagatcgttgtcttcctcaacaagaaggacatggtcgacgacgaggagctgctcgagctcgtcgagctcgaggtccgcgagctgctcagcaactacgagtacgacggcgacgacgtaccaatcgtcgctggctccgccctcaaggcgctcgaggctctcatggtcaaccctgccctgaagcgcggcgacgatgagtgggtcgactacatcttctcgttggttgataaagtggattcctatattccagtcccgcagaggcagactgacctcccgttcttgctcgctgttgaagatgtcttctccatcaccggtcgtggtacagttgccactggccgtatagagcgtggcaccgtcaagattggtgacacagtcgatatcgtcggaatccgggacacccggaactgcacggtcactggtgttgagatgttccagaagaccatggatgatgccatggccggagacaatgttgggctgctgctccgtggtatgcagaaggatgacattgaaagaggcatggtgctggcaaagcctggctctatcacaccgcacaccaagtttgaggctgttgtgtatgtgcttaagaaggaagagggtggccgacactcacctttcttccctggttaccgcccacagttctacatgcggacaactgatgtgacagggagtgtgactacgattatgaatgacaaggatgaggaggcgaagatgtgcatgcctggtgaccgtatcaaaatgattgttcagctcatccagcctgttgcttgtgagcagggtatgaggtttgctatccgtgagggtggtaagaccgttggtgccggtgtcatcaacaaaatcattgagtaaactggatataacatatccaccatgagaattttccttgtttactcaaagcgacatgctccgtagttgttattatgtggagagctgtgtcattccgctaagacagaaaaaagggtacaatgggccaagagcagaggccaaagctgagtacaaaaccccactcacccactcaaaacaacctagaccagataacaaacttgccgcaaacagaaaagaaaacttgaccagcagagcctgctgaggaactcaccgagtccggacgcccctgctaaacaccacaggacaaacccatggtttgaaggagctcagcgatgttgggctgaaccctgtcaaaaacacaagggttcctatgcttccaaacttcccatgccataagaacgatcagggaatccagtcccttgcataaaccttttttttttggcggggggggggggggggggggggggggctactcctgatgtgtgccctcaccagatagagaagcgcgtcgcctttgccgaaggtggtacagtagaccaggtccaagctctccaaaaccagggaccaaatttcctctctactagtttgttatgtttgatacttcacgtcttcttgcatttgcatcatgagcatgagctctgttcttcttgtccaatgtttattacatggcatgtggctctaaagctggggtagcattatggagatgaccacttcgttctttctttagaca

SEQ ID NO: 119286 - DNA, 256 bp, Zea Mays
gttgccccatggcttgagactggtgatgcagtggcaagtatgtacttagaatcaaggggagaggctcgtgattttgccagggtccggaatacctgctttgagcagaggctagacaggcttacttggttggcaacaaggctcttgcgaaggagctcagcatgaaggggcaggcctacaatgtgcaaatgaaagcggctcatgagatatatcttacatagaaacttagtgtgcctttatttagatatgtagtgcattt

SEQ ID NO: 119287 - DNA, 809 bp, Zea Mays
ttcgacaaatttgtagcaactagcagaggcccaagggatacatgtcccggtgccccccaccacctcccgttcattatccttggtcttcacctccacctacacctacatctccatctaccgaacatcaggtatgcaaattcatcatcatttacttgttgttagttatattatgatgtaactcatttgtacatgtatattagacccctccagctaccttgccgacgcatgaacgagaagacgggttagactttgtcgaaaccctcttcgctagtggaggtatcgaccagcactcgtcactgtaacccgatggtgatcggcgaccgttagcttccatgttattgtgttatgatacttgagacttttattatgactatgtatgagatattgtctcttattagtactggatgatgagatgtgtcttattatgactatggatgggacttttgtgatgtaattgatgagactatggatttaaatattgttatgtgattgtgtgtgacatgttttatgtgaaaatatgttgtgttatatagttgttgatatatttgttatgttgtggaatgtggtgtaaaataaaaataaacaacatttgtaatgctggtcaaattaacttcctagaggcttattgggccgtaggaagttagctagctaacttcctaggggctacagtcagtcgtaggaagttagccagctaacttcctaggggctacagttagctgtaggaagttagtcgtaggaagttagtcgtaggaagttagtcagctgacggcgtgaagctactaacttctgagaacctactaacttccgag

SEQ ID NO: 119288 - DNA, 1287 bp, Zea Mays
atcacacactcctggggacgccgtacgtagccaacagagattccccccgcacgtacaccatgtggctagtgtcctccctccgtgccgctctgtgcctgttgctcgccgtcctcgccagccaccgccagcctgcggcggccgtcgtcacgctgtcgacgtcgtcgcggtggatcgtggacccggccgggcaccgggtgaagctggcctgcgtcaactggccgtcgcacctggagtccgtggtgaccgaggggctcggcaggcagcccgtgggcgccatctccgggatgatcgtctccatggggttcaactgcgtccgcctcacgtaccccatcgcgctggtgaccaacgcctctctgtcggtgctcaccgtgcgccagtccctcctggccaacggcctcgccgagacggtcggcggcgtcgaggtcaacaaccccagcttccttgacctcacgctcatcgagtcgctcaaggctgtggtgaacgccctgggggagaagaacgtcatggtgatcctggacaaccacgtgagcacgccggggtggtgctgcagcaacgacgacggcaatgggttcttcggcgacagggacttcgacccaaacgtctgggtggacgggctgggcagcatggccaccatcttcgccgacgtgcccaacgtcgtcggcatgagcctgcggaacgagctccgaggcccgaggcagaatccccaagattggtacacgtacatgcagaggggcgcggaggcggttcacgcggcgagcccgagggcgctggtgatcatgggcggcctgagctacgactacgacctgtccttcctcgccgcgaggcaggtgggcgtgagcttcgcggcggagaacaagctggtgttcgaggtgcactggtacagcttctcggacgcgcgcgcgtgggagacggagagcgccaacgaggtgtgcggccgcgccgcgcgcgacttcgcgcgccgcggcgggttcctgctcgcacggggcttcccgctcttcctcagcgagttcggcgccgactcccgcggcggcgaccccaaggacaaccggttcttcccgtgcgcggccgccgtggccgcggagcacgacgtggactgggcgtactgggcgctgcagggcagctacgcgctgcggcagggcgtcgccgggatggacgaggtgtacggcgtcctcgactggtcctggagcaagccccgcaacgagaccgtgctcccgaggatccaggcgctgcagcggccgctccaaggttagtcgaagacgttgctgcttgctccaggttccaatggcg

SEQ ID NO: 119289 - DNA, 1874 bp, Zea Mays
ccaaaagcaagttcgatctccgctcctccagtctccaccgcccgccaaccccgagatatacctcccttcctctcgaagcttcgtctccagagtccagacgacgtcgccggctcttcactcggcgctggtgctggtggttgccagtggcggtggctgggtggccgggtggcggtgttgctgggatgcccgccgcgacggcgaccgccgcccgcctccgactgccgctgccaaaagcagcccaccgctcgccctgctcgagccggcgcctctccaattgccaccgccactgacgagcgaccacacgcttggcgcccgccatggacgccttgtcccgccccgctgttgtcatcgacaacggcaccgggtacacgaagatggggttcgcggggaacgtggagccctgcttcatcacccccactgtcgtcgccgtcaacgattccttttccggttcaggccagccggcggcgaggggcgcccctgccagggggaactggctcgctcagcacagtgccggcgtcatggctgacctcgacttctacatcggccaggaggcgctggcccgatcccgcgccagcagctcgcacagcttgagctatcccatccgcaacggccaggtggaaaattgggattctatggagaggttttggcaacagtgcatcttcaattacctccggtgcgacccagaagatcattattttcttctaactgagagccctctgactgcccctgagatccgggagtataccggggagatcatgttcgagacgttcaatgtgcccggcctctatattgctgtccaacctgtccttgctctagctgctgggtacactacaaccaaggtgttgtagttgatgtgggtgatggggctacccacatcgttccagttgctgatggttatgtcattgggagcagtatcagatctattccaattacaggaaagaggtgagaacattccaccagaagaatcttttgatgtagcaaggaggatcaaagaaatgtactgttatacttcttcagacgttgtgaaggaattcaataaacatgacagggaaccatcaaagtatgttaaacactggacgggcatcaaaccaaaaactggtgcgaaatacacatgtgacattggatacgagcggttcctggggcctgagatcttcttcaacccagagatgtataacaatgacttcaccactcccttgcaagttgttatcgacaggtgcatccaatcatccccaattgacacaaggagggctctttataagaatattgtcttgtctggaggctcgactatgtttaaagatttccataggaggttacagcgggacctcaaaaagatagtggatgcacgggtccgtgcatctaatagtcggcttcttagtggagatgctaaggcccagcctatagaagtgaatgtggtcagtcatcctattcagagatatgcggtatggtttggtggatctgtgcttgcttcaactgccgaattctacgaggcttgccgcacaaaagcagagtatgaagagtacggtgcgagcatctgccgatcgaaccctgttttcaaagggatgtactgactcagcctatcatagtcctgttctcaagggtatatatgtatttaaaccgagatctgttccctgtggctgacgtcgtgaatggcgtccactcaagcgtaaatggggagatctgacagcggaaacggactgccaagagggatcctggagaatcctagccgtaggagctgtacaaaagtaaagtgcaaatataggttcattttttatcatacaatttagatgctggtaggcctgacgggatgggtttgccacctctgctgaactgggtggcattgtaatttgtagcgtcaacattggtgcttgtataca

SEQ ID NO: 119290 - DNA, 1958 bp, Zea Mays
ccaaaagcaagttcgatctccgctcctccagtctccaccgcccgccaaccccgagatatacctcccttcctctcgaagcttcgtctccagagtccagacgacgtcgccggctcttcactcggcgctggtgctggtggttgccagtggcggtggctgggtggccgggtggcggtgttgctgggatgcccgccgcgacggcgaccgccgcccgcctccgactgccgctgccaaaagcagcccaccgctcgccctgctcgagccggcgcctctccaattgccaccgccactgacgagcgaccacacgcttggcgcccgccatggacgccttgtcccgccccgctgttgtcatcgacaacggcaccgggtacacgaagatggggttcgcggggaacgtggagccctgcttcatcacccccactgtcgtcgccgtcaacgattccttttccggttcaggccagccggcggcgaggggcgcccctgccagggggaactggctcgctcagcacagtgccggcgtcatggctgacctcgacttctacatcggccaggaggcgctggcccgatcccgcgccagcagctcgcacagcttgagctatcccatccgcaacggccaggtggaaaattgggattctatggagaggttttggcaacagtgcatcttcaattacctccggtgcgacccagaagatcattattttcttctaactgagagccctctgactgcccctgagatccgggagtataccggggagatcatgttcgagacgttcaatgtgcccggcctctatattgctgtccaacctgtccttgctctagctgctgggtacactacaaccaagtgtgaaatgacaggtgttgtagttgatgtgggtgatggggctacccacatcgttccagttgctgatggttatgtcattgggagcagtatcagatctattccaattacaggcaaggatgttacccaatttattcatcaacttctaaaggaaagaggtgagaacattccaccagaagaatcttttgatgtagcaaggaggatcaaagaaatgtactgttatacttcttcagacgttgtgaaggaattcaataaacatgacagggaaccatcaaagtatgttaaacactggacgggcatcaaaccaaaaactggtgcgaaatacacatgtgacattggatacgagcggttcctggggcctgagatcttcttcaacccagagatgtataacaatgacttcaccactcccttgcaagttgttatcgacaggtgcatccaatcatccccaattgacacaaggagggctctttataagaatattgtcttgtctggaggctcgactatgtttaaagatttccataggaggttacagcgggacctcaaaaagatagtggatgcacgggtccgtgcatctaatagtcggcttcttagtggagatgctaagtttttcagtgacaacatcatatatgattttcaggcccagcctatagaagtgaatgtggtcagtcatcctattcagagatatgcggtatggtttggtggatctgtgcttgcttcaactgccgaattctacgaggcttgccgcacaaaagcagagtatgaagagtacggtgcgagcatctgccgatcgaaccctgttttcaaagggatgtactgactcagcctatcatagtcctgttctcaagggtatatatgtatttaaaccgagatctgttccctgtggctgacgtcgtgaatggcgtccactcaagcgtaaatggggagatctgacagcggaaacggactgccaagagggatcctggagaatcctagccgtaggagctgtacaaaagtaaagtgcaaatataggttcattttttatcatacaatttagatgctggtaggcctgacgggatgggtttgccacctctgctgaactgggtggcattgtaatttgtagcgtcaacattggtgcttgtataca

SEQ ID NO: 119291 - DNA, 669 bp, Zea Mays
cccagagatgtataacaatgacttcaccactcccttgcaagttgttatcgacagaatattgtcttgtctggaggctcgactatgtttaaagatttccataggaggttacagcgggacctcaaaaagatagtggatgcacgggtccgtgcatctaatagtcggcttcttagtggagatgctaaggcccagcctatagaagtgaatgtggtcagtcatcctattcagagatatgcggtatggtttggtggatctgtgcttgcttcaactgccgaattctacgaggcttgccgcacaaaagcagagtatgaagagtacggtgcgagcatctgccgatcgaaccctgttttcaaagggatgtactgactcagcctatcatagtcctgttctcaagggtatatatgtatttaaaccgagatctgttccctgtggctgacgtcgtgaatggcgtccactcaagcgtaaatggggagatctgacagcggaaacggactgccaagagggatcctggagaatcctagccgtaggagctgtacaaaagtaaagtgcaaatataggttcattttttatcatacaatttagatgctggtaggcctgacgggatgggtttgccacctctgctgaactgggtggcattgtaatttgtagcgtcaacattggtgcttgtataca

SEQ ID NO: 119292 - DNA, 977 bp, Zea Mays
cacagccttggcactggcaccagagtcaccacagagcctcaaaccggttgcgggacacacaagcaggaaccagcagccatgatgatcaagctgaggtactccaagaggctcttcaagaggagctcctcctcgtccaagcagcaggcggcccctcgtgggggcgacaatggcggcggcggcgcaggggagatcgagtgggaggtgaggcccggcgggatgctggtgcagaagagggaggaggggaggggcggccaggagacggtcacggtcagggtgtccaccggcttctcctggcatcacgtgtccattggagccacctccacttttggggagctgaaggtgatgctgtccatggtgacaggactgaagacccgggagcagaggctgttgttcaggggtaaagagagggatgacaccgaccacctccacatggttggggtgagggacaaggacaaggtccttcttctagaggacccggcgctcaaggacatgaagctccgggctctctcagccccctaaacgaccttcttcttttattcaattgtaacccgcaccgcagcttgctatcgtgctaactattaccactgcttattagttacagagtacaagatcgtactactacttagtatctcgaaggtacttctagttcctggaagattttttataatccggaatccgagggttttgttctatgaagccctcttacttagtccactcgtactcttagtgccactccatggaaggggctaagggtccctgaagatgagagtgagagagccttttgatcatgttctagcttagcttgttgcaagtgtgatttgaagcctagtgcgctggggtttcttttatggccatttctctctcattcctctacattcatgcgtgggtcatggataggcatgagaaaagattgtacgtacgtatcttgtgttcctgttccccaatgaatggatggaatcaaacgtgtgtcactttcc

SEQ ID NO: 119293 - DNA, 1556 bp, Zea Mays
ggcaaaaaaggcatgctcctttttttctcaatcaatcaatcctactaccactaccaccatctatccaacaaccgagccagtaaatagccaaggatgccaggaagcagtaattcgagagcaggaaaccggggaactcacgctttggtggcggcgtagacggagtagagcggatcagaaggcacgacggaggcggcgccggagccgatgttgacaatggcgccgcgcttccgctcgaccatgcctggcagcacggcgtgcgtgacccgcgtgacgccctcgacgttgacccggatgaggctgcgcatcagctcctcgtccacctcgtggaagtagcgcgcgtacgggtaggacagcccggcgttgttgacgagcacgccgacgtcgaggccacggatggagtccttgagcgcctcgacgccggccgcgagcccctcgctggcgaagtcgagcacgaaggtgcgcacctcggggaccttggggtgcttggccctgatctcggcggccacggcggccagcttctccgggttgcggccgacgaggacgagcccgagcccggccgcggcgaggcggaacgcgacggcgcggccgatgccgtcggtggcgcccgtcacgacggcccaggcgccgtagcggcggcgcaggggcttccccgggcggaggaacgcggcgtagacccagagcgcgaagcgggcagcggcgcggacggccacgagcaggcccacggcggccagcaccagcgcccaagccggctgcgcgcggaggaactcgacgtgggcgcacgtgccggccatggcgccgtctgattcgtgtagctggtcgatgcggtgcggtgtcgagctttggacgggacttattagtaacggggatgggctttctctggtggtgggtggaactggtgtaccaagactaaccgaacacgaacagaaattctctctcgttggtagagttcgtatcgacggacagatttcaaattggatttttaagaagttctggtggtggtagttttattagaaatgtatataggtccggtgtagcaaagaatgcgagtcaaagtagcaagcaacctttgaatggatggatcgcaggtttacaacaacatggcctgggggtttcaaaacgaagtacccacactctttggacacgtcaaactcatcgacgtgtttggtaggctcaccggcaccgcccagtgttttgcagacgaaccgtggcctgcgagctgcgaagacagcagcagcggcagagatgcagacgcagccacgcaggtagggctgaactggctggcatcaggcatccggattccggaggccggagcaggtgcacaccagaggcaaaccgagtccacggcggtgcaccgggcgcaacttggctctgatgtagttactgtggagagtcttgacgacgatggggacggcggtgctggcaggcagtggcggcctgcatgacgggtgcccagctcgctgcccatcgagccgaggcgcgccagcgaggagtggcgccgtgccggacactggcagcattaacgcacgcgcggctggcgctggcggtcaggtggggag

SEQ ID NO: 119294 - DNA, 732 bp, Zea Mays
atgttacagatatcagtcctcgcgaaatccattcacactcttgcacgtatggaagacccaatcaaccaaatactcaaaagaacagaggtttctgaaaatttaattctcgagaaaacatcatgtcctttgggtgtcctattggttatttttgagtccaggcctgatgccttggtccagattgcatctttagcgattcgaagtggcaatggtcttctcttgaaaggtggaaaagaagccatgagatcaaacaaagtattgcataaggttataactggtgccattcctagcaacgtgggtgaaaaacttattggccttgttacaagtagagacgaaattgctgatttactaaagcttcatgatgtaattgatcttgtcattccaagaggtagcaataagctggtttcacaaatcaaggcatcaactaagatccctgttcttggtcatgctgatggtatctgtcatgtatacatcgacaaatcagctaacatgaatatggcaaaacaaatagtgatggacgccaaaattgattacccagcagcctgcaatgctatggagacattgcttgttcataaagatcttataaaggctccacgtcttgatgacttactgctatcactcaaaacagaaggagttgctatttttggggggccagttgcacatgaagtattgtgcattctagaagcaaattcattccatcataaggctgcaacaccatctagtggaggtagataa

SEQ ID NO: 119295 - DNA, 331 bp, Zea Mays
gcatggacaaagcaatcaatataaataaatatataatttatactggcattgtcatgctgggatttctgtttgatgcatcaaatatatgcttgaaattcagaatcaaacttaggattgaaatgggaaaggaaattggaatgaaagacacttattactggaattaaataaaggggaggaggaaaaatactaacatcgaaaatagtggcgtttatattaataaattggatcatattttatactgggaacctgaacttcaaaataggaaatttgaattgaatattgtaaacttgaactagagaagagaatagaaatagaaagaacaaaaaaaaga

SEQ ID NO: 119296 - DNA, 526 bp, Zea Mays
tttcatggaggcagatttatggcgatggaggtacctgttttctgtcgtcctacaatacaagcgaaactgcatgctgctgcgctgatcaacaactccctgaccaaatccgggcagcttgggactgcattgtttggtgccatttcaaaatacaaaaacatttcaagattcatttctcccatctctcaaacatctacgaagaacataggtccatgttgtagcttcagctcatcttctgatggtaatggatacatggctggaaactctagcgagagtgatgaagactatgttaattctactgtgctagaagcaggtaattcttcacacaagatggtctgcttttatatggagaatgccacacaacattcaagttttacttaggctttatttatttgctactctagacttaatctctactactctataagaatgcaatgtaggcgtccacatggtgcacggttctgcctcgccctcacccctgcatgaaaaacaagaaattttggaatatttcaacactttactggcatga

SEQ ID NO: 119297 - DNA, 1696 bp, Zea Mays
gcaacggtccaggtttccaaggtccaacgttccgacccacgggaagcttctagaaaccattagacgcaccggtcgcgttcctcctcatggcccccacttgtcatccgtccatcctcacgtctctgccccaccattttaccggtagccaacaaaactaggttccgtggcgtcgggtgggaccagcaagcagccgccgcagccggcccccaggcgcctctatatacggcactccgactccgatacattggcgacatcacagatcacacacactcgagaactccatttcgatctcatttgaaatcaacccatcctcgtttcctccgtctagcagcctctcaccctcatggccaagatcaagatcgggatcaatgggtttggcaggatcggaaggctggtggccagggtggccctgcagagcgacgacgtcgagctcgtcgccgtgaacgaccccttcatcagcaccgattacatgacctacatgttcaagtatgacactgtgcacggacagtggaagcaccatgaggtcaaggtgaaggactccaagacccttctctttggtgagaaggaggttgctgtgtttggctgcaggaaccctgaggagatcccatggggttcggttggcgctgaatatgttgttgagtctactggtgttttcactgaccaggagaaggctgcagctcacttgaagggtggtgccaagaaggttgtcatttctgctcctagcaaggatgcccccatgttcgttgttggtgtcaacgagaaggagtacaagtctgacatcaacattgtctctaatgctagctgcacaaccaactgccttgctccgcttgctaaggtcatcaatgacaagttcggtattgttgagggtctgatgaccactgttcatgccatcactgctacccagaagactgttgatgggccctcatctaaggactggaggggtggaagggctgctagtttcaacatcattcccagcagcactggagctgctaaggctgttggcaaagtgcttcctgtcctcaatggaaaattgactggaatgtctttccgtgtcccaactgtcgatgtttctgttgttgatctgactgttaggcttgagaagtctgccacctatgatgagatcaaggctgcggtcaaggccgaggcagagggtagcctcaagggcattctgggttatgtcgaggaggaccttgtttccaccgatttccagggtgacagcaggtctagcatctttgatgcgaaggctggcattgccttgaacggcaactttgtgaagcttgtgtcctggtacgacaacgagtggggatacagcacccgagtggtcgacctgatccgccacatgaacagcaccaagtaaatgaacaaactgatgaaagcatgcaaagagtgatgaaagcatgcaaagagagttgtgtttcttccccggaagtgcttccgagaataaatttttcttatctgattgtctaaaacctataattggtgtaatggtatcgtagtggttggttgagcattgagtgactcatattttgtcaggtctatgtgttatcgttaaacttttaacggtcattctatttcaaaagttttgcattttgcaatctttgacgctccatttcacttcatagttccacgtcatttcttccttcatttggctatttggttgtcggcttctttatagttccacgtcttttcttccttc

SEQ ID NO: 119298 - DNA, 1388 bp, Zea Mays
ttttttatcgctggtggtgacatttccgctgattttcttttgtttgtttggttgcttgtgtttgtgctctggtatacgcagccaagatcaagatcgggatcaatgggtttggcaggatcggaaggctggtggccagggtggccctgcagagcgacgacgtcgagctcgtcgccgtgaacgaccccttcatcagcaccgattacatgacctacatgttcaagtatgacactgtgcacggacagtggaagcaccatgaggtcaaggtgaaggactccaagacccttctctttggtgagaaggaggttgctgtgtttggctgcaggaaccctgaggagatcccatggggttcggttggcgctgaatatgttgttgagtctactggtgttttcactgaccaggagaaggctgcagctcacttgaagggtggtgccaagaaggttgtcatttctgctcctagcaaggatgcccccatgttcgttgttggtgtcaacgagaaggagtacaagtctgacatcaacattgtctctaatgctagctgcacaaccaactgccttgctccgcttgctaaggtcatcaatgacaagttcggtattgttgagggtctgatgaccactgttcatgccatcactgctacccagaagactgttgatgggccctcatctaaggactggaggggtggaagggctgctagtttcaacatcattcccagcagcactggagctgctaaggctgttggcaaagtgcttcctgtcctcaatggaaaattgactggaatgtctttccgtgtcccaactgtcgatgtttctgttgttgatctgactgttaggcttgagaagtctgccacctatgatgagatcaaggctgcggtcaaggccgaggcagagggtagcctcaagggcattctgggttatgtcgaggaggaccttgtttccaccgatttccagggtgacagcaggtctagcatctttgatgcgaaggctggcattgccttgaacggcaactttgtgaagcttgtgtcctggtacgacaacgagtggggatacagcacccgagtggtcgacctgatccgccacatgaacagcaccaagtaaatgaacaaactgatgaaagcatgcaaagagtgatgaaagcatgcaaagagagttgtgtttcttccccggaagtgcttccgagaataaatttttcttatctgattgtctaaaacctataattggtgtaatggtatcgtagtggttggttgagcattgagtgactcatattttgtcaggtctatgtgttatcgttaaacttttaacggtcattctatttcaaaagttttgcattttgcaatctttgacgctccatttcacttcatagttccacgtcatttcttccttcatttggctatt

SEQ ID NO: 119299 - DNA, 1371 bp, Zea Mays
atcaatctctctgtgtgctttccagctttctggtgtcgtacggcttctcgacctcttcttttatttcgggcctccagccctccaggtacaagcttgactcagcttccctgctccgttcttcttgccttgcccgttctcgcgcctgtgctgttcctgtgcgcatcatacagaatgaggagatcgtcgcaggggatgatgggcctaagctacgacgcggacagcgggagacgcctgctggctcgctacgccaaggcgaagccgaggccgtccaagtgggacgacgcgcagcggtggctctcctcctcccgtgcgcacgacgacgacgaccggcgccggagctcctgcgcggacgaccgcctcctgctgccgtcggcatcgcagaaggcgcgacactcgtggagcgccgcggacggcggcgccgccctgcccgcggcgctggggctcggcgcgcgggacgacgcgggtgcggaggcggagaccaagagggtggactccgttctggcgtacgggcagccgccccggtgcccctcgctgcgggacgtcggcacggagatgacgccggccgggagcaaagagccatccagggccaacaccccacgcgcaaccctaccggccacgccgccgtccacggcggggcgcgcgatccacgcaccgctgcgcccaccggatttgtctacggtcgacggtggatcgccaccaggcctagcggcagcggaccgcgacgagacggcgcccggtgcgccgacgacgacggccgtgtcgcccgcggcgacgtgggacgccgccgagcgcgccaagcacatggccaggtatcggcgcgaggagatgaaaatacaggcctgggaaaaccggcgacggcaaaaggcggagctgcaaatgaaggtggccgaggccaaggcggagaggatgaagctacgggcgcaggagaagacggcgagcaagctggcctcggcgcaggcggctgcgagggagaagcgcgcgcaggcggaggccaagctgaaccggcgcgccgcgcgggtcgacagggcggacgcgctcaggcggaccggccacctgccgtcctcctcctccgtgttctcgctcaagctgccgctgatgtgcagatgagagccgaccgaggggggtgtggcacagcagttcacacggatgctgttcagagtttcagtcaactgtcctgttagaattggtcgggacgctgctcgcgtccttgtgtttcagccgagcggtttgcgatgcacacaggcacatggcacttagaattgtagacatttgtttttttatctgcacaaatcagtgaagaacaaaaatattttatatttactctattggtccaaataaaaggataactaccgtttaaagcggttcacgctt

SEQ ID NO: 119300 - DNA, 1609 bp, Zea Mays
cttgccttgcccgttctcgcgcctgtgctgttcctgtgcgcatcatacagaatgaggagatcgtcgcaggggatgatgggcctaagctacgacgcggacagcgggagacgcctgctggctcgctacgccaaggcgaagccgaggccgtccaagtgggacgacgcgcagcggtggctctcctcctcccgtgcgcacgacgacgacgaccggcgccggagctcctgcgcggacgaccgcctcctgctgccgtcggcatcgcagaaggcgcgacactcgtggagcgccgcggacggcggcgccgccctgcccgcggcgctggggctcggcgcgcgggacgacgcgggtgcggaggcggagaccaagagggtggactccgttctggcgtacgggcagccgccccggtgcccctcgctgcgggacgtcggcacggagatgacgccggccgggagcaaagagccatccagggccaacaccccacgcgcaaccctaccggccacgccgccgtccacggcggggcgcgcgatccacgcaccgctgcgcccaccggatttgtctacggtcgacggtggatcgccaccaggcctagcggcagcggaccgcgacgagacggcgcccggtgcgccgacgacgacggccgtgtcgcccgcggcgacgtgggacgccgccgagcgcgccaagcacatggccaggtgaccgccatcactcgctagctgccggctaccgaataccaacgcgcgctttctcctccgcacgttgctgaaccatgtggaggggcaaaacggcggcaacaaacggtcaaacgccactgccacggtagcagactagcagtgccggtgcatgcaccggagtggtgtgttgcctttgctttgcctgttgcctcactcacagactcactgatgagcagctcgtactgtactgtacatgctctgcgtgctgacgaggtcgctggcgctctcttctcgcaggtatcggcgcgaggagatgaaaatacaggcctgggaaaaccggcgacggcaaaaggcggagctgcaaatgaaggtggccgaggtacgagtagtcatggccatatgtttcatcagcctagaaaaaaagtttggacctgtggaagtcaaccacgcaccagatacggacctttcgatccgaacaatggaaggaaattgaaatgctcatcgctggggcaggccaaggcggagaggatgaagctacgggcgcaggagaagacggcgagcaagctggcctcggcgcaggcggctgcgagggagaagcgcgcgcaggcggaggccaagctgaaccggcgcgccgcgcgggtcgacagggcggacgcgctcaggcggaccggccacctgccgtcctcctcctccgtgttctcgctcaagctgccgctgatgtgcagatgagagccgaccgaggggggtgtggcacagcagttcacacggatgctgttcagagtttcagtcaactgtcctgttagaattggtcgggacgctgctcgcgtccttgtgtttcagccgagcggtttgcgatgcacacaggcacatggcacttagaattgtagacatttgtttttttatctgcacaaatcagtgaagaacaaaaatattttatattt

SEQ ID NO: 119301 - DNA, 783 bp, Zea Mays
cgttcgtcctcgccagtacagtgttccgcggttccgttcgctccgccgctcattcctttcctccaccgacccccgggggctcacaagattctgaggctgtgtttcttgagctgtcgtgcatttgtcgggacacaatgaaagctagagaacccaagaagccaaggggccatgtcaaatggaatgaggagaatttaaatgacattgagttaaacaaaccagaaagagagaagatcactgagcctaagacaccttaccaccctatgctcgatgaagatgaagggcctgtttcaccattacatctcagtgaaagttcagtggataaatctgctcatgctgatgccataaagaccgctctagctaaagctgtttcaagtgggaagatttttgacagaaatagttgggatacgtgtgacagtgaagaagccataaaacaagggaaagcttttgaggaacaatggaaggttcactatgatgaataccataagatgaaggaactacttgagaagggaaccatgaatgatgactccgatgaagatgagggtgacctagggaacaagaagggttgatggttcgatctgtcctggtctgaactcgggatgtgacttacaaaatccacggtatcatgggaagtatgttgagcacttaaggactactatcgacttattagctatgcataactgcaccatcatttcctgcacaaaacttggcagttccctcccttaggaagtttatgccatgcttaagcatcttaccattcaaattgcaaccgagagtgtttctgta

SEQ ID NO: 119302 - DNA, 1515 bp, Zea Mays
gtgatcatgcatcacatcgactaagcctttctcgtacacattgttccaaatcatcctttattcaaaactgaaattgtggaaataatagtacataactaagcaactttaagttcataacttggcaactacctacatgacaaactacaaaccataaagacttcataagtaataatagtaggcagcccacatctagctattgtaggcatcctattataacatctagctattgtaggcagcccacatctgaagtgcgatctgatctcttagagcacttccatcacttgattctgtgtcattgagatagttgatatctccctctggaacatcaacatattgacttggagagatgtaatccggttggttgtcaagccatctttcgtctccattttgccctctaattatgttgtgaaatgcaacagttgcagctgcgatcttaatttgttctctatgggatgaaatgtgcctacttttagaatcgagaaccttttctttagaacactgatggccctctctatatggttacagagaattgcatggcggtggttgaacaactctctgtatttcgcataaccactttgtgatgaacgacgcctcctaaactcgttgagatggtatcgaacccctctatatggtgcaatgaaggatgatgtatttgcataaccaccatctactagataaaactttccttctggcacactaaatcctttgctaatagcagatcgaagcacccctgcatctgaggctgacccctcccatccacatgaaacaaatgtgaaattaaggtcaaagtcgcaggctaccataacattatgtgaaagagttcctttcctgtttctatatggagcagccctatgttctgatatggtgatgggtatatgtgtgccgtcgattgcaccaatgcagttctgcaaggaaaagaataaggaaagagattgaggccatgtggcaaattggcaatgaaaggaaaagaataaggaaagatattgatagcacacctgaaaaaatggcatgaacctagaatctgttgcaattttggtatgagtttggatagagctaggaagcttcacaaaacgctgagttagtgtgggaacaatatcaaatacttcggatatttttctatggatagtctctccactatgttgaaaagccttttgtagcatttggttactagcattgtgggagatcttgtacatgaacatcccaagctgctcctcaatggtaactcctcgtgtgtctcatagtaaattctctcttctaagaaaatttgttgtggttctgaatattgctggctccattcggaactcggatttgcaccaactctcatgtccttcaaggatttctctaaccttttttagcaccagtgagtgaggaggtgtggatgggctctttctcttctgagaggtatggaattatagcaggcagaataacaaagaacaactcatcgtcgtcttcttcctcatctaacaaaaattgtctaacttgctcctcccaagaacccatatctatagaagtgga

SEQ ID NO: 119303 - DNA, 952 bp, Zea Mays
aaagccaagttccaccaggccgaaacgtttctttagtctttaccctaaccttccagcgaaggcacacagccgccgccgtttcttcatcttctcgcagcgccggcgctccatcttcccctcccttccgtactcgcgctcggcacgcgggcaacggcagcggcgctcaggctctcagcgacggcgtcagcggcttcccctcccgactctcgccagtcgcctcgcgccctagcctccgatcctccgcacaccggccggtgacccagcgttcagttagtggtccattgaagtgtagctgtattgcgatcttcaactgctggggccatggcctacgagattagtgagatcaaaaagattggcataggtctggtggggtttggcatcctattctcattccttggtgttatccttttcttcgataggggcttgttagctctgggtaatattttctttttaactggagtgggtctgttactcggttggcaatctatgtggcagcttttcacaaagaaggcaaaccttaaggtactctagacgtgcatagatacaggatcacttttctgaagtttgtcttttccattattgatcctcataaatttttatttctgttctaaacatgaagttgtgttgtataatacttgaactgatgaagttcctagtgtttgggcatctttgtgatggtggctgttgcagtataccatcaaaatgtggaagcagaaagataactttgacaggattattatagttttatttcatccttgaaatatggttttaggtgatagttatttttgtttattattccatcttcgccaaattaataacttcttgatttgtccgatttcagttgaagctaaccttctgaatgtgtgttgatgcaacaacttctcttagcataattttataagcaaacaaataatttattatgaggatgtatttatttaggggaacaacgctg

SEQ ID NO: 119304 - DNA, 1196 bp, Zea Mays
aaagccaagttccaccaggccgaaacgtttctttagtctttaccctaaccttccagcgaaggcacacagccgccgccgtttcttcatcttctcgcagcgccggcgctccatcttcccctcccttccgtactcgcgctcggcacgcgggcaacggcagcggcgctcaggctctcagcgacggcgtcagcggcttcccctcccgactctcgccagtcgcctcgcgccctagcctccgatcctccgcacaccggccggtgacccagcgttcagttagtggtccattgaagtgtagctgtattgcgatcttcaactgctggggccatggcctacgagattagtgagatcaaaaagattggcataggtctggtggggtttggcatcctattctcattccttggtgttatccttttcttcgataggggcttgttagctctggattttctttttaactggagtgggtctgttactcggttggcaatctatgtggcagcttttcacaaagaaggcaaaccttaagggatcagtgcctttcttcattggtttgtttcttctgtttgtccgttggcctgttgctggtataatcatggaactatatggatcttttgtgctcttcagtggttatgggcctcctatccaggccttcctgtatcaaataccaatcattggttggattctgcagtacccattccagctgcttggtcagttgaggcgtaaacgcacctgaaatgttctgcaactgccaagatactctttgactcttcatggttaaagctatggtttattgttcatatttagacaataagagttcataagttgatggatgctccgactcttgaagcaggacctcagtgccttttggtcatcacaacaacaatggggccagagtgatcacacctgatttatttctgattctggaatctggacacaatttgacaaattattttgcaagttgcacggacggaacccttgaagaaaactagagaaaacaaaatcttacagtggagcttgatagcccacctgatgaataccacgcgtgatctgcttcatttttttgtcagatgcaatgttcatatggtgagacgcctttggtatttgaatttcgttgcagatagtgacatatggttctatcagctgaagagtgatgcctttttccattgttttgattggaaatgtgatgctgttaatgtttggaacaa

SEQ ID NO: 119305 - DNA, 1337 bp, Zea Mays
aaagccaagttccaccaggccgaaacgtttctttagtctttaccctaaccttccagcgaaggcacacagccgccgccgtttcttcatcttctcgcagcgccggcgctccatcttcccctcccttccgtactcgcgctcggcacgcgggcaacggcagcggcgctcaggctctcagcgacggcgtcagcggcttcccctcccgactctcgccagtcgcctcgcgccctagcctccgatcctccgcacaccggccggtgacccagcgttcagttagtggtccattgaagtgtagctgtattgcgatcttcaactgctggggccatggcctacgagattagtgagatcaaaaagattggcataggtctggtggggtttggcatcctattctcattccttggtgttatccttttcttcgataggggcttgttagctctgggtaatattttctttttaactggagtgggtctgttactcggttggcaatctatgtggcagcttttcacaaagaaggcaaaccttaagggatcagtgcctttcttcattggtttgtttcttctgtttgtccgttggcctgttgctggtataatcatggaactatatggatcttttgtgctcttcagtggttatgggcctcctatccaggccttcctgtatcaaataccaatcattggttggattctgcagtacccattccagctgcttggtcagttgaggcgtaaacgcacctgaaatgttctgcaactgccaagatactctttgactcttcatggttaaagtaccgtgttgttgtgatgtttatacatgattctcacttgtacccttcaatccttcacgttgcgtcttcaactcttgtgcatattcgtactctgagtcattctggcattgtccctttttgcgagcaggctatggtttattgttcatatttagacaataagagttcataagttgatggatgctccgactcttgaagcaggacctcagtgccttttggtcatcacaacaacaatggggccagagtgatcacacctgatttatttctgattctggaatctggacacaatttgacaaattattttgcaagttgcacggacggaacccttgaagaaaactagagaaaacaaaatcttacagtggagcttgatagcccacctgatgaataccacgcgtgatctgcttcatttttttgtcagatgcaatgttcatatggtgagacgcctttggtatttgaatttcgttgcagatagtgacatatggttctatcagctgaagagtgatgcctttttccattgttttgattggaaatgtgatgctgttaatgtttggaacaatgatttatt

SEQ ID NO: 119306 - DNA, 1333 bp, Zea Mays
aaagccaagttccaccaggccgaaacgtttctttagtctttaccctaaccttccagcgaaggcacacagccgccgccgtttcttcatcttctcgcagcgccggcgctccatcttcccctcccttccgtactcgcgctcggcacgcgggcaacggcagcggcgctcaggctctcagcgacggcgtcagcggcttcccctcccgactctcgccagtcgcctcgcgccctagcctccgatcctccgcacaccggccggtgacccagcttagtggtccattgaagtgtagctgtattgcgatcttcaactgctggggccatggcctacgagattagtgagatcaaaaagattggcataggtctggtggggtttggcatcctattctcattccttggtgttatccttttcttcgataggggcttgttagctctgggtaatattttctttttaactggagtgggtctgttactcggttggcaatctatgtggcagcttttcacaaagaaggcaaaccttaagggatcagtgcctttcttcattggtttgtttcttctgtttgtccgttggcctgttgctggtataatcatggaactatatggatcttttgtgctcttcagtggttatgggcctcctatccaggccttcctgtatcaaataccaatcattggttggattctgcagtacccattccagctgcttggtcagttgaggcgtaaacgcacctgaaatgttctgcaactgccaagatactctttgactcttcatggttaaagtaccgtgttgttgtgatgtttatacatgattctcacttgtacccttcaatccttcacgttgcgtcttcaactcttgtgcatattcgtactctgagtcattctggcattgtccctttttgcgagcaggctatggtttattgttcatatttagacaataagagttcataagttgatggatgctccgactcttgaagcaggacctcagtgccttttggtcatcacaacaacaatggggccagagtgatcacacctgatttatttctgattctggaatctggacacaatttgacaaattattttgcaagttgcacggacggaacccttgaagaaaactagagaaaacaaaatcttacagtggagcttgatagcccacctgatgaataccacgcgtgatctgcttcatttttttgtcagatgcaatgttcatatggtgagacgcctttggtatttgaatttcgttgcagatagtgacatatggttctatcagctgaagagtgatgcctttttccattgttttgattggaaatgtgatgctgttaatgtttggaacaatgatttattac

SEQ ID NO: 119307 - DNA, 1950 bp, Zea Mays
cttcctcttcccaccttccctcctcccttctccaatcatccctttctggctttctcctcccccctgagaccccgagtcctgccggattccgagatcccggaggcagcttcccacgggctcctctcactacggtagctggatcaaaccatcgtgctctcgtctcgacagaaaccccggccgaaaacccagccggacccagccctgttcgccgcgcgcgcggtgcccaggccgtgccagatctgcgagatccgcgccgacaccgctacgactatcaccaggtggatgctctcgtgatctctcggaggccgcggggactgagcagcgtctcggcggcggcgtggcctgcatagccgtcggcgtgccgagatgcaacggaacggggtggtggaatgcagcgtgtgccgctcccgggtggtggtgccgagcccccggagcgtgtccagggcgtacgacaagcaccgcaacaagatgtcgtccaagttccgggcgctcaacgtcttcctcgtcgtcggcgactgcatccttgttggtctccagcccatcctagtgttcatgtcaaaggttgatgggaagtttcagttcagtcccatcagtgttaactttctgacggaggttatgaaagtcatctttgctgtcgtcatgctcataattcagtctagaaagcaaaaggttggagaaaagccacttttggcacgttcaaccttcatacaggcagcccgtaataatgtacttctagctgttcctgctcttctatatgcaatcaacaattacctaaaattcatcatgcagttgtacttcaatcctgcaactgtgaaaatgctaagtaacctaaaggtactggttatagcttttcttctgaaatttataatgagaaggagattctcagttattcagtgggaagctcttgctctattgcttattggaatcagcatcaatcaactccgaactgtacctgtgggcaacacagcatttggtcttcctgtcactgctattgcgtacatatatacattgatttttgtaactgttccttcagtggcttctgtctacaatgaatatgccttgaaaagtcaatatgacactagcatctatctccagaacttgtttctgtacggatatggagcaatattcaacttgcttggcattcttgggactgtcctattccaagggccagagagttttaatattcttcgaggccattcaagggccacaatatttctcatatgtaacaatgctgcacaaggcattctatcttcattcttctttaagtatgcagacacaattttgaagaaatattcgtcaactgttgccacaatatttactggcctagcttctgctgcatttttggggcattccttgaccattaattttctcctgggcatatcagtggtgtttatttcaatgcaccagttcttctctccgcttgcaaaagtcaaagatgacaaaccagctgactcaatagagttggaagatacacaaaatgaccgcccatctgaatcttcttttgtaaatatgactgctggtgccgctgatgatgcaagccatcggattggaactgatgagaggcagccgctattgcctatatgaacttgtttgttgaggtaggacagaagagaggggatagaagaagaggctcctttttgccgtgtgagcaacagatttgatgtagcattgttaggcgaataaacagctattgtacactgtagaggcaaaagaaacaaataaacgtggtttccattttctttaaattttttggggataccttgggagcggcagaaatcatacattttgatagacataattcaatagggatttctagatacgatacttgtcaaaaaaaaaagaattcatggagaaacaacggctgtgataatggtttttttaggaaccttttctttatacaattatactattgattaattgttatactattactacattgttacctgattc

SEQ ID NO: 119308 - DNA, 2676 bp, Zea Mays
gatcacatcaattatcagcgtgccgtcgagacatgtttacccaacgtcaccagccttgacgtcgagcaaaacgtctaaaaaagaaattaagtcgtccatcagtcaaacttaatagctaaagttaaaaaaaaattcggacgacccaaacgccacccagcggccaccgccacgcccgctccgtttcccgattccccagcggccaaaaccctagaaacctccagccagagggaggagttcaagagagagagagtgtgtgagagagaaagagagggagagccggagaggggctatggagaagctggatgagagcaagttcgagcagcggttagagctcttggcgctccgcatcccccgtgagctcgcctccgcagttacccgcctccttcgctccggttatctgctcgacaagccaagggttaaacctgtagttgaggaccccgagggcgacaagaaccggctcgtcatactgtctgaaaggattcagaagcccgatttatctgacatgtcacagcaggcgcttgattcattgaagcaactatgcaatgttgaagttgtaccttacacattgaccctaggttattcatattggagtgcagatcacattttgaagcgaatcctgcctgctggagtggaggtaccctcttcgtttgagacaattgtcatgttgctcatctgaacatatctgatgacttgctagcatataaagatgtcatagcaaaggttatctatgacaaaaattatccaaggattcagaccgtggtgaataaagtggggacaataacaaatgaatttagagtcccgaagtttgagatcttagcagggaaaaatgatatggttactgaaattaaacaatatggtgcaacattcagacttgattatggtttggtctactggaattcaagactcgagcatgagcatatcagattagtttccctgttcaagaaaggagatgttatatgtgacatgtttgctggtataggtccattttcaatcccgtctgctcagaaaggttgtgttgtatatgcaaatgacttgaatccagatagtgttcattatctaagaactaatgcaaagattaacaaggtggaggactatatattcgcctacaacatggatgctagagtgttcatgcaaaaattgatgactgtgcctggcctggaaactagatcagactctcaagttgccactgatgaatcctattctaaagaaggggttccacctaatgaaatttcttcttcaaatggaaaccataatgatgttcgagaggacattaaaaatggtgctaatgaatcctctgcggcaagcactactactaaaaagcgacaacaaacttcagaagaaggtgatgaacctgattgccaagatgcagatgctaataaaacaaaaagacaaaacaaaaagagagtgagaggattagggccactgccatccaagccatgggaacactttgatcatgtactgatgaatctacctgcttccgctttgcagttcctcgattgttttgatggtctcatccaaaagaaatactggacgggatcactaccttggatacactgttattgtttcatccgttcttgtgaatctgaagaatcaattctctctgtaagttcaatcactgatacttattagaccatgtccagcacagcagttcacccatatggtcacccaaaacactattttgcactgtttcaagctgtagactgaactgttcgcagagtggaatttaaatatgggtatgaggatgggtaagctgctggagatagccttactagctgtgatgtaatcgatctcatcatgactgtcattatatgccacctgtatgtactgtcaactgtgagatagtgctgctttgatttttgacttaaacattttccctttatgcaggaagctcagaataaattaagtgctacaatagcagaaccaatattccatagggttcgtgatgttgcaccaaacaaggctatgttttgtttaagcttcaagctacccatggagtgtcttaagggggacagtgaaaatcacatcgaatcagttgccaagtagaccatgccatgctgatattgtgctcctgaagtttttactcatccacctgcagttttttttggagctttaccaaataaatagcaaatgtgctgatgattctggggtgtcatataaccattgaagatgttggtggatgaatcaagacgctggtaacatctgattcaaagcgtggtgccatcggtttagtttacaggaagttcactgtcatgtttttttttttgggtttagtttacaggaagttccctgtcatctaatgtattgactttttacatggttttgttattgatttgaagaaaatttggtcagaactcaggaccgtttgtagtacttgtcactcgagctctctgtacccaagtgaaagtgtcaggtgttcgaggaaatgttatgttaaaaacatcgaagtgtctcttagactgctactagtcggttgcccgtgcgttgcgacggtttacaacaatacccacgtaaactatccataaatttttttaagattttatattgattgtctccgctctctgtataatatatttttttatttggctaactgatgttattgtttactccatgcaaatatgtcttggtacaacacggccaatgaagtgagcgattagaagagagttcataacgattgac

SEQ ID NO: 119309 - DNA, 2489 bp, Zea Mays
gatcacatcaattatcagcgtgccgtcgagacatgtttacccaacgtcaccagccttgacgtcgagcaaaacgtctaaaaaagaaattaagtcgtccatcagtcaaacttaatagctaaagttaaaaaaaaattcggacgacccaaacgccacccagcggccaccgccacgcccgctccgtttcccgattccccagcggccaaaaccctagaaacctccagccagagggaggagttcaagagagagagagtgtgtgagagagaaagagagggagagccggagaggggctatggagaagctggatgagagcaagttcgagcagcggttagagctcttggcgctccgcatcccccgtgagctcgcctccgcagttacccgcctccttcgctccggttatctgctcgacaagccaagggttaaacctgtagttgaggaccccgagggcgacaagaaccggctcgtcatactgtctgaaaggattcagaagcccgatttatctgacatgtcacagcaggcgcttgattcattgaagcaactatgcaatgttgaagttgtaccttacacattgaccctaggttattcatattggagtgcagatcacattttgaagcgaatcctgcctgctggagtggaggtaccctcttcgtttgagacaattgtcatgttgctcatctgaacatatctgatgacttgctagcatataaagatgtcatagcaaaggttatctatgacaaaaattatccaaggattcagaccgtggtgaataaagtggggacaataacaaatgaatttagagtcccgaagtttgagatcttagcagggaaaaatgatatggttactgaaattaaacaatatggtgcaacattcagacttgattatggtttggtctactggaattcaagactcgagcatgagcatatcagattagtttccctgttcaagaaaggagatgttatatgtgacatgtttgctggtataggtccattttcaatcccgtctgctcagaaaggttgtgttgtatatgcaaatgacttgaatccagatagtgttcattatctaagaactaatgcaaagattaacaaggtggaggactatatattcgcctacaacatggatgctagagtgttcatgcaaaaattgatgactgtgcctggcctggaaactagatcagactctcaagttgccactgatgaatcctattctaaagaaggggttccacctaatgaaatttcttcttcaaatggaaaccataatgatgttcgagaggacattaaaaatggtgctaatgaatcctctgcggcaagcactactactaaaaagcgacaacaaacttcagaagaaggtgatgaacctgattgccaagatgcagatgctaataaaacaaaaagacaaaacaaaaagagagtgagaggattagggccactgccatccaagccatgggaacactttgatcatgtactgatgaatctacctgcttccgctttgcagttcctcgattgttttgatggtctcatccaaaagaaatactggacgggatcactaccttggatacactgttattgtttcatccgttcttgtgaatctgaagaatcaattctctctgaagctcagaataaattaagtgctacaatagcagaaccaatattccatagggttcgtgatgttgcaccaaacaaggctatgttttgtttaagcttcaagctacccatggagtgtcttaagggggacagtgaaaatcacatcgaatcagttgccaagtagaccatgccatgctgatattgtgctcctgaagtttttactcatccacctgcagttttttttggagctttaccaaataaatagcaaatgtgctgatgattctggggttagtagttgtagttatatgattatatctgatctggatcaccatccgcaaggagggttaacaagctatttctgatgctaaatgtgagtgatcaggtgtcatataaccattgaagatgttggtggatgaatcaagacgctggtaacatctgattcaaagcgtggtgccatcggtttagtttacaggaagttcactgtcatgtttttttttttgggtttagtttacaggaagttccctgtcatctaatgtattgactttttacatggttttgttattgatttgaagaaaatttggtcagaactcaggaccgtttgtagtacttgtcactcgagctctctgtacccaagtgaaagtgtcaggtgttcgaggaaatgttatgttaaaaacatcgaagtgtctcttagactgctactagtcggttgcccgtgcgttgcgacggtttacaacaatacccacgtaaactatccataaatttttttaagattttatattgattgtctccgctctctgtataatatatttttttatttggctaactgatgttattgtttactccatgcaaatatgtcttggtacaacacggccaatgaagtgagcgattagaagagagttcataacgattgac

SEQ ID NO: 119310 - DNA, 2394 bp, Zea Mays
gatcacatcaattatcagcgtgccgtcgagacatgtttacccaacgtcaccagccttgacgtcgagcaaaacgtctaaaaaagaaattaagtcgtccatcagtcaaacttaatagctaaagttaaaaaaaaattcggacgacccaaacgccacccagcggccaccgccacgcccgctccgtttcccgattccccagcggccaaaaccctagaaacctccagccagagggaggagttcaagagagagagagtgtgtgagagagaaagagagggagagccggagaggggctatggagaagctggatgagagcaagttcgagcagcggttagagctcttggcgctccgcatcccccgtgagctcgcctccgcagttacccgcctccttcgctccggttatctgctcgacaagccaagggttaaacctgtagttgaggaccccgagggcgacaagaaccggctcgtcatactgtctgaaaggattcagaagcccgatttatctgacatgtcacagcaggcgcttgattcattgaagcaactatgcaatgttgaagttgtaccttacacattgaccctaggttattcatattggagtgcagatcacattttgaagcgaatcctgcctgctggagtggaggtaccctcttcgtttgagacaattgtcatgttgctcatctgaacatatctgatgacttgctagcatataaagatgtcatagcaaaggttatctatgacaaaaattatccaaggattcagaccgtggtgaataaagtggggacaataacaaatgaatttagagtcccgaagtttgagatcttagcagggaaaaatgatatggttactgaaattaaacaatatggtgcaacattcagacttgattatggtttggtctactggaattcaagactcgagcatgagcatatcagattagtttccctgttcaagaaaggagatgttatatgtgacatgtttgctggtataggtccattttcaatcccgtctgctcagaaaggttgtgttgtatatgcaaatgacttgaatccagatagtgttcattatctaagaactaatgcaaagattaacaaggtggaggactatatattcgcctacaacatggatgctagagtgttcatgcaaaaattgatgactgtgcctggcctggaaactagatcagactctcaagttgccactgatgaatcctattctaaagaaggggttccacctaatgaaatttcttcttcaaatggaaaccataatgatgttcgagaggacattaaaaatggtgctaatgaatcctctgcggcaagcactactactaaaaagcgacaacaaacttcagaagaaggtgatgaacctgattgccaagatgcagatgctaataaaacaaaaagacaaaacaaaaagagagtgagaggattagggccactgccatccaagccatgggaacactttgatcatgtactgatgaatctacctgcttccgctttgcagttcctcgattgttttgatggtctcatccaaaagaaatactggacgggatcactaccttggatacactgttattgtttcatccgttcttgtgaatctgaagaatcaattctctctgaagctcagaataaattaagtgctacaatagcagaaccaatattccatagggttcgtgatgttgcaccaaacaaggctatgttttgtttaagcttcaagctacccatggagtgtcttaagggggacagtgaaaatcacatcgaatcagttgccaagtagaccatgccatgctgatattgtgctcctgaagtttttactcatccacctgcagttttttttggagctttaccaaataaatagcaaatgtgctgatgattctggggtgtcatataaccattgaagatgttggtggatgaatcaagacgctggtaacatctgattcaaagcgtggtgccatcggtttagtttacaggaagttcactgtcatgtttttttttttgggtttagtttacaggaagttccctgtcatctaatgtattgactttttacatggttttgttattgatttgaagaaaatttggtcagaactcaggaccgtttgtagtacttgtcactcgagctctctgtacccaagtgaaagtgtcaggtgttcgaggaaatgttatgttaaaaacatcgaagtgtctcttagactgctactagtcggttgcccgtgcgttgcgacggtttacaacaatacccacgtaaactatccataaatttttttaagattttatattgattgtctccgctctctgtataatatatttttttatttggctaactgatgttattgtttactccatgcaaatatgtcttggtacaacacggccaatgaagtgagcgattagaagagagttcataacgattgac

SEQ ID NO: 119311 - DNA, 871 bp, Zea Mays
caaaacactattttgcactgtttcaagctgtagactgaactgttcgcagagtggaatttaaatatgggtatgaggatgggaagctcagaataaattaagtgctacaatagcagaaccaatattccatagggttcgtgatgttgcaccaaacaaggctatgttttgtttaagcttcaagctacccatggagtgtcttaagggggacagtgaaaatcacatcgaatcagttgccaagtagaccatgccatgctgatattgtgctcctgaagtttttactcatccacctgcagttttttttggagctttaccaaataaatagcaaatgtgctgatgattctggggtgtcatataaccattgaagatgttggtggatgaatcaagacgctggtaacatctgattcaaagcgtggtgccatcggtttagtttacaggaagttcactgtcatgtttttttttttgggtttagtttacaggaagttccctgtcatctaatgtattgactttttacatggttttgttattgatttgaagaaaatttggtcagaactcaggaccgtttgtagtacttgtcactcgagctctctgtacccaagtgaaagtgtcaggtgttcgaggaaatgttatgttaaaaacatcgaagtgtctcttagactgctactagtcggttgcccgtgcgttgcgacggtttacaacaatacccacgtaaactatccataaatttttttaagattttatattgattgtctccgctctctgtataatatatttttttatttggctaactgatgttattgtttactccatgcaaatatgtcttggtacaacacggccaatgaagtgagcgattagaagagagttcataacgattgac

SEQ ID NO: 119312 - DNA, 1134 bp, Zea Mays
atggaactattgttattggaaggatttggacaaaaaagatgtggtgttagaaggttgaagcagcaccttgttggtggtcatggtgatgttgctaagtgcccgaagacaatatcaacaatcagcaatgagatgagtgattatttgaagaagaatgctagacagaagcctattgagttggatgatgataaagagggtgataaagatgatgaagatgaacctagttccggaacaacccaaaagagaaggctctcagctgaagcaagcccaaataatcaacacgcatcgaagtcttctaagtcaattgggtccacgcttcgcaaagcacctggagatgtggttcgtgagaggcattgcaagggcaacactcaaactacattgcaacgaaagaggaaggaggagaaggaaagaacatatatgtatggtgctgattttatttatgagtgtggcttaccacttaatgtcatcaactcaagggcctttgagatcatgcttgaagcggttgggcaatatggtcctggtccagctggcacatttttcttggagtctgtcaatgcctcaagtgagatagcagatgctcagatgttagctgcactactagagaaaagaattgatgccattggtagagacaaggctgctggaagacttttagaaagaaagatccctcacttgttttggactccatgtgttgctcactgtttggatctcatgcttgaggacattgggaaaattagagagttcaagaaatgcatttcccatgctcgccaagtgacgaccttcatatataggcatggcaagcttcttgatgcctttgttgttccgcttccggatgtgagcgcaattggatcacttttgaatttaaagatggcagctaggttccaaagattgcgtgaggagggaaatattggtaaccctttaattttagaggatttccaatgggacaatgagtgggtggacaatcaaaatgaaacagttagagaaggggatgatcttgcatgggctcatgtggatgatgcaatcggtgcttctagttcacttcaaggtcgcaacttcccaagaagagcccgatatgagtctgtttattcaaggcgttgtgaagctgctgctacacagaaggagagagttatggaagagtaa

SEQ ID NO: 119313 - DNA, 1096 bp, Zea Mays
atgtgggagcagcaggggtgtggctgcaaggagagcgacgtcgagaccatgccgtggatccacagcgctacaaggcacagcggggcagcatggattgagcagcgcaccggaataaaagtcgacgatgttgtcctcgacacagtgctccacaccgatagtttgacaacaccgaaaagaggcgagcagggctgcgcacaacacaagcaagacaacacgcagtcggctacgcatatcgtcgagcaggtagtgtgtgtggtggagcagcggcatgggaagggacagcgtcgtccagggaaacagggagggcactggttgggagagggactcggcctacagccaccatggctgggcgctgcggcgttgatccgatccctgctgctggatgtttgggacaaagagaaggcagggaagtgccatgagcacatgggctcgccggcgagcaggagcccggcgaggccacgacggcgccctgcaggggatccccggcgagcaacgccatggcaaggtggagatcagcatagggagcagaggctcatccaaagcacagagaaaggaagggctcggcagggggaaacagccatggatggaaaagctcctgcgccgctcctgctgcgtccaagccatagaaaaggggctaggcgtcgagcgcagtggaggagaaagggcgtcgttccctgcacgtgagctcaaggaaaaacagagaggagggagggcgctgggcaagggagatgagctgagcgcagggaggtggagctgagctcgcctgctgcaaggacgccaagtgcagggagcagagggtcagccatgggagagaggggagctcgcaggggaaatcgccatggctgctggccttacttcctgcgcgtggctgctgcgcgtggaacaaggagcagggggcggctggagatacgccggcgccatggacgccagggaggagcttcagcgccgaggaagaaggagcaggggcgccagcttgctgctcgccatggaggggagcacggctccctgctgctgctgccgtgggatgcctgctgcgcgatggagaagaagacagggaggctgcggtggcggctggaaaaaaatgaggggtgggaat

SEQ ID NO: 119314 - DNA, 1895 bp, Zea Mays
tccagcagctagcgctcagctcctgctcgatcttcttccatggcgcgcgcctgctactggcgctcggcctcctgcccaccccctgcgtttttcccctgctgaagcttttccatggcatcctgttttctgtgcgcgtttctcggcgcccggctccctgctcgagctccccacccatggccgccctcaaccccatggtcgagctcgcccagctccctgctccggtgactagcgctcagcgtctggatccctggatgcttgccctgctcgccgccattccgctagatcctgcgtgctccagccatggcgccctcccttgcttctctctccctctgccattctccagctcgcccagcccctgctcctgctcgccatggctgccgcgccctcccagccgcagagttaccgcgcgcgtgagcttctcttttggccatcgctgttccctggtgcagtcgcctatgccgcgcgctctctctccagcgcccacccccagctcggccctccacctccctctcgtctggataccggtgctgctcgccctgagctcctgccttggccgtcgcagcttcaaatccgtggacgtcgcccatggaagctcgccgaactgtgtccaaacttttcctgcgtcggtcgtggtcttcaagcaccgacgcgcgtgtccctgctcccagatccaaggccggtcgtcgtgtatgctcgcctcggttgtgtggccatgctcctgtcccagtcaccgccgatgaaggtccgtcctgtagcagcaccctagtggtcgtcgacttggagctctgcaatgactccatgcccgagctcgccctcaactctacagcaccgccgagctcggtccggtcctttgctgcagctcgtccccatggccgccgcagtcctgccgagatccctgtcgttcgcgcgctgctcctccctcaccatgccgcgcggatccctctccttccaaccctgctcggattgtgtcgcgcttgctgtcgcgttcggcctgctccggatccgaagttggtcgcctcggtgtgaaatcgtcgtcgcgtccaggttttgacatgtctccctactcgtcgtcgaacttgggttccctgctcagcctttagcgctagcgcgtcgccgtgaggttaccgtctcgccgtgattccctggtggtccgtgtctctgcatgttcaaatcgtcaacctcgtgcaccacctgctctctaaatgggaaaccaacagtcttctccctgctcctctgcccgcagccgcgttcctctaccggccatcagttgccgctgaaccactgtcggattaattttcagcttccctcgcgcggctctctggagataagctcttcatcgactgtcgctcccaatcttcagttcgccgactgactgtcgtgttccttattttccctcgtcggtcgacctcgtcgcgactttgttcgtccatcgtgctggtcgctatcccatactgtacctattagctcggatcctgcccagctcgttgtcgcgtcgtttgccgtcgagtcgtcaaacacgtcatcccctgctcgacccccacctcaccagctcgctccaaacacgatctcgtcgtcgttccgcgcgtcagcaagaaatcccaagaatcgggtgaaaacgaagctagcagcgcgatattccctaagcgctcgacaaattgcctgtatcggaaaatcgctaccgatcccgcggattcgtgtcagttgtggaaacggtaagctgataaattattcagaatagctcgatcgatgaataaataaatgtgctagtgcgatgcttattaaggtgctcgataaattgcgtaagtcacgaaactctcgtcgacttcgcagttcttgcgattatcgagccaggttcagttatagtgagttatctcgctattccggtcaattagttg

SEQ ID NO: 119315 - DNA, 1049 bp, Zea Mays
gttctcacatggaaaccagctgcgcgcaggagtgcggcaaggcttggccgatgccctctgttgccgccatggcatctcccttctccaagctccagcgcgcacacggcagcagatcgtggtgcccctccctgcaagctcgagtttccccatggcgcctgtccccgggcatgggcgagctcctctctgccctatgattttttccatggctgtgagctccccctggctgccattttccccgggctccctctgctcgcccccttccatggcgtccgcctcccctgctcttccctgcccggccagtgaacgcccagatcctcgcctccctgctccacacgccccagccatggtgttctccacttccctgtccatggcgtccaagttccctgcgcccagttcttcaatccaaaaacagcagcaacatctacctccccttccctgcgcttgccgtggctgagctcgccccctgccaggagcacgccatggccggatccccctgccatggacgtcgcgcaggaagccagcgcccctccctgcgtagttccattcctccatggccgcgagcttttcccttgctgcgactacctcccaaggacagcgcgcagtggcctccccatggcagtggtctgcaacaagaagtcgcaggctacatgttcgctgttttgcgcagcagccccgacatctttgcgcgctgccggctcgctgttttgtggagccccgtggacagcacgccgtcgacggccgccgtgcgttcgctgttttgcgcagccccgtccgcgacgccgtaagtcctcgctagacgttgccgcggagccgcgcgtgatgcatgttttggtgaagcccctaaaccgtggacgcatgtgcaacccgaatccgagtttgacaggttgatagacttatgatttactattgatgtgtttcgattgatggcatgcatacaaatatggtgtatattaatgttgaatatgtgtggctgcgataattattttgtacgccataggaattggtcgcggatgtattaattgattgttaaaatgcttcttcgtaaaata

SEQ ID NO: 119316 - DNA, 1277 bp, Zea Mays
ctccagctgtggagcttcttctccctggctgcgtctccctccctctccctcgtgtcttcttctccctgctcgctggcgttcctccagctccctgctcactcctcttcttctcccacgcacgcacaggctcctccctctgcgcatctccctgcgtccggtcgagttctccacaccgcgctccactgctcggccaaccgctgcccaagtccggccagccgaagtgctccatctcccagctcgcggagctccctggctggcgcgccgacttggagctcgccatggacgttggccaccgctgcatgctcgccacggcctcccagctcctcccagccgcccctcctccctctactctctgcgtgcttctctccctctctccccttctccctactgcacgcgttggatctcagctcacggagctctctcttctgtctttcatggcgaacgcctgcttcccctgctcggatttcgtctgtgccccgggctccatggcgtccccgcctccatgctagtcccagccgagctctccctctccctggtcccttctctgcgtgccctggtactcgctcgctgctgcgctcgctctcccctgcctgctcgagttcgcccccagctcctgaccatggagcttcgccccggcggcctcttctttccggcggccggtcggagtttcctctgcgcttgtcctggcagtcgcgccatggccagctcctctactcggccttgtccttgtttttcttcccttcatgacctgccgaggctccctccccagctacgtctgtggtcatcgggcatgtcagctgccgcaggctcgcctcacccggcttcgtcaccagtcttcgctcgacgcgtccttatactcaacatggggtttctctgctataacattggctcgccgtggcctggtcgatttgtcctcagtgtcgcgccagccgtgcagatctttccatcgcgttcgaacctcgctatcggcccaccgctctcgtcgccatgaagactatgcaacagcgcttggtctcaatggtctgttgatctgcataggtggtggtttggttaagagtggtgttgatagaagcagaaaatgaattttgtgtaaggctcgcctggtgctcgacgaaacgcctcacccacgaaagcatcgtcgtttttggaaactttcgcatcggttggtaataatgtgctcgctacttctattaattaatctaatggattagatgatataatattcgcaatgattctcctgtatgtcatgtagtaatgctataaagtctaatcttatt

SEQ ID NO: 119317 - DNA, 482 bp, Zea Mays
agttttgctaggctgggccactcctttggccatcctaggtctcgtgtacagtcgtcccctccgctcctcgcctcctctcccgagtcccgaacggccgatcccgacgccggctgcgtggctcgcctcagagccccagccgtatcctgccacccttgtccatgagcgcccgctatcagcgcagctagtccctccctccgcccgctatcttgagcggtggtgatggagtttactttcgaggatgcagcggaactgtgcgcgctcgtttcgaatcagcaatcccacgtcgacgagaagcggaggtcggtgtggtttcttctaccggcgcacctccgatcagaatgcatttctgtttttgcaccctgcatcacaaaagattcggggccctcttaatttgcaggtggctggagtcaatgatcctcagaccggatggctgcatcaggcgcgcgaagcgacccaagtttttgcatgaagtgtaagcgtgc

SEQ ID NO: 119318 - DNA, 1056 bp, Zea Mays
tacttgcctgagtcatatatcaggagtgatgacagatcttgtgataaagtgagaggtaacattaaaaggatttggagttcagagtgcaatggctatacccatcacttagttctggagggcctccagctttttgacttccagaagaaggaaaatgaaccacttggaccagaatatcttggtgtcatgcaggacacaatcagcaaattgacctatgaaacacttcagtcagtggcttgtgttgtcagtcatgacaaggttacttttgataagactaggtctgtaatggaaaaaattgtaaattctcaccttccaagttacttggccagcttggatcagaatgatattgcatgccagctattcaatatttttagaaatccatgcagctatcgatctggttctgtgaggcttgtcacacctgtgtcaccacaacttttgtcttctattaagcatgcgttggatgagcttgatggaatgccaatgcagggtcttgttgcaatgaataggaagattaaaggaaaatcatgtgccccaaaatttggattaactgctagcttttccaaaagaatgcatataatcaaaatgataagaaaaaggtgcaacaagattttaacagaacttgaggaaggtaattacctgccaaaggaattagcaaaggcaatgtcagtggtgaacttatatcagaagcagaagctgaaaaatgtgagtatttcacaatcagagtttttcccctttgcaaaagaaactatttctttgcagaatgatatcctgaatgccctttggtcacttccaaatctcaagcatgcgaagctgaaattgctgcacaccatactggatcatgattctaaatttgaaaggaagcacttagcaactttgaggaactacttgacagaatgtttgtttggatgtgatgatggtctaccagatgtggccctccaagccatagcctctataaatcagatttctagatgtcagcatgttgtgttaacggaagagagggaggatgctgaggtagatgctgtactgaacttgagcagtcatctcaaagctttagctcat

SEQ ID NO: 119319 - DNA, 507 bp, Zea Mays
ttgtgcgattttagacgaatggctgtcgacggagaacaatggagtggacgaactgattagacgccatcttggagggggattgacgcttcaaggtccccaagacgatgataataggcccgctaattcagcagagacggacatttttattcatgctgtggaacgtgtcttgcctaatttgccaaaaagttgcatagacaaaatcaagagactaatgggctgagctagcaagtacgtgatagcgacctgcaatggcacctatggacccggtaattttttggttttgtttcgccaggaatcgataccagacctgtgtattctgtgattaggcaccatctcatgtagtactaagcgcttcagtttatggcaagcttttctgcattccgaatgctaccgggtatgtagttgtaactaggacataaggcgccctatcgggtgccgagacaatgcagagttgattgcatagttcatgattgtcatttataatcctaagaatcagttgaaagtatc

SEQ ID NO: 119320 - DNA, 557 bp, Zea Mays
ttgtgcgattttagacgaatggctgtcgacggagaacaatggagtggacgaactgattagacgccatcttggagggggattgacgcttcaaggtccccaagtttatacttcacagatcgcagtcgtaagctgatgggtagtcctttgctagacgatgataataggcccgctaattcagcagagacggacatttttattcatgctgtggaacgtgtcttgcctaatttgccaaaaagttgcatagacaaaatcaagagactaatgggctgagctagcaagtacgtgatagcgacctgcaatggcacctatggacccggtaattttttggttttgtttcgccaggaatcgataccagacctgtgtattctgtgattaggcaccatctcatgtagtactaagcgcttcagtttatggcaagcttttctgcattccgaatgctaccgggtatgtagttgtaactaggacataaggcgccctatcgggtgccgagacaatgcagagttgattgcatagttcatgattgtcatttataatcctaagaatcagttgaaagtatc

SEQ ID NO: 119321 - DNA, 321 bp, Zea Mays
gtttgaaattgctagaacacaaactgaagaccgatttcgagttatatagtggacctgaaaatgttcctgaacttttaaaggatgtgcaggaagtgttgttctttcagatttatttttgttttttagtctcaatgtctagcgtcatagttgtaaagcacatgaactgcgaaattctgcagataatggctgcattttttataaatgtgatttttaggtaccagcagcctagcaacggtcttgtttattgcagtggccaaccagtcaattggtacttaaaaagacatgtttgtttaaatgaatgattcaagtgcatggtttgtt

SEQ ID NO: 119322 - DNA, 290 bp, Zea Mays
gtttctttgccgagtgccaaatactttttaccgagtgtcttctgtggacactcggtaaagcatatttttattttttaaattttgtccaccaaactttttgtggtatgttactacactatgtagacctacatgtatcatttatggacaattgtaacagagttttcaatcgatagtagatttagttcgtttatttgaatttcttcggaaaattcagattggaactgcaggtcactcgaaacttgaaaaaccgtgcatgcaaaaatgatatccatgctacttagaacaagtta

SEQ ID NO: 119323 - DNA, 498 bp, Zea Mays
atggcacagcaacggcggttgagcgcggtggcacacgcgacacagatgattttgcatgatatcagcctgatttgtaggatgtctagacgtggtaaagctgctaaacaaaggaagggtcctttgaccggaactgccttcgacccgatgcctttgccaactggtgttccagtgcctatgtgtttttatggtgattcttgcaagactcctccaccgctttgtgattttgagcagtggattgacacagaaatatcacagaaagacaagaagtggttggagaatcttaaaaagtgggatgcagaggacaaagagaggatggagaaaagacgagaggagcttgctgccgagcaacaacgggaagacgagcaggaaatgaggcatgttgctgaatgcagggaagagaaggagaagaagcttgagcgtgcacgtcgtgcaaaggaagcaatgttggagaaccctgatgcatttcgtaagggcaaatggccccgttgcactcagtag

SEQ ID NO: 119324 - DNA, 121 bp, Zea Mays
cgttctccgtgtggccaggagacgtcgtacgtgtacagcgtcttcatactgtagaagaggatacccctgattcagggtaccgacatctcccctaacttgaaattaaagggaaaaagaaaaa

SEQ ID NO: 119325 - DNA, 189 bp, Zea Mays
ttacttcaatggaagaaaatagtgagacttttgtgctgcattcgaagcaagaaaggaaagacaaagtaaaacctatgcatattattgatgttcctggtcatgctaggctcaaacccaaacttgatgaagtcctgcctaaagctgctgcggttgtctttgttgttgatgctcaagatttcttgtctagca

SEQ ID NO: 119326 - DNA, 324 bp, Zea Mays
atgtcctcctccccaaggtgccattccctgccgcttgggatcttcgtcgcgtggtgcaagtctccaattggttttggtggagggaagaagggaggaaggaaagagggagaatccaaggaaatggccgctctcgggtgtgaatgctggtgcgtgcccgccgcagcggccgttttgaggggtcggccagcacgtggagaggctgccggccacgagttgggcggccagtggaccgccgtacgtcccgtcgctgttgctactttgttcgcttctgcgacgatgcttagatgtaatgttcgcttgccatcagctggatggagttgctaa

SEQ ID NO: 119327 - DNA, 351 bp, Zea Mays
atggcacctacgttggtgtgggttgtgccgcctcatcgcgaccgtcatcgattgggccttcgagatgaagttgctaaatccaagcaatcaactgtctccacaaaaacaaagaagtttaaggaaattcaatttcagaaacttcagagattgccagatgggtgccatcctgattttgataatgatcatctgtgttctataaataatcatgacctgcttcctaaaatgagtactccaagtgctgaccttcgtctacttcctgagacaggagtggaaaacatgaggacacctaaaagtcttcacgctgaacttaagcgtgagctgtcaaagctaaatatggtgttaaagctacca

SEQ ID NO: 119328 - DNA, 364 bp, Zea Mays
ctcgcccacagttagaaccgcccgaaaatctcgcctgccgttgcgtggtcgaccccacctccttgcggctttatagccgagtctctcccatgactctcccctctcctatcttttgtgggcgccgtgtcttcaccacttctccctctcgtcgtatgctaccgccggtgatctcttctgtggcgacgtactggtctctgcgcgttgccgtgggagtgcgccgggaccttgggtggccgcccgagtcctcgggacgaatcaagcgcctctggtgctcgcgacagttcttgtcggtcgacggggagggagccgtgtcgcgcatcgtcgcagaccgcaacgcgtccatcggcattgttggtgagaactc

SEQ ID NO: 119329 - DNA, 280 bp, Zea Mays
gagttctcaccaacaatgccgatggacgcgttgcggtctgcgacgatgcgcgacacggctccctccccgtcgatcgacaagaactgccgcgagcaccagaggcgcttgattcgtcccgaggactcgggcggccacccaaggtcccggcgcactcccacggcaacgcgcagagaccagtacgtcgccacagaagagatcaccggcggtagcatacgacgagagggagaagtggtgaagacacggcgcccacaaaagataggagaggggagagtcatgggag

SEQ ID NO: 119330 - DNA, 689 bp, Zea Mays
tattgttctcctattttgtaaactcaagcgtatgtgaaatgtgtgtttttaaggttgtcctaatctcttcaacttgtttgcagagctacccctgtaccttatcttaggaatgctatgtggagcggtcagtgtggtgtttgatagattggttggatggttttcaagattctttgggcacataaaggaaaagtttgatttccctataatagtgtaccctgctttgggtgggctgggagctggtatcatagctctgaaatatccagggatcttatactggggtttcacaaatgttgaagaaatattgcatactgggaaaagtgcttctgctcctggtatctggttgttaactcaactgacagctgcaaaggtagttgcaactgctctctgcaagggctctgggcttgtgggaggactatatgctccaagcctgatgattggggctgctgttggagctgtttttggggattcagctgcttatttaataaattcatctttacctggtaatgctgctgttgcacagccacaagcttatgctctggttggaatggctgctacactagcttcagtctgttcagtcccattgacttcagtactgcttctctttgagctgacaaaggattacaggattttgcttcctctcatggtaagtgttaaatgtcaatgcagtcttactatattttttgtttcac

SEQ ID NO: 119331 - DNA, 242 bp, Zea Mays
tatttttttattttacaaaaaacgtatatacctatatacaatttatattcaatattaaaaacatcttagcgtgatgttctactggttagacagttttacccagtgtctcccgcccttcttccatcagggcatgggttcgaaccccacctcatgcaccgagtgtctcccgcccttcttccatcagggcatgggttcgaaccccacctcctgtatcgttttttaacattttacgctgatttaat

SEQ ID NO: 119332 - DNA, 688 bp, Zea Mays
ccaccgttcttggcttcttgtcatcgccacacacctctcctcttctcaagaagggccaccaacaaaatgcctgcccacggccaccatcgctggctcttcctcccgatctgctgcccaagcttcgcggccggcgccgagccgtcgtcgtcccagtctgctgcatgctccacggggcgcctctgctggatgaccaggaagaagaggaagcggctgaagcctcgtcgtcgtgctagcgtcggctgcgaggagcgcttaggtgctgctctctgattgattgacgctatcctcgtcgagcttcttcttcaccgtcgtcgttgtgtttaattaattacatatatatatctcttcactcttcttcttgatcttgcaagactttttagtttaagataaatctgcacccattatcttccttttccatatggctatacctcttcctcccacgtccatcagttctcgtatctctcccgtccccgtctatccctcttgagcttaattggcacgctgccagtagctgcctgcgactcctacagtcctacgtacgtatcttcgttcgtttgagctgttgcctgttggtcgttgtgtcggtgctgctgtgcattgtttcgttcctttttcagctactttagcatgagcaactctgttatttgctgtaatgaagctgtgttttctggtgtaatttccttattgt

SEQ ID NO: 119333 - DNA, 300 bp, Zea Mays
ataaacgacctggcccatccctccttcctcatcacacagcgccaccgcgtggttcgttaggaaaggaaatcgattcccccgcatccgatctcttcggtgctagagaaatataggccgccgcctcctcctcattcggtgaaaggtgggcggttagggttgggagatctcttgactcacgacacgagcagcagaattcgtcgagggccgctggttgctgcgagaggtccgggccttcgtgggatctgtaagaatctcttgctctccatacatgttcttgttgtgcgatctgatccagtttga

SEQ ID NO: 119334 - DNA, 2014 bp, Zea Mays
ataaacgacctggcccatccctccttcctcatcacacagcgccaccgcgtggttcgttaggaaaggaaatcgattcccccgcatccgatctcttcggtgctagagaaatataggccgccgcctcctcctcattcggtgaaaggtgggcggttagggttgggagatctcttgactcacgacacgagcagcagaattcgtcgagggccgctggttgctgcgagaggtccgggccttcgtgggatcttgaaaattgaatgttctaatggagtccaagggtggcaagaagaagtctagcagtagtcgttcctccctgatgtacgaagctccccttggctacagcatcgaggatatccgccctgcaggcggcatcaagaagttctccgctgcttactcgaactgcgcgaggaagccatcctgatatctctgtcgtcatccccatcctagtagcgtagaaaccacctgcattttcattttgatctccctaatccctccggctagctgctttccagtgaccaaaagatatcaaagaccacttcccgtcttcctcccgtggctgtctgtcatctggctctgaaacgatggcagtcctgcaagttgctgctgctgcccctccccctgtctctgtgattgggttcgagggatttgagaagcgccttgagatcagcttctctgaggcacctgtcttggctgaccccagcggaaggggactgcgtgcgctctcgcgtgcccagatcgactctgttcttgaccttgctcggtgcaccattgtgtccgagctctcaaacgaggacttcgactcttatgtcttatctgagtcgagcctgtttgtctacccatacaagattgtgatcaagacctgtggaactacaaagcttctgctcgctattccgaggatccttgaacttgctgaagagctcctgttgccactcgctgcagttaaatactcccgtggaacgttcatattccctgaagcacagccttccccacacaagaacttcgctgacgaggttgccttcctgaatcgcttcttcggtggcctcaagtccggtggcaatgcttatgtgattggtgactctgcgaagcccgggcagaagtggcacgtctactacgccgctgagcaccctgaggagcctgttgttactctagagatgtgcatgactgggctggacaagaagaaagcttctgtcttcttcaagaccactgctgatggttactcgctgtgcgccaaggagatgaccaagctctctggtatctcggacatcatcccagagatggagatctgtgacttcgacttcgagccctgtggctactccatgaatgctgttcatggccctgctttgtcgaccattcatgtgaccccagaggacggcttcagctatgcaagctacgaggtcatgggctttaacccgggctctttctcttatggtgacctggttaagagggtgctgaggtgctttggtccaactgagttctctgttgccgtgaccatcttcggtgatcgggacaatgcgaagacctgggggacgaaactggatgctgaggcctatgcttgcagcaacatggttgagcaggtgctgccgtttggtggcttgctcatctatcagagcttcactgttacggccgaaacgacccatgggtcgccgaggtcagtcctgcatgacttcgctggtgacattgtcaagaatcgctcagagagtgatgctccctgggaagctgatgctgtggatgagagcgaggaaagagatgtaaagaagatgaaatgctgatgtggtcgacgatagatcagattcagagttgctgccactggttatcttgtgaagcagccaagcctaattatttatgccacataacctgtgctattgtaatgtgtcacatgcttatatttgcaataaacagctctaggtggtcagctttgtctgccgcaatgagcagtgtatcgatattgtggttttgaattgtttggatctaaataaagtcttgtgttcgatacaatttcgatgccttttctattggc

SEQ ID NO: 119335 - DNA, 2055 bp, Zea Mays
atcacacagcgccaccgcgtggttcgttaggaaaggaaatcgattcccccgcatccgatctcttcggtgctagagaaatataggccgccgcctcctcctcattcggtgaaaggtgggcggttagggttgggagatctcttgactcacgacacgagcagcagaattcgtcgagggccgctggttgctgcgagaggtccgggccttcgtgggatcttgaaaattgaatgttctaatggagtccaagggtggcaagaagaagtctagcagtagtcgttcctccctgatgtacgaagctccccttggctacagcatcgaggatatccgccctgcaggcggcatcaagaagttctccgctgcttactcgaacgtatgtactgggcaattcctattttcatacataaaaaaaatggaggtcttatttatgattcggtgcttacaatggatcgtttctgcctcttgcagtgcgcgaggaagccatcctgatatctctgtcgtcatccccatcctagtagcgtagaaaccacctgcattttcattttgatctccctaatccctccggctagctgctttccagtgaccaaaagatatcaaagaccacttcccgtcttcctcccgtggctgtctgtcatctggctctgaaacgatggcagtcctgcaagttgctgctgctgcccctccccctgtctctgtgattgggttcgagggatttgagaagcgccttgagatcagcttctctgaggcacctgtcttggctgaccccagcggaaggggactgcgtgcgctctcgcgtgcccagatcgactctgttcttgaccttgctcggtgcaccattgtgtccgagctctcaaacgaggacttcgactcttatgtcttatctgagtcgagcctgtttgtctacccatacaagattgtgatcaagacctgtggaactacaaagcttctgctcgctattccgaggatccttgaacttgctgaagagctcctgttgccactcgctgcagttaaatactcccgtggaacgttcatattccctgaagcacagccttccccacacaagaacttcgctgacgaggttgccttcctgaatcgcttcttcggtggcctcaagtccggtggcaatgcttatgtgattggtgactctgcgaagcccgggcagaagtggcacgtctactacgccgctgagcaccctgaggagcctgttgttactctagagatgtgcatgactgggctggacaagaagaaagcttctgtcttcttcaagaccactgctgatggttactcgctgtgcgccaaggagatgaccaagctctctggtatctcggacatcatcccagagatggagatctgtgacttcgacttcgagccctgtggctactccatgaatgctgttcatggccctgctttgtcgaccattcatgtgaccccagaggacggcttcagctatgcaagctacgaggtcatgggctttaacccgggctctttctcttatggtgacctggttaagagggtgctgaggtgctttggtccaactgagttctctgttgccgtgaccatcttcggtgatcgggacaatgcgaagacctgggggacgaaactggatgctgaggcctatgcttgcagcaacatggttgagcaggtgctgccgtttggtggcttgctcatctatcagagcttcactgttacggccgaaacgacccatgggtcgccgaggtcagtcctgcatgacttcgctggtgacattgtcaagaatcgctcagagagtgatgctccctgggaagctgatgctgtggatgagagcgaggaaagagatgtaaagaagatgaaatgctgatgtggtcgacgatagatcagattcagagttgctgccactggttatcttgtgaagcagccaagcctaattatttatgccacataacctgtgctattgtaatgtgtcacatgcttatatttgcaataaacagctctaggtggtcagctttgtctgccgcaatgagcagtgtatcgatattgtggttttgaattgtttggatctaaataaagtcttgtgttcgatac

SEQ ID NO: 119336 - DNA, 2023 bp, Zea Mays
attgatttctcaattatgcctagtattagtttataagaaattctttttttcgtccgttgtgtgattattaattttcttctacaatatatgcactctcttaaatccctactatctggggaaaatcttaactgtaatctaaatcaatctaaatcattagttcttttgagatactagtggaatcgttctctgaattttatggatcatgacgtttcttggaatggatatgtcatcataataactctgcagttttcatcggttctttggttcttctctgcagtgaaaattgaatgttctaatggagtccaagggtggcaagaagaagtctagcagtagtcgttcctccctgatgtacgaagctccccttggctacagcatcgaggatatccgccctgcaggcggcatcaagaagttctccgctgcttactcgaactgcgcgaggaagccatcctgatatctctgtcgtcatccccatcctagtagcgtagaaaccacctgcattttcattttgatctccctaatccctccggctagctgctttccagtgaccaaaagatatcaaagaccacttcccgtcttcctcccgtggctgtctgtcatctggctctgaaacgatggcagtcctgcaagttgctgctgctgcccctccccctgtctctgtgattgggttcgagggatttgagaagcgccttgagatcagcttctctgaggcacctgtcttggctgaccccagcggaaggggactgcgtgcgctctcgcgtgcccagatcgactctgttcttgaccttgctcggtgcaccattgtgtccgagctctcaaacgaggacttcgactcttatgtcttatctgagtcgagcctgtttgtctacccatacaagattgtgatcaagacctgtggaactacaaagcttctgctcgctattccgaggatccttgaacttgctgaagagctcctgttgccactcgctgcagttaaatactcccgtggaacgttcatattccctgaagcacagccttccccacacaagaacttcgctgacgaggttgccttcctgaatcgcttcttcggtggcctcaagtccggtggcaatgcttatgtgattggtgactctgcgaagcccgggcagaagtggcacgtctactacgccgctgagcaccctgaggagcctgttgttactctagagatgtgcatgactgggctggacaagaagaaagcttctgtcttcttcaagaccactgctgatggttactcgctgtgcgccaaggagatgaccaagctctctggtatctcggacatcatcccagagatggagatctgtgacttcgacttcgagccctgtggctactccatgaatgctgttcatggccctgctttgtcgaccattcatgtgaccccagaggacggcttcagctatgcaagctacgaggtcatgggctttaacccgggctctttctcttatggtgacctggttaagagggtgctgaggtgctttggtccaactgagttctctgttgccgtgaccatcttcggtgatcgggacaatgcgaagacctgggggacgaaactggatgctgaggcctatgcttgcagcaacatggttgagcaggtgctgccgtttggtggcttgctcatctatcagagcttcactgttacggccgaaacgacccatgggtcgccgaggtcagtcctgcatgacttcgctggtgacattgtcaagaatcgctcagagagtgatgctccctgggaagctgatgctgtggatgagagcgaggaaagagatgtaaagaagatgaaatgctgatgtggtcgacgatagatcagattcagagttgctgccactggttatcttgtgaagcagccaagcctaattatttatgccacataacctgtgctattgtaatgtgtcacatgcttatatttgcaataaacagctctaggtggtcagctttgtctgccgcaatgagcagtgtatcgatattgtggttttgaattgtttggatctaaataaagtcttgtgttcgatac

SEQ ID NO: 119337 - DNA, 336 bp, Zea Mays
tgagatgggcacttctcgtggtcgctggagatggaggattgggaggcaacttgtccggcaaagttgactgcattatgcgagaccgccaaatgcgtcttctcttgggaggaactggacaaaactgacgaagaacgagctcagcatatgcgaatgcgacctgccaacataaactttgcccttgttggcgaccagagggatgcaattcagaactcaatcaagacaggacagcgggtaaatgtgaaaacatccactacaggtctacaacaatttaaccacatgaaacaggctatctatagtgttcgaaaaatgggctatctagcatctttgagaagttaa

SEQ ID NO: 119338 - DNA, 1071 bp, Zea Mays
tgagatgggcacttctcgtggtcgctggagatggaggattgggaggcaacttgtccggcaaagttgactgcattatgcgagaccgccaaatgcgtcttctcttgggaggaactggacaaaactgacgaagaacgagctcagcatatgcgaatgcgacctgccaacataaactttgcccttgttggcgaccagagggatgcaattcagaactcaatcaagacaggacagcgggtaaatgtgaaaacatccactacaggtctacaacaatttaaccacatgaaacaggctatctatagtgttcgaaaaatgggctatctagcatctttgagaagttaaaaaactgtttgaactaaagagaagtctagtcttatcctggtctatgcttgtaagctttattcaaaacttcacatgaacaagtcactgaaaaggaggcttcatgatgcatgcaggtcatagagtggatgtagtctctggtactagatgttggaggaaatgaaaaccctaaccctaatacattgagctgacagggatggcaatttatatgtgttagattattgtgcttgttactgatgtggtgggcttcggcctagcctgttactgatgtggggggacgaggttgcgccaataggcataggtggagtaagtcgaggacagagaccagagagcgaatgttctgaacatccaccgcctggacatggaggctggcgatgacagtggcctcgtgcactaaaggggtcgacaagtggggcccagggggagggtcgaggcaaggagagccaatcagaaggcgctcagcctcaaccagttgactagcgagaggatccgccgcagtcacctttgcaaccgtgagggccgcgaccagggtggaggcacgaaggaccaaacaagaaacccaggccgaagggaggggcacgcaaaccgactgcaacaaaacccacactgaggccaaccatgcccagtgttagagtatatggtaggcccatgtggctaggcccatgtataacactatatagctacccattagggttagcattaattaacactgtaatatggtatcatgctaggtttcct

SEQ ID NO: 119339 - DNA, 525 bp, Zea Mays
caagaacctgaatctattaaccacctgttggtctcatgtgagtttacaaggattttctggtataatctgctcagaaagtttgggctggataaccttgctccccagccgggcctgacatccttcctggactggtgggagacatcttctgaaacagatcaaggaatggtcaagaaaggattgagctctttgatctctttgggggcctggatggtttggaatcaccgcaatagatgtgtgtttgatggtcagactcccagtctcccctctatccttcggcaggctgacgacgagagaagactttgggaattagctggggccaagggtctctccttggcagctcctttgtctgacgtctgaacccccctgtttttctttagtagttttttgagttcggtttccatggatcctttcatttatgtgcgttgctggcctccgtaaggagttccttgctgtaacctctggtcttctatagacctttttttcatcctcttaatacatttaaggcacagttcacctgcgctttcg

SEQ ID NO: 119340 - DNA, 1550 bp, Zea Mays
aaaaaaaaaacgaagtcgccttcttcaaaaacctcttcgacgtcgcacccgcaacgcacgctggcgggcggcggccatggcgtacctccctccccacaagcgccaacccagcaccacagcctccacgcccatccccgcacccaacccgccacctccgtccctctcctcctcccttcgctccctctccctctcctccccgcgcggccgcggccgcggcgcagtcggacgccacccgctcgcttctacaaagattttccgcgctgccggctgcatctcccgttggttccctctacctcccttctcccctgccggcgacggcgaggagtacaccctacgcctcgagcccttcccttgttcccccatcgagcacaggaccggcgccaaaccccttgcccttgtcgtcgcctccaccccaggacaaggctcttccggctccactgcggcggcagtcacctccatcgccgagcagtttcttcccgatctccttgccgccgcggagagggccaaggcagaaggcgcgcctaaggatgagttggtgaaactgagtctcgttgcaagactgggaacggtgctcttcgagtgccagccaggtggatcgcccgtttcactggacgaactccgccaggccgctaaagcaggggaagatggttccaggagccagttgcgtaaaacgttctacaccagtttgtctagtgagtgtctggatgatatggagcgaaccatggtgaagaggattgggctggattttgattcgtccaagaagcactatcatgtgaaggtttctgataagaatcgaagtgattctacaatatcttgcaaatgcaccgtggaggaagatgggagtcttgctatccataaggttgaattgaatcaggtacggcacttggtggaagacatatcctgtcttttcaaaggtcttgatctaaggttgatgttgagtaagaaaaggatcctgaaaaacctagattctgaagtggaaaatgctgtaaagagcttggtgtctactgctattattgatcctaatgtgaaagggggagttagatggccacttggaaaggaatcaattggcgagaggttcagcatagttggggtgtggcacacgggctacaaagctttcagaaacgagaccatgaggctcaagctaaggcatgctgacagattcgatcaccgtacctcgactgggggagtttctgatgaagttacattcaaactaactgctatatcttgcaaactggaggaagatgatctggcggagagcgctgtgaaagagatgctggagtctgcggtccaaatgctatgggacaatgcgctcaattaccgggtcgtgccttgagctccggttatgcagacaatatttcttccttgaagatgcaaagcgacatgatttctttgagcccctcctgtcctgtatatacatctgcgatggtgagactcaagttgtacttcaagtgtggcaacaattactagtactaaacaagagaactcctagacacaactgacgctggggctgcccacgcacgccatcaaaaaaaaaaagtagcgttcggtta

SEQ ID NO: 119341 - DNA, 252 bp, Zea Mays
atgaaatccgagtcaaacatccagaatacaagggagcaaatctgtcatgtaacattacaaagtttacaagaaacaactcccaataccactgattggacacctattgtcacgcatgcttgtttgttggataaaaggcatcaagaacaaacaacagttgtgctaccgctgagccaatttcttcaggtgttgaaacaacttttgctttatccactgtcgatcatatggcaggaatgcctgaatcgagtgatcata

SEQ ID NO: 119342 - DNA, 1484 bp, Zea Mays
caatttccaatccatccatccattccgttccatctgaaggcgagagttatctcgtgcctgccccgctgttctcctctcccgccgcatccgatagttcagcgcaacaaaacctccctctccgcgcacgctccccacccccaccggtgaccgcgcgcgcatggctgccttacttcggacggccgcggccctcgcgcccccgccctcgtctcccccgtccgcacgggagccgcgtgggcggtgcctgcggctggcctgctcccggcgcgcgccggtccgaccgctccgggcgtggccgctgccgactccgcacgtcttctgtctcgccggggggcggctccggcgcctgggcgccaccgaggccgacgaggccgcgcagacggcgacgcaggaggatttagaaaccgaagttactggagactctgctgcagatgacagtgctggaagcacagatgaaactccatctattattgtgacaaccctgcagtcgtacagagaagctcttattaatgatgatgaagcaaaagctgctgagatagagtcctttttactttctatcgaggatgagaaaaactctcttttgaacaaaatcactgctctagatgccgaactagcaactcaacgagaacgtatcttgaggatcagtgctgattttgacaatttcaggaaaaggacagaaaatgagaagcttaacatgatggaaaatgtgcaaggggaacttatagagagctttttgcctgttctcgacaactttgaaagagcgaaagtgcaaataaaggtggaaacagagggagaggagaaaataaataatagctaccagagcatttataagcaattcatcgagattttgaattcattgggcgttgaagatgttgaaacggtcggcaaaccatttgatcccatgcttcatgaggctattatgagagaagaatcatcagagtttgaagaggggattattctccaggaattccgaaaaggtttcaaactcggggaaagactgcttcgcccagcaatggtcaaagtgtctgcaggaccaggccctgaaaagtttggagatgatgacccaacagctgtcgaaggtagtgtggcacctcaaaaggttgacgaagtcgaagacgacggttttggtgccggcgatgcagaataggtggctggagcttgatctgtgaatcaacaagaacaggtccagaaattttgatgcttttctggagcgtgccaagcaggaaataggatggtaccaattcgttcaagctatagagttaggtcccaaaatgtgctgttatttcctcctgctgacatggggtgttggtattgcgacaaatttgtgcttctatccgccgtggtcgaccttttgttcttgcaatgaggaattttcgtgatcaattgatgcaacatgatattgtaagggctaaatggctcagatttgcgattgatgcaacagagtgcttgagtatatagcatgataatatagaaacaaaatcggacat

SEQ ID NO: 119343 - DNA, 866 bp, Zea Mays
acaattttcgtgaccacaaaaaagttcactgcaattgctaaaaaagagaggaaaatttcattgcaaaaccgttgcggtgaacactcgagcacccccgacccccgttgctgcgctcccgcgacatggtttccatggcggccgccgcggcggccgtgggcgtgctgctgccgttcccgttctactacgtgctgtggacccacccgcagcggtgggtggacttgtgcggccgcagtgccgacccgtgccggcggatggcgcaggtctcgcacgccatcaaggcgcttcagctcctcgcgctcgcctccgtctcttcattctcctggcccccgcctctgtactgccccatcctcctcgccgtcggccagtatctcaacttcagggtgtatcagctgcttggtgagccaggtacctactacggcgttcgattcggaaagacgatcccgtgggtgacagagtttccctttggttacatcaaagacccacagtatgttgggagcatgcttagcctcgtggcgcttctgtgctgggttccgcttcagtacgtgttgctgtggtgccttggctatgttttcatgatgtgggtcgaacacaaggaagactcagccagtcgtgccaaggtcatctcctagttacttggttattgcagctgatagtttcctactggtgtcctagtgacattgcataaacattctttcaaaaaaattggtgcatgattgctgagatgtgacctgccgtgatttcgtacattatatcaaagtactgtggcaacctctattcttgagtaattcatgtcaagcagtattggttatggacttcagatgtagcttattggctacgagatcatcttgtaccctgggcaaatgtgc

SEQ ID NO: 119344 - DNA, 785 bp, Zea Mays
atagtgcatcctgtctctaaagattgtattccggtttatacgtgctgttcacagtatcggcctatgcctgttctgctattctgaaattggccaccatattgtttttcattgtctggttacttagcactcatgtcttgttagagttgcaactaaaattttacctagccggaaagagccagcactgtgttcaacgttatcaaggacgcacagttcattgcttttgttcctcaaaccttcgtttcttttcagggtgtatcagctgcttggtgagccaggtacctactacggcgttcgattcggaaagacgatcccgtgggtgacagagtttccctttggttacatcaaagacccacagtatgttgggagcatgcttagcctcgtggcgcttctgtgctgggttccgcttcagtacgtgttgctgtggtgccttggctatgttttcatgatgtgggtcgaacacaaggaagactcagccagtcgtgccaaggtcatctcctagttacttggttattgcagctgatagtttcctactggtgtcctagtgacattgcataaacattctttcaaaaaaattggtgcatgattgctgagatgtgacctgccgtgatttcgtacattatatcaaagtactgtggcaacctctattcttgagtaattcatgtcaagcagtattggttatggacttcagatgtagcttattggctacgagatcatcttgtaccctgggcaaatgtgcaaatgttgttgtctgagtccgagaaatctcactaggctaagtgttcaac

SEQ ID NO: 119345 - DNA, 896 bp, Zea Mays
ctcctctgtcattcctatgagaatctccatgtcctctcttccgctcacttctctcatctgcacattaaaataagatagcaaatttatgtccctacatatggttcaggttcaagcatatttaaagataagaatagaatgtgcaaaatctacttaaatgactatgaccggcaaactaatgatcggaatggttgtgaaacatgctgcaaagaattgaatcgtcaaaatcatggtcctgacagcaagtgaaacaccccaacttatgcaagttcactacatcacaaaaaatgctatgcagaggtaagaggagtaacagcttaacacaactgaaaaaatggtaaaattgtttcagatattccagcaaacatgacatattgaatcaaccaaagttgttactaaacaaacccctaagaactcaatcaaagaccaaaatcataggtgtcacaaaacaaatgtgaatttatgggaattggttctcgaaagaacataatccaaataaatcaaacttacagggaggtggtgcattcggttgaaaagatccaccatagtcaactaattctcgctgtgcttctagttccctcagaaccatcttaccgtaaccacctcttcgtttgattcattaaggaaacttgggaactcctgagagcagttgttgaacaaagggaacatgcaaaggcacaccagaatcaaaattgcaacagtaaagacaacaagcacagagaaacatgtcattatgcaaaagggtgaacttaagatgacacatggaggtctggagcatgtatggaaacatgttatgactttctatgttctatatagcaccaaattagaatggagtaaactgtaatagaatagcatcaaaggatatcaggatcataatctgtacggtactcatctctgac

SEQ ID NO: 119346 - DNA, 652 bp, Zea Mays
aagatcttttgcttttagcttctcgggaggagtttgtgcctccctggtttgtataatattacttctatgcactcacttttagtttggtctgtaataacataactcaagcttgcttttgaaataaatgtaagattatgtaattcgcttccgcatttctttatctccgatgttctgtaatgtctacaagatgggtgaaacgttcctggtgaggtaaggaaagataccgaacttgtcaagtagttcaggggcacctacagggttgtctgatgtccgttggacaaggacaactgtaggtgggcctaattacttgggaggttccgtcacaaaccctatcctaacttttccaaatccctgaactcttgtatgtgtaacaccctgaatggagggggggttataaaatttcttctatgatatccaccaaattcaggtgttacctctcttctcctctctccccatttctttttcctctttcctatagtagaggagtggtcattttatttggaaatataattatactctagtaggcaaaaccctaagggagtcatgaaatattgcatcatgctgaccctcataatctgctttgtttgatgcatatgtgtggtgtgcttttctatgaggttattttttgaagttcacttgaatttgaaattcc

SEQ ID NO: 119347 - DNA, 2064 bp, Zea Mays
agctatcgcctattccttccctccctcgcattccggcaggctccgcaaacgtccgtgcgcccccgcgtcgccgcttcctccgtcccttccgttctcggcgaatcgaatccgctagcccccgacatttatggctgccgcgttaactcgcctccgatccgccgtcgagcggctcgggccttcccgcgcccgcgccttctcatcagccgctgctgaggccggggctgcgggaccgtgcagcgactctagggctttcgccgcggcctcggtggccgccggctcaggtctcgggatctggctgctgtcctcgaacccgcagccactcacagagtccggccaggcggaggatgccgccaccgcgggaggtggaggcaacagggccttctccgcagcttttggcggtgtcggagccaccggggagcgggagggcatgtttctgttcggagattcatatcgccgaagggtgttcttcaagtacgagaagaggattaggacgcgcagccctccagagaagatctttgagtacttcgcatccgtccacagcccagagggtgagatgtacatgttacctaccgacctgatgagggcggttgttcctgttttcccctcatctgagtccaaaaatgtcagggaagggagattgaagggggagcgccaccctggcgagctacaatgtgctccatctgagtttttcatgctattcgatacaaatggtgatggtgtcatctccttttctgagtatatcttctttgtaacattacttagtatccctgaatcaagcttccatgtggcttttaagatgtttgaccttgaccacaatggggaaattgacaaagacgagtttaggaaagtgatgacactgatgcgatcctataatagacaaggagctgcccatagggatggtttacgctttggacgcaaggttggtcagccagtggaaaatggtggactggtcgaatacttctttggcaaggatgggaatgaacatctacactatgataagttctctagttttttgaagaaattgcatgatgagattgtccgcttggagtttagtcactacgatgtgaaatcatccaacacaatacctgttaaggactttgcgttatccatggttgcttctgctgatatgatttacatagacaagttactggatagagttgaggatttggacgacaatcttgacctcaaggatctgcgtattacctttgaggagttcaaggcatttgctgatcttcgaagaaggttggaaccatttagaatggctatcttcagctacggcaaagtaaatggtctgttgacgaagcaggatctaaaacgtgccgcatcacatgtttgtggagtggacttgactgataaagtagtagacataattttccatgtgtttgatgctaactgtgatggtaacctgagttcagaggagttcctgaggtcattacaaagaagagaaagtgatattcgccagccagcaacgtcaggtttcctaggggtgatcgcctgttggctgaactgtacaaagtgttctcttcaacagatgctgtcccagtagattcttttttgacgctcatgacagtcttcagttgcccttggttgctctgtgcttattgtaggagctggagaacgtcatcggggagttctgaagtgtgaagaggatttttgttgtaaatattaccctgcggcccctgcttagtagctcctacgttaccacgtagcagctgtaacctgtaaggaattccttccgttctcgttcaagggcttcgatgacatacatcttctcccctgacattaaatctccgtcgacttagctggagccttgctacctatcttgcttttagctcatccctgatgctaatattctgtggattgtggttgaacaatcacacttgtaagactagcttgggaatactatttttctaagagattttcatttttccaaggaaaaataaactaattttctttggaaatttcaaatgaaaatactatgagaaaatgtggttcccaaaccagcctgtaatgattaatcgatgctttttttctgaataagtgaatggtaatgggatccgctgg

SEQ ID NO: 119348 - DNA, 2072 bp, Zea Mays
agctatcgcctattccttccctccctcgcattccggcaggctccgcaaacgtccgtgcgcccccgcgtcgccgcttcctccgtcccttccgttctcggcgaatcgaatccgctagcccccgacatttatggctgccgcgttaactcgcctccgatccgccgtcgagcggctcgggccttcccgcgcccgcgccttctcatcagccgctgctgaggccggggctgcgggaccgtgcagcgactctagggctttcgccgcggcctcggtggccgccggctcaggtctcgggatctggctgctgtcctcgaacccgcagccactcacagagtccggccaggcggaggatgccgccaccgcgggaggtggaggcaacagggccttctccgcagcttttggcggtgtcggagccaccggggagcgggagggcatgtttctgttcggagattcatatcgccgaagggtgttcttcaagtacgagaagaggattaggacgcgcagccctccagagaagatctttgagtacttcgcatccgtccacagcccagagggtgagatgtacatgttacctaccgacctgatgagggcggttgttcctgttttcccctcatctgagtccaaaaatgtcagggaagggagattgaagggggagcgccaccctggcgagctacaatgtgctccatctgagtttttcatgctattcgatacaaatggtgatggtgtcatctccttttctgagtatatcttctttgtaacattacttagtatccctgaatcaagcttccatgtggcttttaagatgtttgaccttgaccacaatggggaaattgacaaagacgagtttaggaaagtgatgacactgatgcgatcctataatagacaaggagctgcccatagggatggtttacgctttggacgcaaggttggtcagccagtggaaaatggtggactggtcgaatacttctttggcaaggatgggaatgaacatctacactatgataagttctctagttttttgaagaaattgcatgatgagattgtccgcttggagtttagtcactacgatgtgaaatcatccaacacaatacctgttaaggactttgcgttatccatggttgcttctgctgatatgatttacatagacaagttactggatagagttgaggatttggacgacaatcttgacctcaaggatctgcgtattacctttgaggagttcaaggcatttgctgatcttcgaagaaggttggaaccatttagaatggctatcttcagctacggcaaagtaaatggtctgttgacgaagcaggatctaaaacgtgccgcatcacatgtttgtggagtggacttgactgataaagtagtagacataattttccatgtgtttgatgctaactgtgatggtaacctgagttcagaggagttcctgaggtcattacaaagaagagaaagtgatattcgccagccagcaacgtcaggtttcctaggggtgatcgcctgttggctgaactgtacaaagtgttctcttcaacagatgctgtcccagtagattcttttttgacgctcatgacagtcttcagttgcccttggttgctctgtgcttattgagctggagaacgtcatcggggagttctgaagtgtgaagaggatttttgttgtaaatattaccctgcggcccctgcttagtagctcctacgttaccacgtagcagctgtaacctgtaaggaattccttccgttctcgttcaagggcttcgatgacatacatcttctcccctgacattaaatctccgtcgacttagctggagccttgctacctatcttgcttttagctcatccctgatgctaatattctgtggattgtggttgaacaatcacacttgtaagactagcttgggaatactatttttctaagagattttcatttttccaaggaaaaataaactaattttctttggaaatttcaaatgaaaatactatgagaaaatgtggttcccaaaccagcctgtaatgattaatcgatgctttttttctgaataagtgaatggtaatgggatccgctggaaacattatatt

SEQ ID NO: 119349 - DNA, 444 bp, Zea Mays
atggatttggttacgctacccgtgaggggccgatctagtgctctggctttgccacccgtgagggaccggtctggtgctccggctttgccacccatgagggaccggtctggtgctccggctttgggaccgatctggtgctccggctttggtaagttcttaatctggtgccctgtgctctgtgatatgtgcttgatggccgacgacgacaccgtggctggccaaactggtggcggtgaggctgttgttccttcaacggagcccatcaacatagatcttgacactgttgtggccgatgctgaggagacagacacaacaactagttctcgggtaagaaatagcgcttgcacatctgatgatgaacaagttccagttgacactctagggtcctctcatgcatctcaatcttatacacctactaatccacaaccacatgtggatgactga

SEQ ID NO: 119350 - DNA, 1692 bp, Zea Mays
atgggattcgtcggggacatcgccatcgaggaatccgctgctggagatagaagcccggttctcgaccaagaacatgatgcaggctatgaagtgctataccatggagagccgaagatcaccgtgtctgtgccgatcggggagaaaggaagcgagacgcatggggccgccgcacagggcctcgtctgcgtaggcatgcccgcctggttgcggtccgcccaagccatagccggtgatgagcaagctcatccgcccgaggccggaatacttcatcaattcgacgccgcggctgggattgaatctggatttttccctgggtcgagaacgtcggaggagctatactactatattaaggctgcaagggtgaactcgccaatggtgtttaagctgggcttcactctggtttttggcccatctacagtagcccgcccctccaaaaaccctcccagccaccaggacccctcccagccgccagaaaccctactcctctcctctgtcctctctagtttctgccgacgtctctgctccagcctccaagtgctccagccagcagaaagattacatcgacaaaaactgattttcgacgaagggaaggcgtgcagcgagctcgtgagcttttctgattccagtggctcttcacagcgcaagggtactagatgtgattggatggaggatatcattatgtatgtgaattcgccaggagggtcagtgacagctggaatggctatatttgtgaacataaaaattagtaatctggagaggcctcttgacaacttatgtctcagtaggatggctcccactagaattcatgtaacatgtgcattagtttatgggccttcaccaacaggaaggatccaccaaggagtttgttcaacatggatgaagaatacaattcttctggaatatagcgaagaatgcagttgggctcccatctttgtgaggcagtcaaatttcaagttacctgatgatccgtccactcctattatcatgattggtcctgggacagggctggctccttttagaggcttcttgcaggaaaggttagcattgaaacaatctggggcagaattgggcacttcaatccttttctttggatgcaggaaccgtaatatggactacatatatgaagatgagttgcaaactttccttgaggagggggcgctttctgagctaattgttgcattctctcgggaagggccaacaaaagaatatgtgcagcataagatggtggaaaaggccacaaaaatttggaacgtcatctcaaatggtggttacttatatgtttgcggtgatgccaagggaatggctacagatgtacacaaaatgcttcgtacaatagtccaagagcagctgacactggtcacccaggagcacgagatgagcgcgttgatgtacttagtactgtgaaatcaaactggaggaggctgcaattctgcattacacctacaaaaaattctcaaacctaacctcaaggagggatagatgtggctgcaaaccaactaaagaagatgtgaagcaatgttttatcttggaatttgaccgtttggtgagctagcttttctttcttttgttgtatctgtatatcatctattgttttcatgtggatacaggaaattgtcacgagtggagccaatttcattttttacagtgtgcatgtagtatattttttaactgtaagtggatgactggttgtag

SEQ ID NO: 119351 - DNA, 441 bp, Zea Mays
atgcggcttgctgcacatttttcacgaacagccggcgggtaccacagagaacagcgaggaggggctcgctgtgtgcagaggagggcgcaggaacaacaaaaatggagcagggaggggcactgtttgggtgctcggatgggggagccgaggggagaaagtctcctgctgctgggcagccatggtcagcaacagcaggggctggccacccttgacgcgagcagggggcgacctcggatcagagctatggcgcagcacctccaaagggaaagagcagagggaggcagatgcagtggggaaagggcgcagggagtcctggacgccatggccagccgatggtgtggccgagcaggaggggtgctggccatggaagggctgctggcggccatggataaaggggcagaggaggtcgcggccaagaggagatcaagggcgtcggcatga

SEQ ID NO: 119352 - DNA, 1325 bp, Zea Mays
gcacttgcttcaatactagctcgctcaccactcaccagtcaccagtctagcaagcaacaacaaaggcgtaggaggaagcttgttttggaccgagcaagcgagccagccgagcgtgggagagagagaaagaggaattaattgatgggcgaggaggccagctgcgacgccgtcagcctgacggaggccggcaccaacgccaagccggtgggcaaggaggtcggccgcgagccggctgcagcccccgccgccgcggccgacccccggctgcagggcatttccgacgccatccgcgtcgtgccgcacttccccaagcaaggcatcatgttcaacgacatcaccacgctgctgctgcgccccagggtgttcaaggacgccgtcgacctgttcgtcgagcggtaccgcgggatgggcatcgacgccgtcgccgggattgaggccaggggcttcgtgttcggcccggcgatcgcgctggctattggcgctaagttcatacctctgcgcaagccaaggaagctcccaggtgagagattccatgaccatgcatgttctgtttttcttcttcttcttaacccatctccacactctgcactgtacccagctgttgcttttgtcgatctagtgcccagcctgtggcgacaccctgatcaagtatatgtttagcgaggagggttcttgcttagcccataatctctgacaccgccagagttgtttgtctggcctgcatgcagttgcagtcccgtgaatgggatattaaaagaaaaatgcaacagacggtttatacgagaccgatcattcattcattccccacttctgtccacaatgttgtagaatcatgtgctgacaccggctctcggaaacaattattattattattattggaaggtgaggtgatctccgagaagtacgttctcgagtacgggactgattgcctggagatgcgtgtcggggccatcgagcgatccggcgagcgggtgctggtcatcgacgacctggttgcgaccggagggacactctgtgctgcgatcaggcttctagaacgtgctggagccgatgtggtcgagtgcgcgtgtgtcattgggctcccgaaattcaaggtaccgcgttgctggattcacaactaatctgaactactgatatgcaaaaccagctgtttattattaaaatctagctgacatactgccatatactactgtactagcctgtattacgtattatgataacgttaggttccatatgctgtactagcctgtactagacatgctcggatgagattgtaaaatctgggtttcagatataaaaaacaatctatatatgttgtttcgtgg

SEQ ID NO: 119353 - DNA, 1584 bp, Zea Mays
gcacttgcttcaatactagctcgctcaccactcaccagtcaccagtctagcaagcaacaacaaaggcgtaggaggaagcttgttttggaccgagcaagcgagccagccgagcgtgggagagagagaaagaggaattaattgatgggcgaggaggccagctgcgacgccgtcagcctgacggaggccggcaccaacgccaagccggtgggcaaggaggtcggccgcgagccggctgcagcccccgccgccgcggccgacccccggctgcagggcatttccgacgccatccgcgtcgtgccgcacttccccaagcaaggcatcatgttcaacgacatcaccacgctgctgctgcgccccagggtgttcaaggacgccgtcgacctgttcgtcgagcggtaccgcgggatgggcatcgacgccgtcgccggcttttccgcctcgtccggtacgtggccccccttgggaccgcgtgatcggacggttgcgtgcggccggcgcacgggatcgggcggtccggggacgccggcggtacacacccgtcgtcggtttccgcgggtggcgcgccctgatgtcacgcggctccgctgtcgctgtcgctgtaactgtttccgagattttgctctgcggctcgctggatcctctgtccgcttccgttccgcgggccgtgttcccgaatttccattttttttatttttctttacaagcgggacgtacaaatcgagcgatttgcgctggctctgataaattgttgggttcacttggacattcctgtccagggattgaggccaggggcttcgtgttcggcccggcgatcgcgctggctattggcgctaagttcatacctctgcgcaagccaaggaagctcccaggtgaggtgatctccgagaagtacgttctcgagtacgggactgattgcctggagatgcgtgtcggggccatcgagcgatccggcgagcgggtgctggtcatcgacgacctggttgcgaccggagggacactctgtgctgcgatcaggcttctagaacgtgctggagccgatgtggtcgagtgcgcgtgtgtcattgggctcccgaaattcaaggatttgtacaagttgaatggaaaacctgtatacgtgctggttgagtctcgtgaataatcggagaaatgacaacttattctcaggtgtcagagtgatcagggatattggctgtttactccttgctactgcgattgaacagtggagggacgacatggacaaggacaagtatattcggtgcatcactaagtcttggtgaggggagagattgtagtgttttaggctgagtagtgaagagcctgtagttctgcacggaacatgatggttattagttgatgcaacagcgttgctgttctattattgtttgttgaattttgtggctttggtttgaagcctagcctgggctcaaacagggatatgcatggcgcttgagtgaacaacttcgacagcaacacacacatgcttaatgtcagggaagtagctaggaacctgctacttgttacccgtacgtagtgtcatggaactcataaggtttagtggcaaaattcataaaaatgacacgggaa

SEQ ID NO: 119354 - DNA, 1235 bp, Zea Mays
gcacttgcttcaatactagctcgctcaccactcaccagtcaccagtctagcaagcaacaacaaaggcgtaggaggaagcttgttttggaccgagcaagcgagccagccgagcgtgggagagagagaaagaggaattaattgatgggcgaggaggccagctgcgacgccgtcagcctgacggaggccggcaccaacgccaagccggtgggcaaggaggtcggccgcgagccggctgcagcccccgccgccgcggccgacccccggctgcagggcatttccgacgccatccgcgtcgtgccgcacttccccaagcaaggcatcatgttcaacgacatcaccacgctgctgctgcgccccagggtgttcaaggacgccgtcgacctgttcgtcgagcggtaccgcgggatgggcatcgacgccgtcgccgggattgaggccaggggcttcgtgttcggcccggcgatcgcgctggctattggcgctaagttcatacctctgcgcaagccaaggaagctcccaggtgaggtgatctccgagaagtacgttctcgagtacgggactgattgcctggagatgcgtgtcggggccatcgagcgatccggcgagcgggtgctggtcatcgacgacctggttgcgaccggagggacactctgtgctgcgatcaggcttctagaacgtgctggagccgatgtggtcgagtgcgcgtgtgtcattgggctcccgaaattcaaggatttgtacaagttgaatggaaaacctgtatacgtgctggttgagtctcgtgaataatcggagaaatgacaacttattctcaggtgtcagagtgatcagggatattggctgtttactccttgctactgcgattgaacagtggagggacgacatggacaaggacaagtatattcggtgcatcactaagtcttggtgaggggagagattgtagtgttttaggctgagtagtgaagagcctgtagttctgcacggaacatgatggttattagttgatgcaacagcgttgctgttctattattgtttgttgaattttgtggctttggtttgaagcctagcctgggctcaaacagggatatgcatggcgcttgagtgaacaacttcgacagcaacacacacatgcttaatgtcagggaagtagctaggaacctgctacttgttacccgtacgtagtgtcatggaactcataaggtttagtggcaaaattcataaaaatgacacgggaa

SEQ ID NO: 119355 - DNA, 1152 bp, Zea Mays
gcacttgcttcaatactagctcgctcaccactcaccagtcaccagtctagcaagcaacaacaaaggcgtaggaggaagcttgttttggaccgagcaagcgagccagccgagcgtgggagagagagaaagaggaattaattgatgggcgaggaggccagctgcgacgccgtcagcctgacggaggccggcaccaacgccaagccggtgggcaaggaggtcggccgcgagccggctgcagcccccgccgccgcggccgacccccggctgcagggcatttccgacgccatccgcgtcgtgccgcacttccccaagcaaggcatcatgttcaacgacatcaccacgctgctgctgcgccccagggtgttcaaggacgccgtcgacctgttcgtcgagcggtaccgcgggatgggcatcgacgccgtcgccgggattgaggccaggggcttcgtgttcggcccggcgatcgcgctggctattggcgctaagttcatacctctgcgcaagccaaggaagctcccaggtgaggtgatctccgagaagtacgttctcgagtacgggactgattgcctggagatgcgtgtcggggccatcgagcgatccggcgagcgggtgctggtcatcgacgacctggttgcgaccggagggacactctgtgctgcgatcaggcttctagaacgtgctggagccgatgtggtcgagtgcgcgtgtgtcattgggctcccgaaattcaaggtgtcagagtgatcagggatattggctgtttactccttgctactgcgattgaacagtggagggacgacatggacaaggacaagtatattcggtgcatcactaagtcttggtgaggggagagattgtagtgttttaggctgagtagtgaagagcctgtagttctgcacggaacatgatggttattagttgatgcaacagcgttgctgttctattattgtttgttgaattttgtggctttggtttgaagcctagcctgggctcaaacagggatatgcatggcgcttgagtgaacaacttcgacagcaacacacacatgcttaatgtcagggaagtagctaggaacctgctacttgttacccgtacgtagtgtcatggaactcataaggtttagtggcaaaattcataaaaatgacacgggaa

SEQ ID NO: 119356 - DNA, 96 bp, Zea Mays
cggcgtgcgtggatgggcaaagtaattacattaagatccctgtaatttacattatagccctggaatctatgttaagtgcaaaacaaatataaaaaa

SEQ ID NO: 119357 - DNA, 1628 bp, Zea Mays
ctgccggcgcggtcgggcagaagcttccgcatccgctcccattccggcgtccggagtcgctgaccgccaagtcagtcagtcgccgaggcgaggacgacgaggcagacaacgcacccccgcacctgttgttaccagcgcggcgcacgagtccagtcgcgtgcaggcgcgctgcatagggccagagccaagtaagtgggtggggacagaaatatcctcctgctcctcggcctcggcgtgctcgcgggcggagcaggaggggctaggaggaggcggatcggggagcggagatcctagccggagggatggcgaagggcggcgtggagaggggcgcgctgctgccggtctcagcggacgacggcaagggaaacggcggaggggcaggcggcgacgatgccgtgctgttcaaggggtccgccatgacccgccgcggcggcaccgccgcgctctcttacatggcatgctccgtgttgctagtgatgtttaacaaagcagctctctcttcgtataatttcccttgtgcgaatgtcatcacactccttcagatggtgtgctcaacgtgccttctttatgttctgagacgattaaagatcatctccttcactaatagtgatccatcagtgccttctgattcactattctttgtgccgtttaggttattactacgcaccacacctctttccttggcttatttactctacatgcttcaatggaatcggtccgtggagttaatgttcctatgtatacaactctacggcgcacgacagttgtgtttacaatgacaatggagtatttcctggcaaagcagaagcacaccccacctataataggcagtgtggctttgattgtattcggagcattcgttgctggagctcgagacttgtcatttgatgctcgtgggtatgctattgtctttgtggccaacattacgacagccatttaccttgctactatcaaccgtataggaaaatctagtggcctcaatagctttggcctgatgtggtgcaatggacttgtctgtggaccttcagtactgttattgacatatattcagggtgacctaaagagggccatggaatttccgtacctttattcccctgggttcatgactgtgctgctattttcgtgcatcctagcatttctactgaactacactatcttctggaacacaatcctgaattctgcactcacacaatcgatgtgtgggaacttgaaggatttcttcaccgttggaattggttgggtgctatttggtggacttccttttgatcttcttaatgttataggacaaggactaggctttctgggctctggattgtatgcctactgcaagatcaaaggaaagtagacgctgatgtctagtgggatcaactgggggtagacggtggtgtgacttggtgtttcattcagggccagtgtgcttaacaaaagtagcgttgtttatgctgtttgctcctacatatgggagagaaattttgtaggtttcctgtatgtattagacttcagccctaatgaacactgcaaaactgaaaaggaaatagagtataccgaatttttactgttaccttatgagttatgaccgtttctcttttaaactcgaatagacgtgcaaaatacaatgaacttatgta

SEQ ID NO: 119358 - DNA, 1522 bp, Zea Mays
ctgccggcgcggtcgggcagaagcttccgcatccgctcccattccggcgtccggagtcgctgaccgccaagtcagtcagtcgccgaggcgaggacgacgaggcagacaacgcacccccgcacctgttgttaccagcgcggcgcacgagtccagtcgcgtgcaggcgcgctgcatagggccagagccaagtaagtgggtggggacagaaatatcctcctgctcctcggcctcggcgtgctcgcgggcggagcaggaggggctaggaggaggcggatcggggagcggagatcctagccggagggatggcgaagggcggcgtggagaggggcgcgctgctgccggtctcagcggacgacggcaagggaaacggcggaggggcaggcggcgacgatgccgtgctgttcaaggggtccgccatgacccgccgcggcggcaccgccgcgctctcttacatggcatgctccgtgttgctagtgatgtttaacaaagcagctctctcttcgtataatttcccttgtgcgaatgtcatcacactccttcaggttattactacgcaccacacctctttccttggcttatttactctacatgctagcttcaatggaatcggtccgtggagttaatgttcctatgtatacaactctacggcgcacgacagttgtgtttacaatgacaatggagtatttcctggcaaagcagaagcacaccccacctataataggcagtgtggctttgattgtattcggagcattcgttgctggagctcgagacttgtcatttgatgctcgtgggtatgctattgtctttgtggccaacattacgacagccatttaccttgctactatcaaccgtataggaaaatctagtggcctcaatagctttggcctgatgtggtgcaatggacttgtctgtggaccttcagtactgttattgacatatattcagggtgacctaaagagggccatggaatttccgtacctttattcccctgggttcatgactgtgctgctattttcgtgcatcctagcatttctactgaactacactatcttctggaacacaatcctgaattctgcactcacacaatcgatgtgtgggaacttgaaggatttcttcaccgttggaattggttgggtgctatttggtggacttccttttgatcttcttaatgttataggacaaggactaggctttctgggctctggattgtatgcctactgcaagatcaaaggaaagtagacgctgatgtctagtgggatcaactgggggtagacggtggtgtgacttggtgtttcattcagggccagtgtgcttaacaaaagtagcgttgtttatgctgtttgctcctacatatgggagagaaattttgtaggtttcctgtatgtattagacttcagccctaatgaacactgcaaaactgaaaaggaaatagagtataccgaatttttactgttaccttatgagttatgaccgtttctcttttaaactcgaatagacgtgcaaaatacaatgaacttatgta

SEQ ID NO: 119359 - DNA, 1520 bp, Zea Mays
ctgccggcgcggtcgggcagaagcttccgcatccgctcccattccggcgtccggagtcgctgaccgccaagtcagtcagtcgccgaggcgaggacgacgaggcagacaacgcacccccgcacctgttgttaccagcgcggcgcacgagtccagtcgcgtgcaggcgcgctgcatagggccagagccaagtaagtgggtggggacagaaatatcctcctgctcctcggcctcggcgtgctcgcgggcggagcaggaggggctaggaggaggcggatcggggagcggagatcctagccggagggatggcgaagggcggcgtggagaggggcgcgctgctgccggtctcagcggacgacggcaagggaaacggcggaggggcaggcggcgacgatgccgtgctgttcaaggggtccgccatgacccgccgcggcggcaccgccgcgctctcttacatggcatgctccgtgttgctagtgatgtttaacaaagcagctctctcttcgtataatttcccttgtgcgaatgtcatcacactccttcagaggttattactacgcaccacacctctttccttggcttatttactctacatgcttcaatggaatcggtccgtggagttaatgttcctatgtatacaactctacggcgcacgacagttgtgtttacaatgacaatggagtatttcctggcaaagcagaagcacaccccacctataataggcagtgtggctttgattgtattcggagcattcgttgctggagctcgagacttgtcatttgatgctcgtgggtatgctattgtctttgtggccaacattacgacagccatttaccttgctactatcaaccgtataggaaaatctagtggcctcaatagctttggcctgatgtggtgcaatggacttgtctgtggaccttcagtactgttattgacatatattcagggtgacctaaagagggccatggaatttccgtacctttattcccctgggttcatgactgtgctgctattttcgtgcatcctagcatttctactgaactacactatcttctggaacacaatcctgaattctgcactcacacaatcgatgtgtgggaacttgaaggatttcttcaccgttggaattggttgggtgctatttggtggacttccttttgatcttcttaatgttataggacaaggactaggctttctgggctctggattgtatgcctactgcaagatcaaaggaaagtagacgctgatgtctagtgggatcaactgggggtagacggtggtgtgacttggtgtttcattcagggccagtgtgcttaacaaaagtagcgttgtttatgctgtttgctcctacatatgggagagaaattttgtaggtttcctgtatgtattagacttcagccctaatgaacactgcaaaactgaaaaggaaatagagtataccgaatttttactgttaccttatgagttatgaccgtttctcttttaaactcgaatagacgtgcaaaatacaatgaacttatgta

SEQ ID NO: 119360 - DNA, 1143 bp, Zea Mays
cggcgtccggagtcgctgaccgccaagtcagtcagtcgccgaggcgaggacgacgaggcagacaacgcacccccgcacctgttgttaccagcgcggcgcacgagtccagtcgcgtgcaggcgcgctgcatagggccagagccaagtaagtgggtggggacagaaatatcctcctgctcctcggcctcggcgtgctcgcgggcggagcaggaggggctaggaggaggcggatcggggagcggagatcctagccggagggatggcgaagggcggcgtggagaggggcgcgctgctgccggtctcagcggacgacggcaagggaaacggcggaggggcaggcggcgacgatgccgtgctgttcaaggggtccgccatgacccgccgcggcggcaccgccgcgctctcttacatggcatgctccgtgttgctagtgatgtttaacaaagcagctctctcttcgtataatttcccttgtgcgaatgtcatcacactccttcagatggtgtgctcaacgtgccttctttatgttctgagacgattaaagatcatctccttcactaatagtgatccatcagtgccttctgattcactattctttgtgccgtttaggttattactacgcaccacacctctttccttggcttatttactctacatgctagcttcaatggaatcggtccgtggagttaatgttcctatgtatacaactctacggcgcacgacagttgtgtttacaatgacaatggagtatttcctggcaaagcagaagcacaccccacctataataggcagtgtggctttgattgtattcggagcattcgttgctggagctcgagacttgtcatttgatgctcgtgggtatgctattgtctttgtggccaacattacgacagccatttaccttgctactatcaaccgtataggaaaatctagtggcctcaatagctttggcctgatgtggtgcaatggacttgtctgtggaccttcagtactgttattgacatatattcagggtgacctaaagagggccatggaatttccgtacctttattcccctgggttcatggtaacattaatttgtgcattgctgaccctccttttgtcagttttagtaggcatttaaaggctgtttgtggatgcacat

SEQ ID NO: 119361 - DNA, 1588 bp, Zea Mays
cggcgtccggagtcgctgaccgccaagtcagtcagtcgccgaggcgaggacgacgaggcagacaacgcacccccgcacctgttgttaccagcgcggcgcacgagtccagtcgcgtgcaggcgcgctgcatagggccagagccaagtaagtgggtggggacagaaatatcctcctgctcctcggcctcggcgtgctcgcgggcggagcaggaggggctaggaggaggcggatcggggagcggagatcctagccggagggatggcgaagggcggcgtggagaggggcgcgctgctgccggtctcagcggacgacggcaagggaaacggcggaggggcaggcggcgacgatgccgtgctgttcaaggggtccgccatgacccgccgcggcggcaccgccgcgctctcttacatggcatgctccgtgttgctagtgatgtttaacaaagcagctctctcttcgtataatttcccttgtgcgaatgtcatcacactccttcagatggtgtgctcaacgtgccttctttatgttctgagacgattaaagatcatctccttcactaatagtgatccatcagtgccttctgattcactattctttgtgccgtttaggttattactacgcaccacacctctttccttggcttatttactctacatgctagcttcaatggaatcggtccgtggagttaatgttcctatgtatacaactctacggcgcacgacagttgtgtttacaatgacaatggagtatttcctggcaaagcagaagcacaccccacctataataggcagtgtggctttgattgtattcggagcattcgttgctggagctcgagacttgtcatttgatgctcgtgggtatgctattgtctttgtggccaacattacgacagccatttaccttgctactatcaaccgtataggaaaatctagtggcctcaatagctttggcctgatgtggtgcaatggacttgtctgtggaccttcagtactgttattgacatatattcagggtgacctaaagagggccatggaatttccgtacctttattcccctgggttcatgactgtgctgctattttcgtgcatcctagcatttctactgaactacactatcttctggaacacaatcctgaattctgcactcacacaatcgatgtgtgggaacttgaaggatttcttcaccgttggaattggttgggtgctatttggtggacttccttttgatcttcttaatgttataggacaaggactaggctttctgggctctggattgtatgcctactgcaagatcaaaggaaagtagacgctgatgtctagtgggatcaactgggggtagacggtggtgtgacttggtgtttcattcagggccagtgtgcttaacaaaagtagcgttgtttatgctgtttgctcctacatatgggagagaaattttgtaggtttcctgtatgtattagacttcagccctaatgaacactgcaaaactgaaaaggaaatagagtataccgaatttttactgttaccttatgagttatgaccgtttctcttttaaactcgaatagacgtgcaaaatacaatgaacttatgta

SEQ ID NO: 119362 - DNA, 513 bp, Zea Mays
atgaatgcttctgctaccgcttgtatagttgctggtgattactgcgccacattttccttaggtaacgatgtggtttctacgcttgatgttcttgaatccgctgtggcggcggaaaaaagtgctatgcgttcttatcaacaggcgagtgcagccgtcgtttgtgctaaggagacattggccaaatactgtgaggcttcagattattggcagtatggctatttgtctgaaaacaacactatgatgatatgtggcagtttgagggcatatgttctgatcctaaaccctcaattgaggatgaacaaaaaacttgcgcatgcactcatatatgtcatgtctcaaatgagtgatacatctaagaaactacaagatactgcctctttctgctacacagatgaagacgttgtagatggtttcatgatgactcaagtttcgatgatggatccaacaactatattagaagctggctatggaagtgaagatagtgcggtgtgggaggacgtattccgtgactga

SEQ ID NO: 119363 - DNA, 2690 bp, Zea Mays
atgagtaactctaagccgctgagcaaactagccatgcttttcgggatgttgtcgctgtcgattctactttgctatagagttgaggaggtccattgctcgaaagttcatgaaaacaaccaagtgaacactctttgctcgatttcaagaagggcatcgcggatgatccaaatggagccatgatcagttggaccaacaacacccacttctgctggtggaaaggtgcgaagtgcactttgacgccgccgtatcgtgtcacggagctcaacctcactgtcaggaacttagctagccaaatcttcttcgctcttggaaacctgacctaccttaatttgctggcgttaccaaataatagttttgttggcccaatacccctccccttaacaagctccaaaacctatgttacctttccatgggcaacaaccttttgcatggtgtgattcctgaatggatcacgtacaaattgttccaacttaagcaaactagatctctctaataacaacctcatgggtacgattccttatagcataggttaccttaccaagatagaacatcttctccttcatgaaaataatctgtctggtggaatcccacaaactctctctaatttatcttcttttcaagagctatccttgacatacaatatgttgagcaacactttgctatccaactttggccatgccctccctaatctcaaactattgtacttgacagccaacttctttgaaggacaaattccacattctctaggcaatgtttctagtctagtatatttggatatgtcttttaataagttcactagcaaaatccctagcatactttgctcacttcgaatagtaccctcaagcattgggaaatttaatggctttgatggtacaatcccaccttccattagtaaccttaatcatttattatttttagatttttcaaataataaattcactggttcaataccacctagcatgggaaacacccaactcctggtcaatttgagcctaagtaacaacaattttagagggagaatacctgcttaatttggtgaccttaaacaattagtcttcctcgatgtttcatcgaacaaacttagtggggaaattgctgaaagtttgggctagtgccaaaatctaattaaccatcattgaagtggaccaaaatgttcttataggaaacatcccaacctccttgtgtaatgtaaagagcttgagcaagatcaatccagggtagtgccaaaatattctcagctcccttgttagaatatctaaatgatctaaagttttaataaaactgatgtatcttacaataatttccatggggagataccgaaagctggtatagttgataatcttacacttgtttcactcgatggcaatccagggttgtgtggaggagccatgggtttggatacgccttcatgccattttgactctagaagagcaacaattgtatgctatttggctaaactattgttcccaatatctgggttcacatgcctcctactgcttgtctacgttttattctttaagaagaagacttcaagaagagcacatctaccgcaactttcttttggtgagcattttgtgaaagttacttacaatgatctagcccaagcaacaggcggtttctcagaatccaacttgattggaagaggaagctatggatcggtttacagtgggaaattgatggaaattaagattgaagtggctgtcaaggtttttgaccttgagatgcaaggagcggagacaagcttcttggcagagtgtgaagcgctaagaagtattcatcatcgaaatcttgtttccatcgtaactgcatgctcaagtatagatatgacaggcaattctttcaaggctttaatttatgagctcatgcctaatgggaacctggataaatggatacatcccaaaggtgacgagacagttccaaagcgtctaagcttaactcaaagaattgcagttgtcgtcaatgtagctgatgcattggattacttacaccatgactgtggaaggcccactgtccattgtgacttgaagccgagcaacatccttctcgatgacgatatgaatgctctcttgtcagattttggcattacacgtctctacgccaatcctcagtcaatttgggcaggttcaattagttcgatcggtgttaaggggacaattggttatatccctccagagtatggaggcggtggccctgtatcgacgtccggggatgtttatagttttggagtggtgttcttagagattttgacaggtaaaaggccaacagatcctatgttcaccggggaactagacatcattagcttcgtcaagaacaattttccgcatcaaatatttcacattatcgattcacatcttgtggaagaatgcgagcatttaattcaggacaataaagtaacaaacgacgaaatgtacccatgcctggtggctctactgcaagtagcactttcttgcacgcgctcatcaccatctcaacggtcgaacatgaaggaggtagcaagaaaactgcatgcaatcaggacgtcacaaattggatagaaatccaagtaagattaggtgtactccctcgactaggatcgtaaaaatgtactctagcgtaaaaataagtggtgttcatctagtgtgtgcatatacttcaattgtacaaaaatatagatgcacctatactttgtgaatatcgtcgttaatttcttt

SEQ ID NO: 119364 - DNA, 390 bp, Zea Mays
agcaaactggccatgttcatggtgttattgtttctgctttgttatagagttgagaaagttcattgctcgacggttcatgaaaacaatcaagatcttcattctctgctcgatttcaagaagggcaccaccagcgatccaattggagccataaacagttagatcaacaacaccaacttctgccaatggaaaggtgtgaagtgcaccttaacgccgccatatcacgtcacggagctcaacctctctgagaacaacttagttggccaaatctccttctctcttggaaacctgacctaccttaatttgctggctctaccaaataatatatttggtggcccaatacccctccttgtcaggctccaaaacttaaattacctaaccctggacaacaat

SEQ ID NO: 119365 - DNA, 3015 bp, Zea Mays
atggctagcagcatatcaccagaggtgccaattaagagcatcatgcgtaactctaagccgccgagcaaactggccatgcttatggcgttgctgtcgctgtcgtttctgttttgttatggagtcgagaaggtccattgctcgacggttcacgagaacaaccaagattttcactctctgctcgatttcaagaagggcatcaccaacgatccaaatggagccatgagcaattggaccaacaacactcatttctgccggtggaacggtgtgaagtgtaccttgacaccgccatatcgtgtcatggagctcaacctcactggcaacgacttggctggccgaatctccacctctgttggaaacctgacctaccttagtttgctagcactaccaaataatagatttagcggcccaatacctccccttaacaaactccaaaacctaagttacctttccctggacaacaactttttgaatggtgtgattcctgagtcacttacaaactgttccaacttagacacactaggtctctctaaaaataacctcacaggtgttattcctcctagcataggttctcttaccaagctaaaagttattttcctttataaaaataatttgtccggggtcatcccatcaagcctaggtaacatcaccaatttatctgtaatcgctctttcagaaaatcaactcaatggacttattcccactgagttatggcaaatgccacacatagcgtctttgtacctgttttgtaataatctatccggtgaaatcccacaaactatatctaatttatcttctcttcaagagctatccttggcagtcaatatgctgagcaacactttgccatccaacttcggccatgccctccctaatctcaaattgctatacttgggaggcaacttgtttgaaggacaaattccagattctctaggcaatgtttcaggtctagtacatttggatatgtcctacaataagttgactggcaaaatccatagcatatttggaaaacttttagggctatcttttttaaacctcgaggaaaatatgtttgaagcgagtgatagtgcaagttgggatttctttgttgacctgatagcgtgcagttccctgacggtgctttcattggctagcaataatctgcagggagctataccaaattccattgctaacctatccaccaacctcagaaatctactaatgagcgacaaccacctatccggagtagtccccccaagtattgggaaattgaatggcttaattgaacttgaacttgatggcaacaattttaccggtacaattgaggattggatgccaaagttgacaagcctacaaaagttatatctccatgacaatagctttgaaggtacaatcccaccttccattagtaaccttgctcatttgacacttttggatttttcaaataataaattcactggttcaataccacctagcatgggaaacattcaacttctgatcaatttgagccttagcaacaacaatttcagagggacaatacctgccaagtttggggaccttaaacaattagtcttccttgatgtttcatcgaacgaacttggtggggaaattcctaatagtttgggccagtgccaaaatctagccgccattaaaatggaccaaaatgttcttataggaaacatcccgacctccttcagtaatctaaaaagcttgagcttgctcaatctttcccacaacaaattatcaggccccttgccaaattatttgaatgatctaaagcttctcaataaaattgacctatcttacaataatttccatggagagataccaaaagctggtatattagataattctacacttgtttcactggatggcaattcaggattgtgtggaggagccatgaatctgcatatgccttcatgccatactatttctagaagagcaagaaccataagcgatttggttaaaatattgatccccatgtttggattaatgtccctgctacatcttgtctatctagtctttgggaagaagacttcaagaagaccacatctatcacaacgttcttttggtgagcactttgagaaagttacttacaatgatcttgccaaagcaacaagggacttctcagaatacaacctaattggaagaggaagctatggttcagtgtacagtgggaaattgaaggaagtggaagtggctgtcaaggtttttaaccttgagatgcaaggtgcagacaaaagcttcttggtagagtgtgaaacgctgagaagtattcaacatcggaatcttcttcccatcataactgcatgctcgagtatagatacaacgggaaattcttttaaggctttaatttatgagcttatgcctaatgggaacttggataaatggatacatcacaaagacaatgaggcacttccaaagcgtctaagcttagctcaaagaattgcagttgtcgtcaatgtagctgatgcattggattatttacaccacgactgtggaaggcccaccatccattgtgacttgaagccaagcaacatccttctcggtgacgatatgaatgctgtcttggcagattttggcattgcacatctttattctgattctcagtcaacttggacaagttcatttagttcgatcggtgtcaaggggtcaattggctatatccctccagagtacggaggtggtggctctgtatcgacgtccggggatgtttatagttttggtgtagtgtgcttggagattttgatcggcaaaaggccgatagatcctgtgttcatcgggggactagacatcatcagcttcgtcaagaacagttttccagatcaaatatttcacattatggattcacatcttgtggaagaatgcgagcatttaattcaggacaataaagtaacaaacgaagaaatgtaccagtgcctggtggatctgctgcaagtagcgctttcttgcacgtgctcattaccatctgaacggtcgaacatgaagcaggtagcaagcaaactgcatgcaatcaagacgtcacaaattggatataaataa

SEQ ID NO: 119366 - DNA, 1469 bp, Zea Mays
aacttcatctgttgattaaattgccctcagagttagttccatgcttattcagagtaaaacttcaatacacacagcttgtatagattctaaaaaaggaggacaattcatctgtagaaaaatgaaccatactaagacaggattaataaaagatcgcccgagaagaggatgatcatcaaaggtaatattttgcccgcaaggatagtacaaagtacactacagaacattgtgaaacaaatgtgtgtgcacataaactcttcaactcagttttacataagatgtatgatatggtcatcagtttgagaatgtgcaaaacaaaatagagtatgcacattcagctttggtgcctacccccttcacagacagcaatgcgaccatcaaccttgattggaggtacctcgttgatcagttccattggccagtttggtcttcagtttggtcttcagattggagctatacaggtatattacagctatactgtcatgctacagctatataggtatattactgctagacagacaaggacattagcagcttcaactaatggacctactttgcgttcaaggactgaaagggatattgttgatgaagaatctgaaaatagttacgaagaatctgaaaattccatcaatgatgaagagcaacctattgggcatcaaaatataaggaaaggaaggggcccaaccttgaagaagaacatatattcaagtagtggtgggcctaaaatctgcattacccttaatgaatatggacaaccagttggtaggaacagcaaagagtttggtaatttcataggaactttggtgaggaaaaatatccctatttcttgtgaggattggagactagttgattctaaaaagaagtttgagttatggacaaaagtgaaggaatactatgaagtggatgaatctggtatagattatgttataacatctgcagcaaaaaagtggagagagtttaaggctgacctaaagaacaaatattttgatgaaacattgagttttgaagagcttattgctaaaagggatgaaagggtgaaagaatctgattgggagtggttgataacttattggatgtctccagaagccgaggccgagcaacaaggacgccctgcgagaagagatgaaatatatgttagaacacacacgcataagaacaaagaaggggatattgtgcctctacctggagcagaaatattcattaactcaagggtgcatcgttcagatgaggtagcacatgattacaatggtaataaccattcacaaaatatggttgaagatgacttccaacttactaggcgagttgcaagcactatgggtcgtctaaggaatcgtgaagatgttaatactattgaagagcaaagtcacaggcgagacattgcaacaatgatgggtcgtaacaaaaaatcaacgctgacccaaggttctacaacagcaggaaaaggtgctggaagcacaaatgatcggagttga

SEQ ID NO: 119367 - DNA, 385 bp, Zea Mays
catgcttatggcgttgctgtcgctgtcgtttctgctttgttatggagtcgagaaggtacattgctcgacagttcacgagaacaaccaagattttcactctctgctcgatttcaagaagggcatcacaaacgattcaaatggagccatgagcaattggaccaacaacactcatttctgccagtggaacggtgtgaagtgcaccttgacaccgccatatcgtgtcacagagctcaacctcactggcaacgacttggctggccgaatctccacctctcttggaaacctgacctaccttagtttgctagcactaccaaataatagatttagcggcccaattcctcccattaacaaactccaaaacctaagtgttagactactgtatttg

SEQ ID NO: 119368 - DNA, 1994 bp, Zea Mays
gttcaatctcacagcaccaagcaaaaaggaagcagatcaagggtagccgagcgagcagaggttgtcaattacgtgtcttaatgagtctctggaagcagccgtcgaaactcgccatggttgtagtactgctgctgctgctatgtcatgcagtggacaaagtccattgctcgacgcaccataacaacagccaagattttcattctctgctagagttcaagaagggcatcaccagtgatccgcacggagccttgagcaattggaaccccagcatccacttctgccattggcatggtgtgaactgcagttccacgcgaccatatcgagtcacggagctcaacctcaccggccaaaacttggctggccaaatcagctcctctgttggaaacctgaccttccttcatacccttgatcttagcaacaatagcttcattggccccctacctcttcttaacaagctccgaaacctggacttactctttctgggaagcaaccatttggaggatgttattctagattggcttacaaactgttccaacttagtctacctagatctctctaaaaaccatctcacgggtcatattcctccgaacatagcctttcttaaaaagctagaaggtatcaacctttatggtaattatctcagtggggtcatccctccaaccttaagaaacctctccacactattgttagttgatctttcaaacaatcaactaaatggaagcattcctaatgaagtttggcaaataccgaacatacaaatggtaaatctagcaataaataacctatcaggtggaatcccagatactttcactaacttatcttctcttatgatattaggccttgaccacaatatgctgggcggcacattgccatcaaacattggtgatgtgctccctcatctgcaaggactatacttaggaagcaacttattttttggtacaattccaacttccctaggcaatgcttcaaatctagaagtcgtagacctaccaaacaaccttttcagtggcacaatcccaagttcttttggaaacctttcaaagttgcagattctaaaccttgaggtaaacatgcttgaagcaagacatatgtctcataatcatctacacggacctataccaaattcgattgctaatctgtccactagtcttcaacaactattcatgggttggaataacctttcaggaatagttcccccaactattggaaaacttagtggcttaactaaattatcactagaaaacaacaacctcataggtgtagttttactcctagaaaagaggacatcaagaagagcatatagatcagagcaatcttattatgagcattttgagaaagttacctataacgacttagctcaagcaacacatgacttcttagaatccaacctgattgggagaggaagttatggttcggtgtatcaagggaagctgaaggaaggcagaatggaagtggcagtaaatttttttgacctagagatcagaggagcaggaagaagcttcttgtcggagtgtgaagcattgagaagcattcaacactggaatattcttcccatcatagtttcttgttcaatagtagataatgtacgaaatgttttcatagatttaatttatgagtacatgcctaatgggagcttggacacatggctacatcacaaaggcgacgaggaggctacaaaatgtcatggcttgactcaaagtataagcatagctgttaatatagctgatgcattggattatttgcaccatgattgtggacagcaaactatttgttgcgacttgaaacctagcaatatccttctagattgtgacatgaatgctcttttgggagattttgaaattgcacgtttgtatcatgattccgagtcaaaatggacagagtatgggggaggtggtcatgcatcaacgtctggggatgtttatagttttggaatagtgttgttggagattttgacgagcagaagcccaatagatccaacgttcaaggacggctag

SEQ ID NO: 119369 - DNA, 1663 bp, Zea Mays
tgatcctaaattaatgacaaagttagaccttagccataacaatttctaagggagcatacctgttccctaaatcttacttagaactcatctcgctaaatctttcatcaaacaaatttagtggcgaaattcctaaaactttatgaagacttgaacaactaaaggacaatcaaatggaccacaacattcttactagaaacattccgtccacattcagcagtctacacagcttgaacttgttcaatctttcccataacaatttatctggtcgaatgccaaattttctaagtggtctaaatcttagtaaactagacctaccgtacaataataatttccaaggagaaagatcaagaactggtctatttgataatcctacagtcatatcgctagatggaatctgggattgtgtggaggagccatggttttgcatatgcctccttgccatgttgcttcaagaatagtagggagtgcaacattattgatcaaaaatattgatcccaatatttgggttcatgtctctcgtattgcaggtgtagttttactcctagaaaagaggacatcaagaagagcatatagatcagagcaatcttattatgagcattttgagaaagttacctataacgacttagctcaagcaacacatgacttcttagaatccaacctgattgggagaggaagttatggttcggtgtatcaagggaagctgaaggaaggcagaatggaagtggcagtaaatttttttgacctagagatcagaggagcaggaagaagcttcttgtcggagtgtgaagcattgagaagcattcaacactggaatattcttcccatcatagtttcttgttcaatagtagataatgtacgaaatgttttcatagatttaatttatgagtacatgcctaatgggagcttggacacatggctacatcacaaaggcgacgaggaggctacaaaatgtcatggcttgactcaaagtataagcatagctgttaatatagctgatgcattggattatttgcaccatgattgtggacagcaaactatttgttgcgacttgaaacctagcaatatccttctagattgtgacatgaatgctcttttgggagattttgaaattgcacgtttgtatcatgattccgagtcaaaatggacaggttcaataagttcaattggtgtaaaaggaacatttggatatattcctccagagtatgggggaggtggtcatgcatcaacgtctggggatgtttatagttttggaatagtgttgttggagattttgacgagcagaagcccaatagatccaacgttcaaggacggctagggcatcatcaactttgttgagaataactttccgaatcaagtatttcaagtcattgactctgacctcctagaagaatgcaggaactcaactcaaggaaataatttggtacaagaaaatgagatctaccaatgcttggttgatctactgcaagtcacactttcgtttctctattcattaccatctgaatgatcgaacatgaagaaagtagccagcagaatgcatgcaatcaaaacatcacatattgggtggaagcacatgtaacaagagcaagggtgttccctaaattatacagtaacatacttaggatgggtcatagtcgaaaatgaccagtggcatggtggtacaggc

SEQ ID NO: 119370 - DNA, 432 bp, Zea Mays
catgaactattggcgttggctatctaaaaggacagaaaggcagacatgagcaacagatcccgctccatgggctgaaattgggattcgtgatggtcagctaagcataccttcgccttcaaatttgcgtagcttcttttttattctgcaagttgtttggtctgctgttcaaatgccttattattctgcgagctgttttaagactgggcctcaatattttttccaggcagaaagtgctactgccgctctcaactgtagcggtgtggtactgggatccttgccaataagggtgagcccgtccaagacgcccgtgcgtccccgcacccctcgccagctgatgtcgtcctaggtatacatacaggaggtgctgacgatggcactgctcatatataagtaatagagatagacatgtatgaaaagggtcttttgttttca

SEQ ID NO: 119371 - DNA, 227 bp, Zea Mays
acacctaatgcggggttgcaatcacaccacaccagcagttgcaattacaacacaccagcagttgcaatcattttgtttacattttttaacatatatttgggtagaattatacatcagttgcaatcacacctaatgcggggttgcaatcacaccacaccagcagttgcaattacaacacaccagcagttgcaatcattttgtttacatttttttaacatatatttggg

SEQ ID NO: 119372 - DNA, 2950 bp, Zea Mays
atgagtcattggaagcagccgtcgaaactcgccatgcttgtagtactgctgctgctgctatgtcatgcagtggacaaagtccattgctcgacgcaccataacaacagccaagattttcattccctgcttgagtttcacaagggcatcaccagtgatccgaacgaagccttgagcaattggaaccccagcatccacttctgccattggcatggtgtgaactgcagtttcactcgaccatatcgagtcacggagctcaatctcaccggccaaaacttggctggccaaatcagctcctctcttggaaacctgaccttccttcatacccttgatcttagctacaatagcttcagtggccccctacctcttcttaacaagctccgaaacctggacgtactctttctgggaagcaaccatttgggggatgttattcccgattggcttacaaactcttccaacttagttgatctagatctctctgaaaacaatctcaccggccatattccttcaaacataggcttcctaacgaagctagaaggtatagccctttacaataataatctcaccggtgtcatcccaccaaccttgggaaacatctccacactagaggtagttgatttttcagcgaatcaactaagcggaagcattcctaataaagtttggcaaatctcaaacataacaatgttaaatctaggacaaaataacctatcaggtggaatcccagatactctctctaacttctcttctcttacagcattaggcttgaacaacaataagctaggcagcgcattgccatcaaacattggcgatgtgttccgtcatctaaatgaactatacttagataacaacatttttgtgggtacaattccaacttccctaggtaatccttcgagtctagaagccctagacctatcaaacaatcatttcagtggcaaaatcccaagttcttttggaagactttcaaagttacagattttaaaccttgagctaaacatgcttgaagcaagggatagtgaaggctggcaattctttgatgccctggcaaactgtagttccctgaatatactttcagtgtctcaaaatcttctacatggacctataccaaattcgatttcaaatctgtccaccactcttcaatacctaatgatggcttcgaacaacctatcaggaaccgttcccccaactattggaaaatttagtggcttgattaaattatcacttgcaaacaacaaccttacaggtaccattgaggaatgggtcggaaacatgacaaaactacaaatcttaggactacaatcgaacaactttgcaggggaaattcctccttcaattggcaatcttacacagttgatacacttctctatagccaggaacaatttcttcggctctgtacccatctaacttgtgcaatcttaaattaatgtcgtggttggaccttagccataacaatttccaagggagcatacctgttcagtttggtaactcagaactcatgtcgctaaatctttcatcaaacaaattcagcggcgaaattcctgaaactttaggacatatcgaacaattaacggtcattcaaatggaccaaaacaatcttactggaaacatccgtccacattgaggaatctatacagcttgagcttgctcaccccataacaatttatccggcctaatgccaacttttctaagtggtctaaatctcagtaaactagatctatcctacaatagtttccaaggagtaatacctacaaccggtctattcgataattctacagttgtttcgctagatgggaatccgagattatgtggaggagccatggatttgcatatgcctccatgccatgttgcttcaagaagagcacgcagagcaagcttattgattgaaatattgatcccaatatttgggttcatgtcactcgtattgctggtgcacattttactcctagagaagaggcagtcaagaagactatggatcgaagcaatcatttggtgagcattttgagaaagttacttataatgacttagctcaatcaacatgtaacttctcagaatctaacttaattggtagaggaagatatggttcggtgtaccgagggaagctgaaggaaatggaagtggcagtaaaggtttttgacctggagatgagaggagcagaaagaagcttcttgtcagagtgtgaagcattgagaagcattcaacaccggaatcttatccccatcataactgcttgctcaatagtaggtactttcaaagctttaatttttgagttcatgtctaatggcaacctggacacatggctacgtcacaaaggagacgaggaggctacaaggtgtcttggcttaactcaaagaataaacatagttgttaatatagctgatgcattggattatttgcaccatggttgtgggcggccaactgttcactgtgacttgaaacccagcaatatacttctagatgatgacatgaatgctctcttgggagattttggaattgcaagtttctattatgattttgagacaaaatggacatgttcaagtagttcaattggtataaagggaacaattggatatattcctccagaatacggagtaggtggccatgcatcaacatgtggggatgtttatagttttgggattgtgttgttggagattttgacgagtaaaaggccaacagaccctatgttcgaagatggcttaaacatcatcaactttgtggagaacaactttccgaatcaaatatttcaagtcattgacgctcacctcctggaagaatgcaggaactcaactcaaggaaataatttggtacaagaaaatgaaatctatcagtgcttggttgatctgctgcaattagcactttcatgcatttgcccattaccatctgaacgattgaacatgaagcaagtagccagcagaatgcatgaaataaaaaaacatcacatattaggtggaagcacaag

SEQ ID NO: 119373 - DNA, 551 bp, Zea Mays
caatctcacagcaccaagcaaaaaggaagcagattaagggcagccgagcgagcagaggttgtcaattacgtgccttaatgagtcactggaagcagccgtcgaaactcgccatgcttgtagtactgctgctgctgctatgtcatgcagtggacagagtccattgctcgacgcatcataacaacagccaagattttcattcgctgcttgagttccacaagggcatcaccagtgatccgcacggagccttgagcaattggaaccccagcatacacttctgccattggcatggtgtgaactgcagttccactcgaccatatcgagtcacggagctcaatctcaacggccaaagcttggctggccaaatcagctcctctcttggaaacctgaccttccttcagacccttgatcttagcaacaatagcttcattggccccctacctcttcttaacaagctccgaaacctggacgtactttgtcaaggacctggaatccccgacttgccggaccacggctacgtagctcgtagccgtcggccgtcctctccggttggg

SEQ ID NO: 119374 - DNA, 3088 bp, Zea Mays
atgagtcactggaagcagccgtcgaaactcgccatgcttgtagtactgctgctgctgctatgtcatgcagtggacagagtccattgctcgacgcatcataacaacagccaagattttcattcgctgcttgagttccacaagggcatcaccagtgatccgcacggagccttgagcaattggaaccccagcatacacttctgccattggcatggtgtgaactgcagttccactcgaccatatcgagtcacggagctcaatctcaacggccaaagcttggctggccaaatcagctcctctcttggaaacctgaccttccttcagacccttgatcttagcaacaatagcttcattggccccctacctcttcttaacaagctccgaaacctggacgtactttttctgggaagcaaccttttggaggatgttattcctgattggcttacaaactgttctaacttagtccaactagatctctctgaaaacaatctcaccggtcatattccttcaaacatagacattctaaaaaagctagaatatataggcctttactataataatctcaccggtgtcatcccaccaaccttgggaaacatctccacactagatgtagttgatctttcaatgaatcaactaagtggaagcattcctgatgatgtttggaaaatatcgaacataacacagttatttctacaacaaaataatctatcaggcggaatcctagatactctctctaaattatcttctcttgtgatattaaacttgcacaccaatatgttgggaggcacattgccatcaaacattggtgatgtgctccctaatctgcaagaactatacttaggaaagaataattttgtgggtacaattccaaattccctaggtaatccttcgagtcttaaaatcatagatctatcaataaactattttaggggcaaaattccgaactcttttggaaatctttcacatttgcagtctctaaaccttgaggtaaacatgcttggatcaagggatagtgaaggcttgcaattctttgatgccctcgcaaattgtagatctctcgttacactttcagtgtccaataatcagctacatggtcctataccaaactcgattgctaatctgtccactagtcttggacaactagtgatgggttggaacagcctatcaggaacaattcccccaaccattggaaaacttagtggcttatatagattatcactacaaaacaataatcttacaggtaccattgaggaatggatcggaaagatgacaaatctacaatttttaacactacagtcaaacaacttcatagggaaaattccaccttcaattggcaatcttacacagttgatagatatcttctctgtagccaaaaacaatttatctggttttgtaccatctaacttctggaatcttaaaatatcgaagttggaccttagccataacaatttccaagggagcatacctgttcaatttagtaacttagaactcatctggctaaatctttcatcaaacaaatttagtggtgaaattcctggaactttaggacaacttgaacaaatacagaccattcaaatggaccaaaacattcttactggaaacattccgcccatatttagtcgactatatagcttgaacttgctcaatctttcccataacaatttatctggccccatgccaacttttctaagtggtctaaatcttagtaaactagatctatcctacaacaattttcaaggacaaataccaagaactggtgtattcaataatcccacaattgtttcactagatggcaatccagaattgtgtggaggagccatggatttgcatatgcctccgtgccatgatacttcaaaaagagtaggtagatcaaacttattgatcaaaatattgatcccaatttttgggttcatgtcactcgtattgctggcctactttttactcctagagaagaggacgtcaagaagagaatctagattagagctatcatattgtgagcattttgagacagttacttataacgacttagctcaagcaacacgggacttctcagaatccaacctaattgggagaggaagctatggttcggtgtaccgagggaagctaaaggaaagcaaaatcgaagtggcagtaaaggtttttgaccttaagatgagaggagcagaaagaagcttcttgtcagaatgtgaagcattgagaagcattcaacaccgaaatcttcttcccatcataactgcttgctcaacagtagataatgtaggaaatgttttcaaagctttaatttatgagttcatgcctaatgggagcctggacgcatggctacatcacaaaggagatgaggagaccgcaaaatgtcttggcttgactcagagaataagcatagctatcaatatagctgacgcattggattatttgcaccatgattgtggacgaccaactgtccattgcgacttgaaacccagcaatatccttctagatgatgacatgaatgctcttttgggagattttggaatttcgcgcttctatcatgattctcagtcaaaatgggcaggttcaattagttcaattggtgtaaagggaacaattggatatattcctccagagtacggaggaggtggccatgcatcaacgtctggggatgtttatagttttgggatagtgttgctggagattttgacgagcaaaaggccaacagatcctctgttcaaggatggccaggacatcatcagctttgtggagaataactttccggatcaagtctttcaagtcattgactctcacctcctagatgaatgcaggaactcaattcaaggaaataatttggtaccagaaaatgagatctaccaatgcttggttgaccttctgcaattagcactttcgtgccttcgttcattaccatctgaacgatcaaacatgaagcaagtagccagcagaatgcatgcaatccaaacatcatatcttcggtggaagaagaagtaataagaggaagggtgttccctgaattgtaaaataacatatatacttagacatccactcgcatgtattattgattatcatctagaaaatacaagaataaaacccttgcaataga

SEQ ID NO: 119375 - DNA, 201 bp, Zea Mays
atgcaagatgttgtcttcccagttgagattatggggaagcgcatcaggtaccgcctggatggtgccaaggtcatcgagatcttcgtggacctaaaggagaggaacaacaccgaatacaagctaatgacctacactacggtctaccgcaggctgtgtgggaaagatgtggtctttgagtacccaatgaccgatatttcataa

SEQ ID NO: 119376 - DNA, 1522 bp, Zea Mays
gttctccctgatcttttctcatcgcgcgacggccagcggccttatctccagcgcgcgcctctctgcgcccagccatgctccgtgcgcgcgcgccctggattcctccctctccctcgcgtcttcttccctagcacgccgcgcttctccctctacattcctctctgccgcgcccggctggagctccctggctcgcccctcctgcgttgcgccctggccccagcttcctccctgtttcccagctcgcggcgccccctgcttttctctctctctctctcctccatggccgcgtcttgccgagatccctgctgcagcttgctcgacgcccccctgctctctgcgcatcccagcaatggtcgccgtgtgcccagctccgagcgccacggcccccccagccccttcttccttggccggttgctgctcccaggccggcgcgcggcatcgagttcgccgagatcctccctcatctccatggctgcacagcagaccgtggtgctctagcttggccccttcctctgctcggtcgctcgccgttctcatggccgcgggctgcagctcgccccatctccccccagcccccacacgcgcgcaggcttcctgctcgctcggctccttcctctcccttcccatggccgagcttttcgctgttgtccgtgacgcgcgcgcgatggacgcgatgaagacgctgcatgcgctggtgttcgaactcgccctggccatggcgcttggcttctccagccgcgcgtggcacgcgctccctgccagtgtcgttttctgctctgccgttggcacaacatcgtctgttgttgctagttggtgcaacgttgccgtccttcgacgccatgccgtgagcagcaacttcgtcgatccgtcactttgccatggtgcttgagctgctctcctgtgtatgtgatgattggaaaaggagtcacagctgatagaggattaaggaacgaaagctatagtacatcgcctgccagctgatcgtcgtaaagcctgaaccagggtctcatcattttccttgtgaagttcgagccgattataattttggaaggagatttggtgctgaagccgaagcctacagcccccttattcttcatcgtcgatccaagccgcttccccgacgtgcctgtcgatcccgacgatctatcttccaattgcgcgccacttgcgttgagctctgaagccctctgtcgtgctcgaccttggaggcctccaactcgtcgacatcccttgcgtcgtcgaaaaatcccgagagtttggataaagcaacaaatcccatgtggtgtttgccgggtgctcggcaaaaggcatgaataagaatcatcaacgtttgcttggaattctaattaaatcggtaaccgttctctagttcgctattttttattaatcgattgagtcgatggattgaatagatatattaatcgtaataaccctcgtgtctagcgcaggcgcgttgtggtagtgttaaatatatgtgaagtatgatgaagttagtaatgcgaaaggtagattaatttatgtg

SEQ ID NO: 119377 - DNA, 3366 bp, Zea Mays
cactgagtcgcacccccgtcgtggaaagggaacaacatcgcccccaacaccgagagagatagggggatctgccgcacgagcatcctgcagggatcaccgctctgggctggacagatggtcaaggcaagtctccagagcacgtacgttcgtgacctcatatggtgaggttggtggatgggagcatggttgtttctcaccgaagtttccctccgccaaggaaagccccctgccgcgggccggcgttgctgcttcaccactgtcgcccacttaacacacccacgcgacctagcacggacagatgggcccaggtcaccagcgcctcatctgatccgcgcgcggagctgcgttcaccggtgtgacgctggcgcgtggggccatctcgtcggttccatctcctaccctatattgaactcgtcctgtctattacgaaggagccggagcgaacatcgcaccaagatacagtctgatacctgtgatgcttgcctaggatccctcacggggtataaaactaagccattctcacgcccgaccctccctcaaacctaaacgtcgagactgcgtcgtcggtgatgggtgcgagcgagagagattggcgccgcttggcgccgaagggctgggtgacccgctgtccgccgccgatctctgcccgtgcgcccgctgcccgggggacttcatcatggggtcaggaagagtcaccagagccagtggtacatgcacgtggggtgttgtatgtgcgacatcgaccggcaacagaggaattgctcgttgtcgcttgatgttgccgtaaatccgcctcacaacgtggaacttctcctggtaagccggtctgggcgtgtgggctagtcagggggcttcacggactctcattgttggagttcagggtcgtatgggtcgcgatggtgctctgtggccccaccaattgctcgccgatgccgagcaggcgccaccggaccgccgtgtgcatggatagctcaccactccatctttgcctcaggtaaataacaatccaatgctttacccatgtctggagcatcgtgtagaaccattctgggttgtggattgagcaccagggcgccgagtaggacgtctgtggcgaaaaccccatcgtgggggcctacgcgccgccatcctgcaatggtgagggagaagaaagctttctagccgttgattccttgatgtgcggctaggatcatatcgctcgcatatcctttcgtgtattctacgatatccgttaagatctgatcagatggttgagaggggttgtttgtatggagcattgcaggccgtgcatcttagatcgtactatccacgtcgcttaccgattcataaaatatcccgatctaatctgaacccttgaatcgcgatcgcacggtctggttgatcgataccctttcggtcgtatcctttttgcataagagcccctgagatttctgagaatcaacccgccgtcctgatgcagtggtagaaaatttaatctatgcccctaaaacttgtagtttggcccctgatctcttaaagaatggcaccctcagtctaggacttatagaatttagtaaaataaatccgaaaatggaattttagtataaaaataagtctggaaaccttagaaactcataactcctttattttaactcctttttgatccattccagttgcattaatctcatattaatattgtttatcatatagtaaccttgtattaccatgaaatctatgattaaaatcttgtacctttgctttatagtagacacttaaactttcggaaaatcataactttatgaccgtaactccgaatttagtggttctcgaaccggtgatctcgttacgttgcgtagaacattattatgcattatgttcttatgtttagtgtgatgttaatttttcttataccatgtttgtttgtattgctacgaatagctgcgaggttacgagtcacttgaagaccaagttggtacctgagaatcttgagtctaaggcaaattgtgcccttgatcacttttctccttacccaataatgttcgtgttaatcagtgtgacatgcttaggttaatttgatggaacctaataggtttccctagatttgtttatcccacaccttgtttaccactgaacttttgggtagttttgctattgctctacctggttttgggattaattttacattatgatcatgttctagttatgttattgttttaattattgttcatgacaagatcattgtgttaattggaacatggagcttaacttgagatatccgtgctaccacaagggtggaatgggacgccctcggctgactaattaaaaaggtagtagaggactaccttacccaaaaggggcaatggcggtagaggagctgcgtatagggaagttctcgggtcgatcatgctacgatggcttttcggacgagagatgcctatactgcctttctcaaaaaccgtagcgggttttctgaagctagtggaactttgtaaaggtctcatagtggatccctagccattcacctcggaagtgtctaagggccttacaaaccctggctagacgggatacacgacttgtgggtaaagggcgcaacctctgcagagtgtaaaactggtatatcagtcgtgctcacggttaagagcgacttaggactctcgcatgattaatttatggaactaaacttaatttgtcatatgcattgcattgtgggtgttgttattaattttgatctcataattatttgggttggtatctacttttgcttagtaactgctaataaaattttgaccaactctaaaagcaatgctcagctttaaccatatcctttggtaagtcttacacttcatatgagcccccacctttggtgagttcatgcacattattccccacaacatgttgagcgatgaacgcatgaatgatgtcgcgatgatgttcgtgagaggtctaggtcgtcgtctcccagtcaactatggctgctggatcgttgtcttcatatgatataattatttaattattttgtacacaattcccatatatattaaagatttgacatttgtttatttaccatgagtcatcatacagttggtgaagttcacgcccgggtttggtgcccctaaaacccgggtgtgataggtcatgaagtacctaaagaccaaattggagaagtacctggagttgtaccaaaggattgttgtgcccttgatcacttttctttacttgataatcttctcgataatcattgtgacatgctcaggttaacttgatgggacctaataggttaccctagtattgttcaccctacaccttgcaaacaaatgaactattgggtagtcttgctattgccatacctgattttagaattaatattatatcttaattatgatcatg

SEQ ID NO: 119378 - DNA, 1438 bp, Zea Mays
gtcgtggaaagggaacaacatcgcccccaacaccgagagagatagggggatctgccgcacgagcatcctgcagggatcaccgctctgggctggacagatggtcaaggcaagtctccagagcacgtacgttcgtgacctcatatggtgaggttggtggatgggagcatggttgtttctcaccgaagtttccctccgccaaggaaagccccctgccgcgggccggcgttgctgcttcaccactgtcggtgagtcctccttccacgtgttcgccatcaactcctcagcacgtagtcgtgatagatttggaataggagcaccagggcgtggaattagtgtacgccggcgggagaaccgccgtggggctcgcttctgccgccgcggtggtgtcgtgggaagaagtgaggataccagccattgatcccttcgcggacggatgagattataacatagtcttctgcttcgatcgattagatccggggcgttgaatcgggaaccggtggttgagattagaacgtcttcataccctttcacgtttttaatccagaccacatatctgctatctgatggcccaggcgcgatcggataagatggtcgtgtgagttttattagcccctaggttttgtcttattcgacccgcggtctgggtatggtctgggtatgcataaagaatagaacaaataggtccaagtattttcaaaacagaccctgtactttttagaaatagaacccaccatcctactattgattaaatggataaaataagtcaaaggaaattcagaaaaaaactttaataatgattttcaagagtaaaattaatataagaaatacctatacacttagaaaattcataacttatacattgtaactcggattttagtggttctctaacctacgatctcatagcgacgtgtagaatatttttacacagtctattctcatgtatgatgtaatgttaattttacctattccttgtctatctatgtgtattggtacgagtagaaccgagatcatgtaaagcccaaaatatatataagggaaaaataataaaataaataaatgaacatgtttataagtgggtgttttgggattatggaacctttggagattatttggttttcttttatttatgtatatttaattagtggaattatattggtcaaataacaaagaaataaatacagaattatgctaaagtttttgtatttttgcatttgtattcaaatttatgagacaagtttaactttaaaaaaaatggaaagagaaacaagaaagagaatgaaatagaaatggaaaaagaatagacattacaaagaaaaatatatataaataattataattcttcatgctagcactttatttatgcacttgatttctatgacaaatttgaattcaaatatcagattttgaaaacaaaacaagaaaatagaaacaaataaag

SEQ ID NO: 119379 - DNA, 557 bp, Zea Mays
gtcgtggaaagggaacaacatcgcccccaacaccgagagagatagggggatctgccgcacgagcatcctgcagggatcaccgctctgggctggacagatggtcaaggcaagtctccagagcacgtacgttcgtgacctcatatggtgaggttggtggatgggagcatggttgtttctcaccgaagtttccctccgccaaggaaagccccctgccgcgggccggcgttgctgcttcaccactgtcgcccacttaacacacccacgcgacctagcacggacagatgggcccaggtcaccagcgcctcatctgatccgcgcgcggagctgcgttcaccggtgtgacgctggcgcgtggggccatctcgtcggttccatctcctaccctatattgaactcgtcctgtctattacgaaggagccggagcgaacatcgcaccaagatacagtctgatacctgtgatgcttgcctaggatccctcacggggtataaaactaagccattctcacgcccgaccctccctcaaacctaaacgtcgagactgcgtcgtcggtgatggg

SEQ ID NO: 119380 - DNA, 622 bp, Zea Mays
aagcccggaacgatggcaggcggcggggtggtgaagcacatcctgctggcaagcttcaaagaggaggtgacgcaggagcgcctggacgagctcatccacggatatgccgcgctcgtcggcgtgctcccgctagtcgcactcggaagcgaatttcatttaccctctctcctcggggtggccctcgatctagagacagcatctatctctagcgagagcgataccgtcgaggcgcctatccacgccagacactacgtccgcagtgatgggcgacctccaggacctgaatggtgccaccgtaggcttctcggtggccggcggccggcggcccggaggaggcgactgaagaggaggacatgcgcggctatgagggatgcgctcgctggtggccgaagtctgggataagctggggctatgcatggccgagaagatggaggcgaggtgagtcactccatcacgctgcgcatgtcaccaaggcacggcctcccaatctcgagcctagacttttcaacgaaggttatggatttggctgcaggggaactcctggagattgtgcctcttggaaaaggcttctttcttgccaactatcctatttcaattttggattgaccattatcgttcgcgt

SEQ ID NO: 119381 - DNA, 1763 bp, Zea Mays
cacctcacttacatcattcccagactactgcttccacctatgtccattatttccgccaagtcgagaacgacatgcagtcgtagtatcatggataaccaccttatgtcgtccttcaccatcctactgctttcttcttttgctgcaacggttgcatatcctgctcgcaatgaattacagcctaaccagatgaaaaaccaccattcttctgtatcatcatacaacccacaaccgaaggatttcccaactgaacaactctaccgcgcctaccttataatccagcgcttcaagaacaccatcattagcgaccccaagaacgtcactgccacctggattggtcatgatctctgcggagaaacgacctatgtggggttctactgcggatcgccggcaggaggagataagaagttgacagtcacaggtgtcattttgaatgggtataatctacatgcaccaacgttggaaggtttcgtcaatcagctccctgatctagctcttttccatgctgcttccaacaattttggtggcgatataccccaactaaccggcctagggtacatgtacgagctcagtgtcgccgttaaagatctgcaattacaggctcggccaaaaagggatatccctccggattctacagtgggtttgggcggcaacactcacggtcacgggcatcttggtaactgtataattgcagattttaacttctcatttaacgtcggaatcggtaagggtcacaaatttccaggttttacggatgccaaggctctccttctcaaccacaacaatttgtccggtccacttccgtcaaacctcggtttctcaaaactgagctaccttgccctcgccaacaacaaactcaccgggccaatcccaccgtcaatcagtaatctggaagactctctcttcgaggtactccttctcaacaaccagctctccggctgcctcccccacgagctcggcatgctcaccaaggcggccgtgattgacgccggcatgaaccagctcaccggcccaatcccgtcatctttctcgtgcctaatcagcgtcgagcagctcaacctggccggaaaccgcctctacggtcaggtacccgacgcgctctgcaagcttgctgggcccgctggccgcctcgccaacctcacgctgtccggcaactacttcacatccgccgggccggcatgcgcggcgctgatcaaagacggagtgctggacgtgaagaacaactgcattccggggctcaccaaccagaggcgcccggccgagtgcgcggcgttccagagccaaccaaagacttgcccggcagcgagcactcaggtgacatgccccgccgccgcagcttccaggaacgcggcggcgccaggggagaggaaggtcaaggattactccagctacgtgacgtacgctactctgcatgactgagccacactggcatgcagtaggagacagagtgccttgctggctatgtgtctcttgtattcagcatgagtgtaccctagcgtgtgttgttgtgattgtgattgctgtctatttgcattattgtacgtgtgttgctgtcacatctagatcatcccattatttgtacgtccaaatccattttatggaaagtattgttggtgttttattgaagttctatccatacttacatgtcgcttaacctgcgtaacttttggatatggtagtaactttggacataataggttacaaaagaataagaatggttccaatgccgatcgctatcgaccgttgacgtatcggccagtgacata

SEQ ID NO: 119382 - DNA, 1346 bp, Zea Mays
ctactgcttccacctatgtccattatttccgccaagtcgagaacgacatgcagtcgtagtatcatggataaccaccttatgtcgtccttcaccatcctactgctttcttcttttgctgcaacggttgcatatcctgctcgcaatgaattacagcctaaccagatgaaaaaccaccattcttctgtatcatcatacaacccacaaccgaaggatttcccaactgaacaactctaccgcgcctaccttataatccagcgcttcaagaacaccatcattagcgaccccaagaacgtcactgccacctggattggtcatgatctctgcggagaaacgacctatgtggggttctactgcggatcgccggcaggaggagataagaagttgacagtcacaggtgtcattttgaatgggtataatctacatgcaccaacgttggaaggtttcgtcaatcagctccctgatctagctcttttccatgctgcttccaacaattttggtggcgatataccccaactaaccggcctagggtacatgtacgagctcagtgtcgccgttaaagatctgcaattacaggctcggccaaaaagggatatccctccggattctacagtgggtttgggcggcaacactcacggtcacgggcatcttggttttacggatgccaaggctctccttctcaaccacaacaatttgtccggtccacttccgtcaaacctcggtttctcaaaactgagctaccttgccctcgccaacaacaaactcaccgggccaatcccaccgtcaatcagtaatctggaagactctctcttcgagctcaccggcccaatcccgtcatctttctcgtgcctaatcagcgtcgagcagctcaacctggccggaaaccgcctctacggtcaggtacccgacgcgctctgcaagcttgctgggcccgctggccgcctcgccaacctcacgctgtccggcaactacttcacatccgccgggccggcatgcgcggcgctgatcaaagacggagtgctggacgtgaagaacaactgcattccggggctcaccaaccagaggcgcccggccgagtgcgcggcgttccagagccaaccaaagacttgcccggcagcgagcactcaggtgacatgccccgccgccgcagcttccaggaacgcggcggcgccaggggagaggaaggtcaaggattactccagctacgtgacgtacgctactctgcatgactgagccacactggcatgcagtaggagacagagtgccttgctggctatgtgtctcttgtattcagcatgagtgtaccctagcgtgtgttgttgtgattgtgattgctgtctatttgcatt

SEQ ID NO: 119383 - DNA, 1552 bp, Zea Mays
ctactgcttccacctatgtccattatttccgccaagtcgagaacgacatgcagtcgtagtatcatggataaccaccttatgtcgtccttcaccatcctactgctttcttcttttgctgcaacggttgcatatcctgctcgcaatgaattacagcctaaccagatgaaaaaccaccattcttctgtatcatcatacaacccacaaccgaaggatttcccaactgaacaactctaccgcgcctaccttataatccagcgcttcaagaacaccatcattagcgaccccaagaacgtcactgccacctggattggtcatgatctctgcggagaaacgacctatgtggggttctactgcggatcgccggcaggaggagataagaagttgacagtcacaggtgtcattttgaatgggtataatctacatgcaccaacgttggaaggtttcgtcaatcagctccctgatctagctcttttccatgctgcttccaacaattttggtggcgatataccccaactaaccggcctagggtacatgtacgagctcagtgtcgccgttaaagatctgcaattacaggctcggccaaaaagggatatccctccggattctacagtgggtttgggcggcaacactcacggtcacgggcatcttggttttacggatgccaaggctctccttctcaaccacaacaatttgtccggtccacttccgtcaaacctcggtttctcaaaactgagctaccttgccctcgccaacaacaaactcaccgggccaatcccaccgtcaatcagtaatctggaagactctctcttcgaggtactccttctcaacaaccagctctccggctgcctcccccacgagctcggcatgctcaccaaggcggccgtgattgacgccggcatgaaccagctcaccggcccaatcccgtcatctttctcgtgcctaatcagcgtcgagcagctcaacctggccggaaaccgcctctacggtcaggtacccgacgcgctctgcaagcttgctgggcccgctggccgcctcgccaacctcacgctgtccggcaactacttcacatccgccgggccggcatgcgcggcgctgatcaaagacggagtgctggacgtgaagaacaactgcattccggggctcaccaaccagaggcgcccggccgagtgcgcggcgttccagagccaaccaaagacttgcccggcagcgagcactcaggtgacatgccccgccgccgcagcttccaggaacgcggcggcgccaggggagaggaaggtcaaggattactccagctacgtgacgtacgctactctgcatgactgagccacactggcatgcagtaggagacagagtgccttgctggctatgtgtctcttgtattcagcatgagtgtaccctagcgtgtgttgttgtgattgtgattgctgtctatttgcattattgtacgtgtgttgctgtcacatctagatcatcccattatttgtacgtccaaatccattttatggaaagtattgttggtgttttattgaagttctatccatacttacatgtc

SEQ ID NO: 119384 - DNA, 1420 bp, Zea Mays
ctactgcttccacctatgtccattatttccgccaagtcgagaacgacatgcagtcgtagtatcatggataaccaccttatgtcgtccttcaccatcctactgctttcttcttttgctgcaacggttgcatatcctgctcgcaatgaattacagcctaaccagatgaaaaaccaccattcttctgtatcatcatacaacccacaaccgaaggatttcccaactgaacaactctaccgcgcctaccttataatccagcgcttcaagaacaccatcattagcgaccccaagaacgtcactgccacctggattggtcatgatctctgcggagaaacgacctatgtggggttctactgcggatcgccggcaggaggagataagaagttgacagtcacagggtacatgtacgagctcagtgtcgccgttaaagatctgcaattacaggctcggccaaaaagggatatccctccggattctacagtgggtttgggcggcaacactcacggtcacgggcatcttggttttacggatgccaaggctctccttctcaaccacaacaatttgtccggtccacttccgtcaaacctcggtttctcaaaactgagctaccttgccctcgccaacaacaaactcaccgggccaatcccaccgtcaatcagtaatctggaagactctctcttcgaggtactccttctcaacaaccagctctccggctgcctcccccacgagctcggcatgctcaccaaggcggccgtgattgacgccggcatgaaccagctcaccggcccaatcccgtcatctttctcgtgcctaatcagcgtcgagcagctcaacctggccggaaaccgcctctacggtcaggtacccgacgcgctctgcaagcttgctgggcccgctggccgcctcgccaacctcacgctgtccggcaactacttcacatccgccgggccggcatgcgcggcgctgatcaaagacggagtgctggacgtgaagaacaactgcattccggggctcaccaaccagaggcgcccggccgagtgcgcggcgttccagagccaaccaaagacttgcccggcagcgagcactcaggtgacatgccccgccgccgcagcttccaggaacgcggcggcgccaggggagaggaaggtcaaggattactccagctacgtgacgtacgctactctgcatgactgagccacactggcatgcagtaggagacagagtgccttgctggctatgtgtctcttgtattcagcatgagtgtaccctagcgtgtgttgttgtgattgtgattgctgtctatttgcattattgtacgtgtgttgctgtcacatctagatcatcccattatttgtacgtccaaatccattttatggaaagtattgttggtgttttattgaagttctatccatacttacatgtc

SEQ ID NO: 119385 - DNA, 1116 bp, Zea Mays
agccgtcgcctctccttgctctgctcctctctctcccaagcggctctccctctatctcctcgtttctctcccctcctcttctacagccgctgccaggcaaccgaccgccgagcagcgcagccacccgagccccacgcccgccgcgccaggaaccagcgcccctgctctcgccaggacgccaggaattgctctttctatagcaagtttatgagttcagtttatattccattgaatatttgttgcagtgaagagaaatgagagaaagccttcggttgtagccttcagtttatattccattgaatatttgttgcatccgactcatctctgtttcgattccatccggtttggctcattttttaatcgagtgtgttgtagttttgtaccctaatgtcgtgggagtgctaccgaagtactgatagcatcactttaatttcattagctccgtcctggcaatcactttgggaaggtggtcagtggaataactttgcttaaaaagcttgaagcagttggtagtgaaactggaaatccttcttatcaagtgaaaattgtagactgtggtgaagtttccaacacaaattctcaggatccgctaaagggagataaagtaagctcaaagacagataacagcagttcagacagtgaaaagggtggccatcgtaccaagcgttccttgacgaaaggtagtaatctaattccattagatttaatgtgtgggttacatatttgctatcgacatatcctagtggactagttacttttgagtggctaatgaaagatctcgaaattacaattcagaagataggtatgtctattaactacattaacatagctcaggtatgaaagacacgtttgccgagtgtgaaacactcggcaaaggtggcgctcggcaaagggccgttagtggtcgtcctaaagctaacgaccgtcagtctttgccgagcaccgaggattggacactcagcaaaggactctttgccgagtgtcttctctagacactcggcaaagtatatttttatttttttgattttgtctcccaaactttttgtggtatgttcctacactatgtagacctacatgtatcatttgtggacaattataacagagttttcaatcgtt

SEQ ID NO: 119386 - DNA, 1108 bp, Zea Mays
agccgtcgcctctccttgctctgctcctctctctcccaagcggctctccctctatctcctcgtttctctcccctcctcttctacagccgctgccaggcaaccgaccgccgagcagcgcagccacccgagccccacgcccgccgcgccaggaaccagcgcccctgctctcgccaggacgccaggaattgctctttctatagcaagtttatgagttcagtttatattccattgaatatttgttgcagtgaagagaaatgagagaaagccttcggttgtagccttcagtttatattccattgaatatttgttgcatccgactcatctctgtttcgattccatccggtttggctcattttttaatcgagtgtgttgtagttttgtaccctaatgtcgtgggagtgctaccgaagtactgatagcatcactttaatttcattagctccgtcctggcaatcactttgggaaggtggtcagtggaataactttgcttaaaaagcttgaagcagttggtagtgaaactggaaatccttcttatcaagtgaaaattgtagactgtggtgaagtttccaacacaaattctcaggatccgctaaagggagataaagtaagctcaaagacagataacagcagttcagacagtgaaaagggtggccatcgtaccaagcgttccttgacgaaaggcttcaatgcagcagttgctgggtgcttctttgccattgaaactgtattaagacctcttaaagcagaaaattcacctccatttacgactgcaatgataatattggcatctgttatatcatctactgtttcaaatgttttacttggagccagaccagcttttatagtgccagcctatgagctaaaatctgctgccggtagctgttctgatcttttcttacagtaacgttagtagctatccttctttttatggagcttcggggcacttcttgtaaaatggttttctaagttcattaagcccagatacgtgattccatttgtttaggttatgagcataatggccgtaactgttttcttttttgttagttaggattgacctttttggtataaattttaagttccctttggaaaactcatttcaatgatgttg

SEQ ID NO: 119387 - DNA, 1455 bp, Zea Mays
agccgtcgcctctccttgctctgctcctctctctcccaagcggctctccctctatctcctcgtttctctcccctcctcttctacagccgctgccaggcaaccgaccgccgagcagcgcagccacccgagccccacgcccgccgcgccaggaaccagcgcccctgctctcgccaggacgccaggaattgctctttctatagcaagtttatgagttcagtttatattccattgaatatttgttgcagtgaagagaaatgagagaaagccttcggttgtagccttcagtttatattccattgaatatttgttgcatccgactcatctctgtttcgattccatccggtttggctcattttttaatcgagtgtgttgtagttttgtaccctaatgtcgtgggagtgctaccgaagtactgatagcatcactttaatttcattagctccgtcctggcaatcactttgggaaggtggtcagtggaataactttgcttaaaaagcttgaagcagttggtagtgaaactggaaatccttcttatcaagtgaaaattgtagactgtggtgaagtttccaacacaaattctcaggatccgctaaagggagataaagtaagctcaaagacagataacagcagttcagacagtgaaaagggtggccatcgtaccaagcgttccttgacgaaaggtgagctctagaatgttgagccttggcgctctcaccacatttgattacttggggattgagtaaccgggaaaggcgtattgcacttgttgctgctggcgctgctgctggcattgcttcaggcttcaatgcagcagttgctgggtgcttctttgccattgaaactgtattaagacctcttaaagcagaaaattcacctccatttacgactgcaatgataatattggcatctgttatatcatctactgtttcaaatgttttacttggagccagaccagcttttatagtgccagcctatgagctaaaatctgctgccggttggaatggctgctacactagcttcagtctgttcagtcccattgacttcagtactgcttctctttgagctgacaaaggattacaggattttgcttcctctcatgtgaacaagggagaatattgtgaactgaaggtcatgtatcagcgaaaagcaggctttcctcttgtagcaattgtgcactgaaaaactacagtgcccttatgacaccacaatagtaagcaagactacaggacatctatgcgaaatgcagctagccagctacactgatgtagagatcattcaggcagtttaacctctatactgtatcattttaatttaaccagctatttcactactgccttttatagtgtttaggttataaccaatgacatctattagagtttataatttaaactcattgattgaaaaacatttagttgtgatgtcactaaaaggtgaaataaatttcttatagtgtgc

SEQ ID NO: 119388 - DNA, 1336 bp, Zea Mays
agccgtcgcctctccttgctctgctcctctctctcccaagcggctctccctctatctcctcgtttctctcccctcctcttctacagccgctgccaggcaaccgaccgccgagcagcgcagccacccgagccccacgcccgccgcgccaggaaccagcgcccctgctctcgccaggacgccaggaattgctctttctatagcaagtttatgagttcagtttatattccattgaatatttgttgcagtgaagagaaatgagagaaagccttcggttgtagccttcagtttatattccattgaatatttgttgcatccgactcatctctgtttcgattccatccggtttggctcattttttaatcgagtgtgttgtagttttgtaccctaatgtcgtgggagtgctaccgaagtactgatagcatcactttaatttcattagctccgtcctggcaatcactttgggaaggtggtcagtggaataactttgcttaaaaagcttgaagcagttggtagtgaaactggaaatccttcttatcaagtgaaaattgtagactgtggtgaagtttccaacacaaattctcaggatccgctaaagggagataaagtaagctcaaagacagataacagcagttcagacagtgaaaagggtggccatcgtaccaagcgttccttgacgaaaggcttcaatgcagcagttgctgggtgcttctttgccattgaaactgtattaagacctcttaaagcagaaaattcacctccatttacgactgcaatgataatattggcatctgttatatcatctactgtttcaaatgttttacttggagccagaccagcttttatagtgccagcctatgagctaaaatctgctgccggttggaatggctgctacactagcttcagtctgttcagtcccattgacttcagtactgcttctctttgagctgacaaaggattacaggattttgcttcctctcatgtgaacaagggagaatattgtgaactgaaggtcatgtatcagcgaaaagcaggctttcctcttgtagcaattgtgcactgaaaaactacagtgcccttatgacaccacaatagtaagcaagactacaggacatctatgcgaaatgcagctagccagctacactgatgtagagatcattcaggcagtttaacctctatactgtatcattttaatttaaccagctatttcactactgccttttatagtgtttaggttataaccaatgacatctattagagtttataatttaaactcattgattgaaaaacatttagttgtgatgtcactaaaaggtgaaataaatttcttatagtgtgc

SEQ ID NO: 119389 - DNA, 1959 bp, Zea Mays
agccgtcgcctctccttgctctgctcctctctctcccaagcggctctccctctatctcctcgtttctctcccctcctcttctacagccgctgccaggcaaccgaccgccgagcagcgcagccacccgagccccacgcccgccgcgccaggaaccagcgcccctgctctcgccaggacgccaggaattgctctttctatagcaagtttatgagttcagtttatattccattgaatatttgttgcagtgaagagaaatgagagaaagccttcggttgtagccttcagtttatattccattgaatatttgttgcatccgactcatctctgtttcgattccatccggtttggctcattttttaatcgagtgtgttgtagttttgtaccctaatgtcgtgggagtgctaccgaagtactgatagcatcactttaatttcattagctccgtcctggcaatcactttgggaaggtggtcagtggaataactttgcttaaaaagcttgaagcagttggtagtgaaactggaaatccttcttatcaagtgaaaattgtagactgtggtgaagtttccaacacaaattctcaggatccgctaaagggagataaagtaagctcaaagacagataacagcagttcagacagtgaaaagggtggccatcgtaccaagcgttccttgacgaaaggcttcaatgcagcagttgctgggtgcttctttgccattgaaactgtattaagacctcttaaagcagaaaattcacctccatttacgactgcaatgataatattggcatctgttatatcatctactgtttcaaatgttttacttggagccagaccagcttttatagtgccagcctatgagctaaaatctgctgccggttggaatggctgctacactagcttcagtctgttcagtcccattgacttcagtactgcttctctttgagctgacaaaggattacaggattttgcttcctctcatgtgaacaagggagaatattgtgaactgaaggtcatgtatcagcgaaaagcaggctttcctcttgtagcaattgtgcactgaaaaactacagtgcccttatgacaccacaatagtcgctcgaatgcaactgtccggcctagcatccaatcgacctcaaccactctgcatcccacgtgtgtgtggagctgatgaacatgtcgatgtgcaaattcctccagctcgagtacttggagattacatagtcttctccattgtttttctagactttgaggttctaagcatgagcaagctgggttatgatggtgttgtggcactgctggttgctgatatatcactttcaatcggtcttgaccagattgaagctctgtatcagtatgcccaatttcagtttgagtgtggtaactactcaggggctgctgattacctttaccagtatggtgctttgtgcacaaacagtgagcgaaatgtgagtgccctctggggaaagctagcagcagaaatcctaatgcagaactgggacctagctttggaggaactcaaccgcttgaaggaaataattgattcaaaggtacttgaatgctatacagacaaatgcacaccatcttattaggtatctagctactgcagttgttgtcaacaaaaaggagaaggaatatgcttaaagagttgattaaggtcattcaacaggagcaccatagctacaaggatcccgtaactgaatttttggaatgcttatatgttaactatgtagttgtgggcttttgaacaatagctggagtgatatgaaacattagtgatgtagttgtgggcttttgaactgcttcaagcaggagtgatgccgttgtggtgcttttgtgactgatcatctctggagcttttgtgaatgatctagctagctatctataaatgatctagttgtgaatgatattataattgtgatgcttttgtgaatatataattgtggtgcttttgtgtttatg

SEQ ID NO: 119390 - DNA, 2128 bp, Zea Mays
agccgtcgcctctccttgctctgctcctctctctcccaagcggctctccctctatctcctcgtttctctcccctcctcttctacagccgctgccaggcaaccgaccgccgagcagcgcagccacccgagccccacgcccgccgcgccaggaaccagcgcccctgctctcgccaggacgccaggaattgctctttctatagcaagtttatgagttcagtttatattccattgaatatttgttgcagtgaagagaaatgagagaaagccttcggttgtagccttcagtttatattccattgaatatttgttgcatccgactcatctctgtttcgattccatccggtttggctcattttttaatcgagtgtgttgtagttttgtaccctaatgtcgtgggagtgctaccgaagtactgatagcatcactttaatttcattagctccgtcctggcaatcactttgggaaggtggtcagtggaataactttgcttaaaaagcttgaagcagttggtagtgaaactggaaatccttcttatcaagtgaaaattgtagactgtggtgaagtttccaacacaaattctcaggatccgctaaagggagataaagtaagctcaaagacagataacagcagttcagacagtgaaaagggtggccatcgtaccaagcgttccttgacgaaaggcttcaatgcagcagttgctgggtgcttctttgccattgaaactgtattaagacctcttaaagcagaaaattcacctccatttacgactgcaatgataatattggcatctgttatatcatctactgtttcaaatgttttacttggagccagaccagcttttatagtgccagcctatgagctaaaatctgctgccggttggaatggctgctacactagcttcagtctgttcagtcccattgacttcagtactgcttctctttgagctgacaaaggattacaggattttgcttcctctcatgtgaacaagggagaatattgtgaactgaaggtcatgtatcagcgaaaagcaggctttcctcttgtagcaattgtgcactgaaaaactacagtgcccttatgacaccacaatagtcgctcgaatgcaactgtccggcctagcatccaatcgacctcaaccactctgcatcccacgtgtgtgtggagctgatgaacatgtcgatgtgcaaattcctccagctcgagtacttggagattacatagtcttctccattgtttttctagactttgaggttctaagcatgagcaagctgggttatgatggtgttgtggcactgctggttgctgatatatcactttcaatcggtcttgaccagattgaagctctgtatcagtatgcccaatttcagtttgagtgtggtaactactcaggggctgctgattacctttaccagtatggtgctttgtgcacaaacagtgagcgaaatgtgagtgccctctggggaaagctagcagcagaaatcctaatgcagaactgggacctagctttggaggaactcaaccgcttgaaggaaataattgattcaaaggttctaacttcaatgttttgttctgtgttctttgttctttgtgtacactatatcaccaatcatgttccttcctgatctttgggtagaacttctcatcacctctgaatcagctccagaataggatatggctgatgcattgggctctgttcatcttctttaaccatatcaggtacttgaatgctatacagacaaatgcacaccatcttattaggtatctagctactgcagttgttgtcaacaaaaaggagaaggaatatgcttaaagagttgattaaggtcattcaacaggagcaccatagctacaaggatcccgtaactgaatttttggaatgcttatatgttaactatgtagttgtgggcttttgaacaatagctggagtgatatgaaacattagtgatgtagttgtgggcttttgaactgcttcaagcaggagtgatgccgttgtggtgcttttgtgactgatcatctctggagcttttgtgaatgatctagctagctatctataaatgatctagttgtgaatgatattataattgtgatgcttttgtgaatatataattgtggtgcttttgtgtttatg

SEQ ID NO: 119391 - DNA, 2042 bp, Zea Mays
agccgtcgcctctccttgctctgctcctctctctcccaagcggctctccctctatctcctcgtttctctcccctcctcttctacagccgctgccaggcaaccgaccgccgagcagcgcagccacccgagccccacgcccgccgcgccaggaaccagcgcccctgctctcgccaggacgccaggaattgctctttctatagcaagtttatgagttcagtttatattccattgaatatttgttgcagtgaagagaaatgagagaaagccttcggttgtagccttcagtttatattccattgaatatttgttgcatccgactcatctctgtttcgattccatccggtttggctcattttttaatcgagtgtgttgtagttttgtaccctaatgtcgtgggagtgctaccgaagtactgatagcatcactttaatttcattagctccgtcctggcaatcactttgggaaggtggtcagtggaataactttgcttaaaaagcttgaagcagttggtagtgaaactggaaatccttcttatcaagtgaaaattgtagactgtggtgaagtttccaacacaaattctcaggatccgctaaagggagataaagtaagctcaaagacagataacagcagttcagacagtgaaaagggtggccatcgtaccaagcgttccttgacgaaaggcttcaatgcagcagttgctgggtgcttctttgccattgaaactgtattaagacctcttaaagcagaaaattcacctccatttacgactgcaatgataatattggcatctgttatatcatctactgtttcaaatgttttacttggagccagaccagcttttatagtgccagcctatgagctaaaatctgctgccggttggaatggctgctacactagcttcagtctgttcagtcccattgacttcagtactgcttctctttgagctgacaaaggattacaggattttgcttcctctcatgtgaacaagggagaatattgtgaactgaaggtcatgtatcagcgaaaagcaggctttcctcttgtagcaattgtgcactgaaaaactacagtgcccttatgacaccacaatagtcgctcgaatgcaactgtccggcctagcatccaatcgacctcaaccactctgcatcccacgtgtgtgtggagctgatgaacatgtcgatgtgcaaattcctccagctcgagtacttggagattacatagtcttctccattgtttttctagactttgaggttctaagcatgagcaagctgggttatgatggtgttgtggcactgctggttgctgatatatcactttcaatcggtcttgaccagattgaagctctgtatcagtatgcccaatttcagtttgagtgtggtaactactcaggggctgctgattacctttaccagtatggtgctttgtgcacaaacagtgagcgaaatgtgagtgccctctggggaaagctagcagcagaaatcctaatgcagaactgggacctagctttggaggaactcaaccgcttgaaggaaataattgattcaaagaacttctcatcacctctgaatcagctccagaataggatatggctgatgcattgggctctgttcatcttctttaaccatatcaggtacttgaatgctatacagacaaatgcacaccatcttattaggtatctagctactgcagttgttgtcaacaaaaaggagaaggaatatgcttaaagagttgattaaggtcattcaacaggagcaccatagctacaaggatcccgtaactgaatttttggaatgcttatatgttaactatgtagttgtgggcttttgaacaatagctggagtgatatgaaacattagtgatgtagttgtgggcttttgaactgcttcaagcaggagtgatgccgttgtggtgcttttgtgactgatcatctctggagcttttgtgaatgatctagctagctatctataaatgatctagttgtgaatgatattataattgtgatgcttttgtgaatatataattgtggtgcttttgtgtttatg

SEQ ID NO: 119392 - DNA, 1900 bp, Zea Mays
ctctccttgctctgctcctctctctcccaagcggctctccctctatctcctcgtttctctcccctcctcttctacagccgctgccaggcaaccgaccgccgagcagcgcagccacccgagccccacgcccgccgcgccaggaaccagcgcccctgctctcgccaggacgccaggaattgctctttctatagcaagtttatgagttcagtttatattccattgaatatttgttgcagtgaagagaaatgagagaaagccttcggttgtagccttcagtttatattccattgaatatttgttgcatccgactcatctctgtttcgattccatccggtttggctcattttttaatcgagtgtgttgtagttttgtaccctaatgtcgtgggagtgctaccgaagtactgatagcatcactttaatttcattagctccgtcctggcaatcactttgggaaggtggtcagtggaataactttgcttaaaaagcttgaagcagttggtagtgaaactggaaatccttcttatcaagtgaaaattgtagactgtggtgaagtttccaacacaaattctcaggatccgctaaagggagataaagtaagctcaaagacagataacagcagttcagacagtgaaaagggtggccatcgtaccaagcgttccttgacgaaaggtgagctctagaatgttgagccttggcgctctcaccacatttgattacttggggattgagtaaccgggaaaggcgtattgcacttgttgctgctggcgctgctgctggcattgcttcaggcttcaatgcagcagttgctgggtgcttctttgccattgaaactgtattaagacctcttaaagcagaaaattcacctccatttacgactgcaatgataatattggcatctgttatatcatctactgtttcaaatgttttacttggagccagaccagcttttatagtgccagcctatgagctaaaatctgctgccggttggaatggctgctacactagcttcagtctgttcagtcccattgacttcagtactgcttctctttgagctgacaaaggattacaggattttgcttcctctcatgtgaacaagggagaatattgtgaactgaaggtcatgtatcagcgaaaagcaggctttcctcttgtagcaattgtgcactgaaaaactacagtgcccttatgacaccacaatagtcgctcgaatgcaactgtccggcctagcatccaatcgacctcaaccactctgcatcccacgtgtgtgtggagctgatgaacatgtcgatgtgcaaattcctccagctcgagtacttggagattacatagtcttctccattgtttttctagactttgaggttctaagcatgagcaagctgggttatgatggtgttgtggcactgctggttgctgatatatcactttcaatcggtcttgaccagattgaagctctgtatcagtatgcccaatttcagtttgagtgtggtaactactcaggggctgctgattacctttaccagtatggtgctttgtgcacaaacagtgagcgaaatgtgagtgccctctggggaaagctagcagcagaaatcctaatgcagaactgggacctagctttggaggaactcaaccgcttgaaggaaataattgattcaaaggtacttgaatgctatacagacaaatgcacaccatcttattaggtatctagctactgcagttgttgtcaacaaaaaggagaaggaatatgcttaaagagttgattaaggtcattcaacaggagcaccatagctacaaggatcccgtaactgaatttttggaatgcttatatgttaactatgtagttgtgggcttttgaacaatagctggagtgatatgaaacattagtgatgtagttgtgggct

SEQ ID NO: 119393 - DNA, 1468 bp, Zea Mays
aaggccgggcggccggccggcctctataaagcacactgcacgcgctcaccacctcctggtacttggcaatcctctccacctagctcagcatccgacgacgggacttgcacgatggatgctgctcttatgcctctgctcgtcgtctccctcgtcctctgcctgctggcggctgccccagcggcgtccgcggcgcgggccttcttcgtcttcggcgactccctcgtcgacaacggcaacaacaactacctgctgaccacggcgcgcgccgacgcgcccccctacggcatcgacttccccacgcaccaagccacgggccgcttctccaacgggctcaacatccccgacatcatcagcgagcacctcggggccgaacctgcgctgccgtacctgagccccgagctccgaggggagaagctgctcgtcggcgccaacttcgcgtcggccggcgtcgggatcctcaacgacacaggaatacaatttgtgaacatcatcaggatcggcgaccagctgcagtacttccgggagtaccagcggaagctgcgagccctcgtcggcgagccgcaggcgacgcagctcgtgaaccaggccctcgtgctcatcacgctcggcggcaacgacttcgtgaacaactactacctggtgcccatgtccgtgcggtcgcgccagtacgcactcccggactacgtccgcttcatcgtctccgagtacaggaagatcctctcgaggctgtacgagctgggcgcgcggcgcgtgatcgtgacggggacggggccgctggggtgcgtcccggccgagctggcgctgcacagccagaacggcgagtgcgcggcggagctgacgcgcgccgtgaacctcttcaacccgcagatggtggacatggtgcgcggcctcaaccgcgccatcggcgccgacgtcttcgtcaccgccaacacctaccgcatgaacttcgactacctcgcaaacccgcaggacttcgggttcacgaacgtgcaggtggcgtgctgcggccagggcccgtacaacgggatcgggctgtgcacggcggcgtcgaacgtgtgcgacaaccgcgacgtgttcgcgttctgggacgcgttccaccccacggagagggcaaaccgcatcatcgtcgcccagttcatgcacggcgacacggactacatgcaccccatgaacctcagcaccatcctcgccatggaccaggagggcctctagactatagcttgatcagccggacacgattatacgtacatgcgtgatgtgtctcacgtgcctagcacgttagccatgtgttggatgatggcagcccaatttgccaataatattcgtgcctcgatccaagtttcactaatgtgtcactcacgccttaaaaagaattagtgactggctatggttaatcgatccgtgttatatgtgctccgcgagcattcgtttgttggtgttgttgtggccatttgcagccgtggcgtca

SEQ ID NO: 119394 - DNA, 3667 bp, Zea Mays
atgggttctctcgccgatccgtacgcgctacgctgcgtctccgacctgcctccgccattccgctctatgttcaggttcagatacttcaattccttgcagagtgagtgcttccatgtatgtttcttctcggatgtgaacatggttatctcggcacctacggggagtgggaagaccgtactatttgaactctgcattctgaggctcctctcaaggttcctttcaccagattggaggttcaatttaaataaaggaactctgaaaacaatctacattgcaccgtcgaaggcgctggtacaggaaaagctgcgggactggaacatgaagctgggcccattagggatcaattgcttggagatgactggtgacggtgaattttgcaacactaaagccatccatgatgctgatttaatactcaccactcctgagaagttcgattctatgagtcgacatggtataaaaagtggtagattgggtttcttctgtgacattgctcttgtccttattgatgaagttcaccttctaaatgatccacgtggagctgcgttagaagcagttatttggagaagaaatgaggccagtgaagttgacaaccaaggttatgctccagctaaaaatgactttctttttgagaggaaatataaatggaatatggattacagatatactgatgcaacattcaagggggaagtctgcacttattttctgttctacgagaaaaggtgcacaagaagcagcgcagtgcctttcacaaactggagcatcgcttggctattcgaatccatttatgaaatcaatgcagcagtatgaacatctaaaggcggcttccctaacctgtagtgacaagcaactgcaagcttgcatcatacatggagttggttttcataatggtggtctttgcttaaaagaccgaggtcttgttgaggggcttttcctcaagggtgatcttcaagttctatgcacaacaaatactttggcacatggcgtcaacttgcctgcacatacagttgtgataaagtcaacacagttcttcaacaaagagaagggcctatatgttgaatatgagagatccatggtgcttcagatgtgtgggagggctggacgtccaccattcgatgatactggaacaattataatcatgacaagaaaagaaacggttcatctatatgagaaccttctaaatggatgtgaaatggtggagtctcagttgctgtcatgtgcggtggagcatctaaatgcagaaatcgttcagttgacagtatctgacatcattctggcggttgagtggatcaagtgctcgtatttgtacatcagaataaggaagaatcctgagaactatggagttaagagggggactcctcaagatctccttgaaaagcaaattcaagatatatgtgtcgataagattcatgagttggtggagtatggactgatttggacagatgaaggagctttcgttttacaaccgctagaacctgggaggctgatggcaaaattctacctgaagtttgatacaatgaagcttatagtcaaagcttctggctattgcaggatccaactacgccgaaatgataagaagattctaaatgacataaacgctgacaaagatggtagacttctatttcatattgtcatgaagaatggaaaaaggaagaagcgtgttcagacaagagaagagaaaatattcttgctagcaaatgattgcttaactggagactctctaatccatgatttatccctcaaccaggaaacaaatgcaatatgctcaaatggatgtaggattgccaaatgcatgcgagaatattttatatacaaaaagaattacagatctgccattaattctatgatccttgcaaatagtctgcatcaaaagctttgggagagcagtccatttctgctgaaacaactgcctgggattggaattgtaacagcaaaggctctgaagactgctggagtttatagctttgagaccttggcaactgctgatgcaagaaagatagaattggccacagggcgcaattatccatttgggaatcatatcaaagaatcaatgtcatcattaccacccaaaattgacatacacatagaggaaactggaaacagacttgggaaatcgaccattactgtaacactaactcgtctatcacaggcagttaaatccagtaaacgcaactgtgctgacatggttgtggcctcagaggaagacaatgtgatcctctttcatgagaatataagcccatattctgtaaaagtttttgtgccatgcccccaaaatgcacgggtgactctgaaggttgatctaatatttgaagaatatgttggtcttgatgtccacaagaagcatgtagtaagcagggaagatggtttgtacgtgaccaaggagcatgggatagataaccttgaacctacgtacaatatcccttcagagatttgtttggttagctccaggacaactcgaacaagccgatctcaatctcacactgaacagaaccctctttccaaagaggtttatgtcatagaagatgatggcgctgctgtgagtgctgtcagtgctctcgagaaagctgatgatgcagtgggaaccataaaatttaacaacttggcttcactggaggtcccaagctttgatctactgcctgaagaagagtatggagctcctggaccagcagaggcagaatgcaaaggtgccacagacagcacgatttttgatcacatacgcaaaaagtccaaagacttccccactctgatgctatcaaaatccatggattgctcatatgaacctcttatactgaagaagatgaagatatcaagggaccagtttggagtaaagcatggttgtctgcatgcgggtgaggccaccacaatggattttgatcctgttgagcctagggtctctccaaccaatactgctgagaagttccgcgggatcctgggtagaagttcagaaaggagtcgcatgctgtttggaaaaatggatagcccgtttgagaagagcgagatgctgggcacgacgccagctgaaagttctcttcggttcgcgggtggaaaagacagctcactggagaagaacaagaccctgatcagaactccagctgaaaactctctccaaattgcagcacgtggaaaggagagcaaggtgagcaaggtgctgacaaatctagataaaagccctcttgggtttgcgggtggaaaggagagcaagatgagcaatgtaccgagcacttcagctgaaaactctctccagtttgcagctaggcgtgtcagatcatctgagaagagcaagatgctgacaactccatatgaaagctctcaagcgtttttgggcgaaaaggacagcccatcggagaaaagcaaaatccttattaatagtccagttgagtatcctttcaagaaaggaagtccaggtgaaaatcctttcaaaacatgtagtccagttgaaaactccctcaaatttgcagctcaacgtgacagcccatctgagaagaggaaatcctgcatcagcaatccccttccgcccttccagcaggctgttcaatgcacaaagcaagtaggagttgcaggtcaaccctttgatattaaggaatattgcaaggaaatattgaggagcagaaatgacagtcaaggaggcgatccttttgctggttacaagagtatcttttcttttctatga

SEQ ID NO: 119395 - DNA, 2113 bp, Zea Mays
aaaccctaacaacgcatttcgctccccacagcggctcggccacaacccacagccagaaggtctcgagctggatctctaccgttccagcagacagcagtgcgcgctctctctctccctcgtggcgacgactgggcgaccgctgccgctgccgctgccgctgccgctgcccttgtgccccggtctccgtcggtccgttcgccaggtctcctgcgggctcttcgtcgtcgacaagctccgcctggttgctgtgtgaagtccaaggttgtcacatggattcagcacaagatttccaacccaggacattctctataaagttgtggccaccaagtgaaagcacacggatcatgcttgttgacaggatgacaaacaatctgtccacagagtccattttctctcgcaaatatcgccttttgggaaagcaagaggctcatgagaatgcaaaaacgattgaagaactttgctttgccttggctgatgagcatttcagagaggagccagatggtgatgggagttctgctgtccagctatatgcaaaggaaacgagcaagatgatgttggaagttctgaaaaaaggcccaaggactactgcagaactggaggcacctgtagctgacacacctcttgtgtctgctgatactgtactagatatatctggtggcaagcgtgcttttattgaggcagatgaagcaaaggaactgctgagtccacttaccaaaccaggaaattcatataaaagaatttgctttagcaacaggagctttggtattggtgctgctaatgttgctgggccaattcttgagtcagttaagaatcagctcacagaggttgatatctcagattttgtggcaggaaggtctgaggatgaagcccttgatgtgatgcgcatattctccaaagcattagatggttctgtcctgagatatctgaacatctctgacaatgctttgggcgagaagggtgtcagggcattcagtgagctcctgaaatcgcaagaatccctggaagaactttatgtgatgaatgatggcatatcagaggaagctgcaaaagctctatctgagcttattcctgcaactgagaagcttaaggttcttcacttccacaacaatatgactggagatgaaggtgctatgtatattgctgaaatggttaagcgttctccaaatgtagagagtttcaggtgctcagcaacaaggataggatctgatggtggagtcgcattgtctgaggcattggggacatgcactcgtctgaagaaacttgatcttagggacaacttgtttggtgttgatgcagggttagctctcagcgaaacccttccaaaactacctgatcttgttgagctttatctcagtgatctcaatcttgagaacaagggtactatagcaattgcaaaagccctcaaacagtcagcactgcagttggaggtccttgaaattgctggaaatgaaataaatgccaaagcagccccagatttggctgaatgtctagcagtaatgcagtcactcaagaagctgaccttggctgaaaatgaactgaaggacaatggtgctgtgataattgcaaaatcattggaagatggccactcagatctcaaggaacttgatgtgagcacgaacatgctgcagagggttggagctcggtgctttacgcgggcagtcgcaaataaaccagattttgtgcagctgaacatcaatggaaattttatctctgatgaaggggttgatgaggtgaaggaaattctgaaggctggtaagaaatctctggatgtgctgggcccactagacgagaatgaacctgatggagagcctgatgatgaggatgctgaggacgatgaggacgagctggatttgaagctgcagagtgtgaaggttgagcaggatgaggatgattgacgatccttaggttaaatatctttagctactcagtaatcatttggatgtccatgagctacgcaaacttttaattaaaaagaatgtactgaggcttttgcattgtcctgagccttttgcaagggtcatacttacattgtctgtagccttttgggtccccggtaaagaggatgttttgacctctcgttgatagataaacccccttgtttaattgataaata

SEQ ID NO: 119396 - DNA, 1332 bp, Zea Mays
ctggtttctcctcctttcccgtcgccagacttgatttcgtgtagctgcgctgctcgtttcttccgattgattttgttttgatatatatattttgatacttttccgtcgacacttcagttggcttcgtcatctggtcgctgggattttcggtctccgatcggttggttcccagtagactcgttcccttgaagcaacatcacctgttgtatcctgagttcgctctcaacttgtgccctcggatttttccggcgccgtagggcacgcggcgactcttacatacattatcaatcgaaaaccgagtcaaaccatcggcatctttgattttttttcaaaaaaggaagcatattttgtggttcgtgctggcaacggtgatgagtcctacagacctgtaatgactcctgcggagatgatcgcatggtctataagaacatctaagggactgagttgtctttgaattcctagtttgcacttttttgtagtcagcgaatgattacgaatccctcttgttttgtctgtctggcttctcttgatttcggtgtgcctgcgagccttgatggtttgtcggcagtgtcaagaatgtgaagcaaaaacaagcggtgttcctctcgctatccggcgcggaattctctgatgcgattggacgtcgaggaactacacttaactactcttttatttatattttttcttcgtgtttttatgtattgtcagaattttgtttcattagtaaaacagaattgcattttcttaattgaacagagcaaacactgaacaccgaactgaatggaggaaatagcattcatacctgataaaaaccagactcttgattgtttctttaggacaaatgctgccgcccatggagcaaacctgatttgtactgtctaagtagacctaagtattttaagtgtatactgagactaaccaggtaacaaaaactaaccaggataaataaaagtaattaaggataagtataataattgttttcaaataattttacaacctaatgtagtaaacattttaggcaaatggtgattaaattaattatttcaaaccgcatgagtttgatgttgatgctcacctttctcaaaggaacttggacctttgctcaaaggaacttaggtggtggtcaggttgagtttctgacgttcaaccttatgttcaaccttcttagcgaaaatctcctacagctctttagtaccttctactgttagttcctcatttaatgcaatattctactggcaatatcttctggaatcctatatgattcttatgtgcgatatgagggtagatagtacacggtgcaggaaatgcatgattgtttaccctcacttaatt

SEQ ID NO: 119397 - DNA, 2332 bp, Zea Mays
gctggctctgcattctcccctccggccctcccctcgtcttctcttctcttctccccgcggagcgagcgagagaagcaaggccgctccgtgcccccaaccccgctcactgagcaaagcggaaaaagcgaggaaaatatcctgctccagcgaagcaccgcaggccgcagccgcagccgcagcagagaagagcagacgccatcgcccgcagccgccgcccccggagaatggtgcgggccggaccgcgacgggcgaaggagggcgccgcggcccccggcggcccccgccgccgctgatagtagtctacctgctgctaaccagccatctgaaggcacagtggtcgcacgcgaggggcccggattgattgggtgataggcggcgggcgcagatccaccgaccccctcgtcgtgcgcctgtgtctctggttccggtccgtgtccccttggccgcttggtggaggccggaggcgtggtcggtgcgtttggagtttgggtatggcgggtggcggcgagggggatcgcgtgggtgtcgggggagcccagcagttcgtggaccggagcaaggtgaggattcttctctgcgacggcgacgccaccagctcccgggaggtgctgcggctcctctgcaactgctcataccatgtgacctgcgccaagtctccgcggcaggtgatcaatatcctcaactacgagggcggcgagatcgacatcatcctggctgaggtcgatcttccggtctccaagtgcttcaagatgctcaagtacattgcccggaacaaggacctgcgtcacatccccatcataatgatgtccaacagagacgaggtgtctgttgttgtcaagtgcttgcggcttggcgccgccgagtacctggtgaagccgctgcgcacgaatgagttgctgaacctttggacccatgtgtggcggcggagacggatgcttggtttgcccgagaaaaacttcttcaatgacaacttcgagttggtgctctcagaacctagcgatgccaataccaatagcaccaccctcctctcagacgagaccgacgataggcctaaaggaaacacgaatcaagaaacaggcacctcaaagcaacttgaatacgagtctaatccttcggttgctgagcccgaccagagagaaaagatggagggtgttccaggctctgccctagatgccagtaaaaaatcctctccaagaagagcgttttcacgccctataaaaactaacctgagggttgccgagtcgtctgcatttctagcatatgtcaagccaagcaccccagccaccagctcatttgacagcgaattacaaaggggtggcagccgattagattccttggataaccagggtaattgctctagcgcaaccgatagaagtgacactggtactgatgtaaatattcggagtaaagaagcttttgagatgcctgcgcagtaccctatggtatggttttcttcctctaacatgcatatggagcgaagcagcgaaggccataatgatacttcaggaactccacctgcataccatttcccattttattacccagggatggtagagcacaacatggcactttcgtcggcgcaagattttcaagcaaacataaacaatgctcaagcacatacaccgccagcgatgcttcctcagtacaatgtttatcctcagtgccatggtttacctgtgataccatcatttcagtttaatccttctggcatgagtacgcactcaagtcatttaccaacgcaaaatgtgtggtcatcggcatcgagcacaccaccagtgcctgaggaaacatgcagtcgctctgaaaggagggctgcagcacttgccaagttcaggctgaagaggaaagagcgctgctttgacaagaaggtgaggtatgtgaaccggaagaaactcgctgaaacgaggccaagggtgcgaggtcagtttgttagacagccaaccaatacggatgtcatcagcattggagatgatatatctgaagacgaagatgacgatccatcgtccagggaggtagatatggtttcttctccagagtagtagtggagaggtcctccatgtgaaaaaatagactgcagatggttactgctcatcttgttacaactcagtagacctaggcaatacaccctttttgctcacacacagtattacatttttgtccctaaaacatgtggctgttaccctggttgctttaatgaagaaatcatctttgataaagtgtagctgaagttttgctagttattgttgcacagaccagtctaatcaatatgatcttatggcaggataatcttttgagaaaaacagggctattattgtacattcctcctattatt

SEQ ID NO: 119398 - DNA, 1444 bp, Zea Mays
atgtaccgccgtgaattattctttaaatcgagtgctggtgttggcagcttggtttgcccgagaaaaacttcttcaatgacaacttcgagttggtgctctcagaacctagcgatgccaataccaatagcaccaccctcctctcagacgagaccgacgataggcctaaaggaaacacgaatcaagaaacaggcacctcaaagcaacttgaatacgagtctaatccttcggttgctgagcccgaccagagagaaaagatggagggtgttccaggctctgccctagatgccagtaaaaaatcctctccaagaagagcgttttcacgccctataaaaactaacctgagggttgccgagtcgtctgcatttctagcatatgtcaagccaagcaccccagccaccagctcatttgacagcgaattacaaaggggtggcagccgattagattccttggataaccagggtaattgctctagcgcaaccgatagaagtgacactggtactgatgtaaatattcggagtaaagaagcttttgagatgcctgcgcagtaccctatggtatggttttcttcctctaacatgcatatggagcgaagcagcgaaggccataatgatacttcaggaactccacctgcataccatttcccattttattacccagggatggtagagcacaacatggcactttcgtcggcgcaagattttcaagcaaacataaacaatgctcaagcacatacaccgccagcgatgcttcctcagtacaatgtttatcctcagtgccatggtttacctgtgataccatcatttcagtttaatccttctggcatgagtacgcactcaagtcatttaccaacgcaaaatgtgtggtcatcggcatcgagcacaccaccagtgcctgaggaaacatgcagtcgctctgaaaggagggctgcagcacttgccaagttcaggctgaagaggaaagagcgctgctttgacaagaaggtgaggtatgtgaaccggaagaaactcgctgaaacgaggccaagggtgcgaggtcagtttgttagacagccaaccaatacggatgtcatcagcattggagatgatatatctgaagacgaagatgacgatccatcgtccagggaggtagatatggtttcttctccagagtagtagtggagaggtcctccatgtgaaaaaatagactgcagatggttactgctcatcttgttacaactcagtagacctaggcaatacaccctttttgctcacacacagtattacatttttgtccctaaaacatgtggctgttaccctggttgctttaatgaagaaatcatctttgataaagtgtagctgaagttttgctagttattgttgcacagaccagtctaatcaatatgatcttatggcaggataatcttttgagaaaaacagggctattattgtacattcctcctattatt

SEQ ID NO: 119399 - DNA, 1612 bp, Zea Mays
accgccgtgaattattctttaaatcgagtgctggtgttggcagcttggtttgcccgagaaaaacttcttcaatgacaacttcgagttggtgctctcagaacctagcgatgccaataccaatagcaccaccctcctctcagacgagaccgacgataggcctaaaggaaacacgaatcaagaaacaggcacctcaaagcaacttgaatacgaggtaatgaaccaagcacccatttggaagattgttgcagtccaggttttttttatgtttccagttctgttctttgacgttgccacaaagatctgcccttttggctctatgttgtatgttgatgacatgctaacagtatacttgtttaaatgcccttccacttggcgtgtttcagtctaatccttcggttgctgagcccgaccagagagaaaagatggagggtgttccaggctctgccctagatgccagtaaaaaatcctctccaagaagagcgttttcacgccctataaaaactaacctgagggttgccgagtcgtctgcatttctagcatatgtcaagccaagcaccccagccaccagctcatttgacagcgaattacaaaggggtggcagccgattagattccttggataaccagggtaattgctctagcgcaaccgatagaagtgacactggtactgatgtaaatattcggagtaaagaagcttttgagatgcctgcgcagtaccctatggtatggttttcttcctctaacatgcatatggagcgaagcagcgaaggccataatgatacttcaggaactccacctgcataccatttcccattttattacccagggatggtagagcacaacatggcactttcgtcggcgcaagattttcaagcaaacataaacaatgctcaagcacatacaccgccagcgatgcttcctcagtacaatgtttatcctcagtgccatggtttacctgtgataccatcatttcagtttaatccttctggcatgagtacgcactcaagtcatttaccaacgcaaaatgtgtggtcatcggcatcgagcacaccaccagtgcctgaggaaacatgcagtcgctctgaaaggagggctgcagcacttgccaagttcaggctgaagaggaaagagcgctgctttgacaagaaggtgaggtatgtgaaccggaagaaactcgctgaaacgaggccaagggtgcgaggtcagtttgttagacagccaaccaatacggatgtcatcagcattggagatgatatatctgaagacgaagatgacgatccatcgtccagggaggtagatatggtttcttctccagagtagtagtggagaggtcctccatgtgaaaaaatagactgcagatggttactgctcatcttgttacaactcagtagacctaggcaatacaccctttttgctcacacacagtattacatttttgtccctaaaacatgtggctgttaccctggttgctttaatgaagaaatcatctttgataaagtgtagctgaagttttgctagttattgttgcacagaccagtctaatcaatatgatcttatggcaggataatcttttgagaaaaacagggctattattgtacattcctcctattatt

SEQ ID NO: 119400 - DNA, 977 bp, Zea Mays
tctaaccatttgcggcggctgccgcaacaggctcaacgctaacgcgcacacacaatccattgccgcctcccacatctcactctcgttctgagcttccggccatggcggtgacctccggagcccccaacgacaacggctgggacgttggcgccgctgcgactgacgatgagcatcgcgtggatctggaagtcaagcacaaggacaccggcactagggactcgccagcaccgatagcggcagctgcgcctccgtctgatctgcttccactacctgcgcctccgtcccaatcccgagtggctggaaagcttggcccctcagatccaaagcacctcatctatgcgggttccaaatcaaagcatattaaagctgcacctgctgcaccaggcaagaatcgccggccacctttgtctccaccagcacctgctgtcaatcgtggtcgtggatctgtgcgcacacctttggggtaagaatatactttatcttattgcccattaaacaatcattcatcacatatgtgctagcagctggtaggatttcattagcttattgtgctaataagctattagtattttgctagtttattgcaaaagtggttgctattgacatgtaatgaacaagtcaagtacaagtagcaattgacatgaaccttttggctctcatgaacaattgatatggatcttttggttctcatgtttttactcaatggtgaacttgtaatgaacttgtaacagatgtgcttttgggagcggtttgcacatctgctgatgtgcacctatgttgtaagcacattgtatgtgttgatttggaactttgaatgtttaatgtggtgaactagtggcgccatgctaggggtggtggacactaactggatattaatctagctgtgaacatctgatgtctgatgtgatcaatggtgttatgatttgtgaaacacttaacattgaccactctatcagtcttattgttgatgtttctta

SEQ ID NO: 119401 - DNA, 886 bp, Zea Mays
attccaccccacgcaacgcaccacgcgcgaaggaagctagctcccaccgtgagtgcagtgcaccgctagatccatggcggcagcggcggcaggaagctcccgccttctctccgcgctggccctcgccggcgtcgtttccttcctcctcgtcgctgaccctggcgtcgtcgccgcggaggcggcagccgcgccgccggggctggagttccgcgtgggcgggccgcgcgggtggcgcgtcccggacgccaacaccagctacggatggtgggccatgaacaaccgcttccacgtcggcgaccgcctctatttcaagtacgcgaacgacgactcggtgctggtggtgaaccgcctggccttcgacgcctgcaacgccagcgcgccgctcgccgcgttcgccggcggcgccaccgagttccgcctccaccgcccgggattcttctgcttcatcagcggcgagccagggcactgcgaggaaggccagaggctcatcgtgcgcgtcatggtgcacccggcggccctggccgcggcgcccgcgcctggccctggagttccgacgatgacgcgccccgggatgccgtccgggtgctccgacggcgcctcctcctccgctgttgacgcagcgatcgctgccgccgccggcgtcgccatggctacgcttgttggtatgggcttgatgctccactgattggtttgctactttgcttttatgtgcgcagctagtactgcagtgcagacgtactcacacactagtacctagttgttgttagataatgttccgttgcctagttttcagtttccatgttattttgggttcatgcatgatgacttatgaagtattggtactatattaatgtcgtcgtgtcgaacaatttgtttaactcagtaa

SEQ ID NO: 119402 - DNA, 964 bp, Zea Mays
ttccatatttctcgtttgtcttgtggttcggcctgtagttgctgctagctgaacgaacgagagatctcgtctgcattttctccctttaaggctgtgcttcaagttcctgaagatatttcgaatcataattttattactcaaatttctaattacctgaattaccctacccggaaatatcagctaaccccagaccgcccaacaccagctccaccctcgccaccaaccgcccccgcaccacggccagaaccctagtcacttccccgccgcccactccatggaggacgacgccatctcgacgctcatggacatcgacgactcgccgctcagcgctgcgggggccgggttcctcgacgaggaggacggggaaggcgagatgttcttcgccccgcaccgcgcggcccgcggcggcgctggcgatgcccgcgggcccctccccttttccgggttcttcaacagcttcgacggcgccgatttcgacgacgacgacctcgcctgagggaactgccgcccggttcggtaacggatgttgttcgtggatcgcgaatcgtgttatgtcgataccgtgatggggtctcttaattagcgcatcgattcagactcgtttgggcaatctgaagatgtttagggatcaacattacctttgtggcctatggttcgtggatgcacatgcacagggatcaatataagtacctttgtgccccatggttcgtggatcactgtgcatgtgttcttccgcgtctttgttgttattttggctccatctgtatgatctaatgaaccttcctttgttatcattctgtctctgttactcgatgacttgttataggttgttaaatgcctatatctgtttgtcgaattgtgtaggctgtgagttatttgctttatagaatttgtggttagttaacatattgtgttgaaagtttccatttgtcatcaatttaaccggctagtgatgacaattcat

SEQ ID NO: 119403 - DNA, 936 bp, Zea Mays
gtcagccggaaaagcttccgctcccaactgccctcggaccctccttccccccactaccagaactcctcacctcacttcagcctcaacgcctaccaaacttacgcagcctctccataactgcgagctgttgctcctcctcccgagctaccattctccgtcgatctcctccaggctgtagcgcgctgccacgcccgcccatggcctcgggctcgaaaccggacagcatggacaccgaccctcttggcggcggcctctccatcgccgtcgagcgcaacccgccggagtcgcgcctgcagcagctcggcgtcaggtcttggcccaagtgagcaccgctgccgccgatcactgcccgctagtttacttcttggtttctcgtccccagctcctgatcgccgtggcgtatgtaactgctgccgtgcgtgtgcaggtggggttgcccgccggggaagttcccggtgaagttcgacgcgcggcagacgtgctacctgctcaagggcaaggtgcgggcgcacatcaaggggtcgtcggagtgcgtggagttcggcgccggcgacctcgtcgtcttccccaaggggctcagctgcacctgggacgtcgccgccgccgtcgacaagtactacaagttcgactcgtcctgacggctgacgcacatcgctcccggcccggctccgctgatttggtcccgattattggttcggctgctcgcttaattgtgatgattagcttaatttcctagctaatttggttacatatagcccatagccttctctgtcgtgtaaaaaaactgggagggatgcagcgcatctagctcccgcgtagcgtagcgcgtaggccagtagatattcatccggcaactgaaaaaagaaacccggtcaatgcaggggctgttcaaagtaccccttgtttattcgtccgagtgcaatccatcttggatgc

SEQ ID NO: 119404 - DNA, 913 bp, Zea Mays
gtcagccggaaaagcttccgctcccaactgccctcggaccctccttccccccactaccagaactcctcacctcacttcagcctcaacgcctaccaaacttacgcagcctctccataactgcgagctgttgctcctcctcccgagctaccattctccgtcgatctcctccaggctgtagcgcgctgccacgcccgcccatggcctcgggctcgaaaccggacagcatggacaccgaccctcttggcggcggcctctccatcgccgtcgagcgcaacccgccggagtcgcgcctgcagcagctcggcgtcaggtcttggcccaagtggggttgcccgccggggaagttcccggtgaagttcgacgcgcggcagacgtgctacctgctcaagggcaaggtgcgggcgcacatcaaggggtcgtcggagtgcgtggagttcggcgccggcgacctcgtcgtcttccccaaggggctcagctgcacctgggacgtcgccgccgccgtcgacaagtactacaagttcgactcgtcctgacggctgacgcacatcgctcccggcccggctccgctgatttggtcccgattattggttcggctgctcgcttaattgtgatgattagcttaatttcctagctaatttggttacatatagcccatagccttctctgtcgtgtaaaaaaactgggagggatgcagcgcatctagctcccgcgtagcgtagcgcgtaggccagtagatattcatccggcaactgaaaaaagaaacccggtcaatgcaggggctgttcaaagtaccccttgtttattcgtccgagtgcaatccatcttggatgcttctttgaccagcgcccttggcctgcgttgttttttttaataatacctctatcttaaaatagtagtcattttatctcttgtt

SEQ ID NO: 119405 - DNA, 1462 bp, Zea Mays
gttgaacttgaacagcacgcaagaatggaggcggaaagagctggagcgtgtctccccctcccctaccaggcgaccaaatccatgtgcgtgctgctcctcgctgctgcttccatgctgagcagcagccataccaccaccgccgccgcacatggtgctgcttctgctactgcctctcctccaccagcggcgttgctgatcgccacggccgacgaccagcaggctctgctcgccttcaaggacctcgtcaccggcgaccctcacggggtgctgacctcatggaccgccgctggcaacacgaccgccggcgtctgcagctggagaggcgtggggtgccgctcccgccggcggcgccctggccgcgtcacctcgctggagctggcgtccgccaacctgaccttcaccgtctcgcctttcctcgccaacctgacgttcctcggcacgctcaacctctcgcacaacttcctgtcgggcaacatcccccgggagctcggcttcttgccccgcctctcgtacctggacctccggcacaactccctgcagggcgtggttccaggatccctcgccggcgcctccaggctcctggtcctgcagctggagtacaacagcctcgtgggcgagatcccagccaacctgagccacctgcagaggctggaggtcctggacgtcggctccaaccagctctccggtgcgatcccgcagtcgctcggctcgctctcgaggctcacgtacctggggctgtacctgaacaatctctcaggaagtgttccggcgtctctcgagtacggaatggacggcgatgtctccatccaaggcgacctgtacagctatggcgtcctcctgctcgagatgttcacggggaagcggccgacggatgcctcgttccagggaggccggactctgcagagctacgtcgcgtcctgctacccggacaaggtactggaggtagccgaccctggcctacggcatcagctgggcaacgggtgtttgagcggaggggacgtttgttgcgacgagatcgacgccgaaaagctgcgcaggtgcatggcgtcggtatttcgagtcggcttgcaatgctcccaggaaccacccagagcgagaatgcatgtcgggactgccatcaaagaactcgaggcggtcaaggatgccctgctaaacgactgagtctggatagaatctctcggcaacagaaacacaataaaacctgacagaaaaaaattgacggttagtgaataagttttagggacaacatcttcatttcttctaaagcggtagcaaacatattgttttcagattatctgctttgacttcggcaacgtgcttcgtctgagcgcttgaactgaatcttcttccactttcctatttacctgtattgatacatataaattagttgctcctgaaatagattgtgaaatggctaataccagttagttttgaggaccttcgataaagacattccttcaac

SEQ ID NO: 119406 - DNA, 123 bp, Zea Mays
ggttaccagccgtgtttaggagtgttgggggtacctctaattacggtacccgacacccgacaactatttctttagaaaagattatatgacaagttaactatggacatgcatactatataaatc

SEQ ID NO: 119407 - DNA, 1359 bp, Zea Mays
atggaactatcaaggatttccacagaaaaatttgatgatgcagttaaatccatgactgatgctggtttcttgaaggaaactgttgaacaagcactgaaaaaactgataatattatatgaggaaaactgggagcatatagaagctgataattattcgactttggttgaagctttacttggtcattcagatcccaaagcagggcagaaaaagcgagctgagaagaatctcaatgtggattcagaccattataataagaagctgaagattaaaggtggtcagacgcctagatctagtatgcatggcagtgccaagaaagaggcatcaaaagacagtaccatgatgtcaatgatataacaagaggcgaagaatgtgtgagcattccaatagtctgtggagaggatggggttcttcctcctccatttcactacatatcacaaaataccaccttccaagatgcctgtatcaacctctcacttgctagaattggagatgaaaattgctgttctggttgttttggggattgtctagcggagccacttccttgcgcttgtgcaagagaaactggcggagactttgcttatacgagagatggcctgcttaaagaaggatttctagatgcgtgtgtctcaatgctccgggaaccacttaaacaaccgcacttctactgtaagggtgtctgtcctattgagcaaataatgaagggagtcagctcagcgaaacctgatgcttgtaaagggcaccttattaagaagtttatcaaggaatgctggataaaatgcggctgcaccagaaattgtggaaaccgtgtggttcagcgaggcattactcgcaaactgcaggtgtttttagcttctcggaaaaagggatggggcttgcgttctgctgaaaatcttcctcgtggtgcttttgtatgcgagtatgttggtgaaatattaacaaacactgaactacataagcgaaacactgagctatatggaaaaaataataaaaaggctggtaaagcaaggcatacataccctgtgaatctcgatgctgactggggcactgaaggtgttctaaatgacgaggaagccctttgcctagatggtaccttttatgggaacgtggcgaggtttatgaaccataggtgcattgatggtaacatcatcgcaattcctgttgaagttgagacgcctgaccaccactactatcatctggcattcttcacaacgagggaagtagaggcttttgaagaattgacatgggactatggaattgattttgatgatgtcaaccatcctgtaaaagcattcaaatgccattgtggaagcacattttgtcggggaagataaaagacctatctcaggtaagtgtccgaag

SEQ ID NO: 119408 - DNA, 656 bp, Zea Mays
cgacagggacacaagctgttcgatacgatcgacgagggatcggaggagcccgcgaggtacggggaagcccaatgaagctacagcgtgcgcaagaaggtgccggcggtcacctcctcacgaagaccccgtcgcggcacgacgcggagcggacggtcaccaaggggtgcgcgacgttctgggtcggggaggaaggggaggccccgcggcgggtggcggtgcccgtggcgcgcctgggccacccgcgaatgctggagctgctcggggaggccagggaggagtacggcttcgcgcaccagggcgccgtcgtcgtcccgtgcgccgtcgagcggttcatgcgggcggtggaggcctcggcgtcggcggggaacaggcacgagcaccaccgccacggacaccatcaccaccactttcgcctgcctcatattcacatcgcccggtgctttagaccgtcgcacgtcgttgcttaggattcacgtcgagcgcgcgcgagtagcaaaaaaaatttcattttcctttttgtttggaagtggcaagatttctgtttttttttcttcttgtataatcaggtgaattttggtttcgtgatccatctgtggtgaagcggttcgcccacagatcacgagttgagcaccacccgcgctaagaatgttgcgccc

SEQ ID NO: 119409 - DNA, 276 bp, Zea Mays
ataaacatcggctgcctcgctccaatcatgtccaagccagttgtgcgggaagtcgagtgcccagtcgcctagcgtgcaggagagctgggaaagatcattaccgtagcggctgcagatggttcaaaacatagttgtgtcgcactaagtctgcatgtggtctcaccctgatcacgggaaagtccacaacaagcaggggaatggcttaccggaattcattgttgccaccaagccgcacggcgacgagaagtctgctaaattgcatcgaccgctggtgag

SEQ ID NO: 119410 - DNA, 241 bp, Zea Mays
caacttctttataactatgtccaaaaatctgttaaacaaacaatgattgcaactgctgtctggtgtaattgcaactgctggtctggtgtgattgcaacttctatataactatgtccaaaaaactgttaaacaaacaatgattgcaactgctgtctggtgtgattgcaactgctttctggtgtaattacaactgctggtctggtgtgattgcaacttctatataactatgtccaaaaatcta

SEQ ID NO: 119411 - DNA, 875 bp, Zea Mays
aacgaaacgggaacgaatcgccgtgcctcccctatcgctggtatccgttgtccagcactccagcccccgtccgtttcccacgaattccgcgtcccacccggccacactttctctacgagcgccccccatctcacccacccaaaattaaaatcctcccggaaatcagagacgcgaatccctcgccccaggccccgaaacctccgagttctctcgccaattcgatccgcctcaccgccgccgcccgtccgccggtcggccttgactgctccgttgcacgtggcggttcgcagcgcggaatctaccttgtgttgagagatccggggaaacccttgttcccggtcgttccggctcgaatcttctgcggactggcaatgtaagcgttctccatcggagggcgacgatctacggggcggttgttggcggggtcgcgggaatggagcacgtgttcggagggaagtttaagcttgggaagaagatcgggagcggatctttcggcgagctctatctcggcgtcaacatacagagcggcgaggaggtggctatcaagttggtatgagataatctgatactgttcgtgcaccatttttctctgtcgtggagttatatgcctggcattcggcatgagtttgttccatatgcaaacatatcatggtctaccattctagcaacggtttcgtgaagaatttgtgtgtagattatgggatgacagaaaatggatgatgttctgcatgtaattgctttaaaaaagactggcatggtcccgagctatatttttacatgagtaataacaagattttaaaaccttttcttggttgtccatgcgaattgacctgtggatccagttctaattccaatcatggttctgttacctttca

SEQ ID NO: 119412 - DNA, 2187 bp, Zea Mays
aacgaaacgggaacgaatcgccgtgcctcccctatcgctggtatccgttgtccagcactccagcccccgtccgtttcccacgaattccgcgtcccacccggccacactttctctacgagcgccccccatctcacccacccaaaattaaaatcctcccggaaatcagagacgcgaatccctcgccccaggccccgaaacctccgagttctctcgccaattcgatccgcctcaccgccgccgcccgtccgccggtcggccttgactgctccgttgcacgtggcggttcgcagcgcggaatctaccttgtgttgagagatccggggaaacccttgttcccggtcgttccggctcgaatcttctgcggactggcaatgtaagcgttctccatcggagggcgacgatctacggggcggttgttggcggggtcgcgggaatggagcacgtgttcggagggaagtttaagcttgggaagaagatcgggagcggatctttcggcgagctctatctcggcgtcaacatacagagcggcgaggaggtggctatcaagttggaatctgtaaaatcaaggcatcctcagcttcattatgagtcgaaactatacatgcttctccaagggggaactggaattcctcatttgaaatggtttggggtggatggggagtacaatgtcatggtcattgatcttcttggtccaagtctggaagacgtattcaaccagtgcaacagaaagttttcccttaaaacagtacttatgctagctgatcagatgataactagggtagagtacatgcacacgagggggttccttcatcgtgatatcaagccagacaatttccttgtgggcttaggtcgtaaagcaaatcaggtttatatcattgactatggccttgcgaagaagtatcgggacctccaaactcataaacacattccatacagggagaacaaaaacctcacaggaactgcacgatatgctagtgtaaacacccatcttggagtagaacaaagcagaagagatgacttagagtctcttggttatgtgctgatgtacttcttaagaggaagccttccttggcaaggcctgaaagctggaacaaaaaaacaaaagtatgacaaaattagtgagaagaaaatgctaacctcaattgaggccctttgtaaatcttatccatcagaattcattacgtacttccattattgtcgctctttgcgttttgaagataagccagactatagctatttgaagaaaaatttccgggatttattcatccgtgaaggttaccagcttgattatgtatttgattggactgtgtcaaggcaagctgtggacaataacagattgcgactgagcgggaagacaggtggcttggtgggaccatctgtggatagggctgaacgagctgcagcaagacaagatgttccagatagattcactggtcaagctggtgcttttgctagaagaaccggctctggttctggtcaatacggagaacacacaaagcacaggactctgttggattcacttatggcatccaagatggctgttgattcagataaaagaaagcattcatcatctcggaatggaagcacatcaaggaaggctcttctgtcaagcagccgaggttctggagatcccagcgacccaaatcgcagtagccacctagtcccgaccaccagcagcagcagccgtccatcaaccaatcaaaggcttcaccagtcaactggacttgagggcaggacctcgtcattcccaaaacctggaagaatcggccaggatgatcccactatgaggagttttgaacgccttactatcagcgcagagaggaggagatgaatctttggaggtgcaaaaggtctgaccattgacgagtatactgatttcattgaatattcattcggttccagatgatgcttactgatgagcaagtcaaaagattatgtactgtgcatgatgctgagctcttcacattgcgatgctcgtcgaatcttggcacagatttgagttctgtacattcgttttccaaacggttagcgaagcatttagcaccccgttagggacgtgcaaaatgatgatgattaacacttatataatgacaatgaaataaaaatagctcgctaggctagctttacctttgatgtagattttcatttgtgcaatggagtattagacataaggtcatgtttgatcca

SEQ ID NO: 119413 - DNA, 535 bp, Zea Mays
aacaaatgtaacagcatggaaggaacgcctatgaagacatcagtctgcagaaaatctgattgagatttcgaactggaaactaagagcagaagctcgaactggtttcaggaacataaagtccaaaagatcgttgtttttacctagcattctagaagagacagcctgtaccgaagctcgcgaatgccgacgcctggcgcgggcgcgatgccctccgccgaagcccggccggccgctgccgcctcttccgcgaaagctgatgcccgcgttgctaccgcagcgaggccacctaagcgcgggcgcgaggcccacggccgaagcccgcccgccgcgtgcccgcgtctcccgcaaaggccgacgccctgacgcgttgctgccgtggcgaggccgccaaggcgcgggcgtgaggccacgcccgaagcccgaagctcgcccggccgccgccgcgtctcccgcgaaggccgacgccgctgccgccgcaccccccagccggagccgagccgacgccgctgccggctcacccgaataccctattagc

SEQ ID NO: 119414 - DNA, 743 bp, Zea Mays
agctgtttacacggtgtggtatatgtgttagctttcgtcttcgcctcggtttgggagccacatggatcggggcacagagattccgtgtgatcggggcacagagattccgtcgtaaaaaaatcggtatggcgttggtattcgttctctcgccactagccgctagtgaaagaaggggatatatattcgtgtcctccgaattagtccttcctgcagtgtcctcgccgacagggaaagccgtgttgcaagaaggggaattccgctgcgagatccgtgaacggtcagttcgcaatcactcttgactgtgtgtatgatttcagatcatgacgcgagcttagcgcgtacatatgtcgtgagcttagtggagttctgaatccggccacgctggttcagtggttctgtgtttagtccgtggagctctgatccatggatttcgtggttacatccaaatattcagtgagagatcagaagttgtatgtttagtttgaatctggtgcatgttggggcaggccgtctgggtgattgagatttagacgtgtatcatgtgtgggcaacttgctggattctttcgttttgatgaggctgctcataaatggagactatttgagcttgaaaacctgttgacttttgggttgtaatgatctggttcctgcgtgaacgttaaatccggaaactaggaagatgtattgtgaccttttgggaggttaaaccgcgcttgctgttgctgacgcatgtttttttttctg

SEQ ID NO: 119415 - DNA, 1295 bp, Zea Mays
agctgtttacacggtgtggtatatgtgttagctttcgtcttcgcctcggtttgggagccacatggatcggggcacagagattccgtgtgatcggggcacagagattccgtcgtaaaaaaatcggtatggcgttggtattcgttctctcgccactagccgctagtgaaagaaggggatatatattcgtgtcctccgaattagtccttcctgcagtgtcctcgccgacagggaaagccgtgttgcaagaaggggaattccgctgcgagatccgtgaacggttcagagatggcacagacggtgttcaccccctctttggaagcgatgaagcatgtcaaggcagagaacggagtcattctcaccaagcccttccttgatgtctgcaagcaaatattgcctgtcctcgataaatttggaggtgctatggcaattgtaaagagtgatatcggcggcaatatcacaagactggaaaacaagtatacttcagaaccatcaaagtatgaacacttgtacagcatggttcaggaagaagttcaaaacaagaccgcaaaaggttcctcaagctgcacaaatgggcttctgtggctgacgagggccatggacttccttgttgagttgtttcgtaacctgcttgagcatccagactggaccatgggtcaatcttgcactgattcatacaccaagactttgaagaaatttcatggatggcttgccagttctagttttacggtggcaatgaagcttgctcctaatagagagaaatttatggaggtcattagtggaaccggtgacatcaatgcagatattgagaaattttgcacgaccttctctcctttcctcaaagaaaaccacaactttctggcgagcgtcggtcttgatgatctgaaggcttcatagatcaatctccatgctgattacaacaaaataagcatgtcttacgaaactcaaagtgttgccgagggtatacctgtttcccgtagccatctcccccttgaaaaactttaggagatggtaataatttgtcagcatgattgaccatggctacttacgcagagaattgacaccactcaacaaatttagttaccgaactctcgatcctgtgttacagcaaatcctatggttatgtggaactctggtgctgtaattctcttgtatgctacccagtatgccgcaggaaatcataattcggtgttccattgcagcaggaccatcgtgtcacttgtaggctacccatattgactttgtggctcagccagctgcccacttccaacacagttgagcgagaacatctagatgac

SEQ ID NO: 119416 - DNA, 1289 bp, Zea Mays
agctgtttacacggtgtggtatatgtgttagctttcgtcttcgcctcggtttgggagccacatggatcggggcacagagattccgtgtgatcggggcacagagattccgtcgtaaaaaaatcggtatggcgttggtattcgttctctcgccactagccgctagtgaaagaaggggatatatattcgtgtcctccgaattagtccttcctgcagtgtcctcgccgacagggaaagccgtgttgcaagaaggggaattccgctgcgagatccgtgaacgagatggcacagacggtgttcaccccctctttggaagcgatgaagcatgtcaaggcagagaacggagtcattctcaccaagcccttccttgatgtctgcaagcaaatattgcctgtcctcgataaatttggaggtgctatggcaattgtaaagagtgatatcggcggcaatatcacaagactggaaaacaagtatacttcagaaccatcaaagtatgaacacttgtacagcatggttcaggaagaagttcaaaacaagaccgcaaaaggttcctcaagctgcacaaatgggcttctgtggctgacgagggccatggacttccttgttgagttgtttcgtaacctgcttgagcatccagactggaccatgggtcaatcttgcactgattcatacaccaagactttgaagaaatttcatggatggcttgccagttctagttttacggtggcaatgaagcttgctcctaatagagagaaatttatggaggtcattagtggaaccggtgacatcaatgcagatattgagaaattttgcacgaccttctctcctttcctcaaagaaaaccacaactttctggcgagcgtcggtcttgatgatctgaaggcttcatagatcaatctccatgctgattacaacaaaataagcatgtcttacgaaactcaaagtgttgccgagggtatacctgtttcccgtagccatctcccccttgaaaaactttaggagatggtaataatttgtcagcatgattgaccatggctacttacgcagagaattgacaccactcaacaaatttagttaccgaactctcgatcctgtgttacagcaaatcctatggttatgtggaactctggtgctgtaattctcttgtatgctacccagtatgccgcaggaaatcataattcggtgttccattgcagcaggaccatcgtgtcacttgtaggctacccatattgactttgtggctcagccagctgcccacttccaacacagttgagcgagaacatctagatgac

SEQ ID NO: 119417 - DNA, 1197 bp, Zea Mays
acacggtgtggtatatgtgttagctttcgtcttcgcctcggtttgggagccacatggatcggggcacagagattccgtgtgatcggggcacagagattccgtcgtaaaaaaatcgtgtcctcgccgacagggaaagccgtgttgcaagaaggggaattccgctgcgagatccgtgaacggttcagagatggcacagacggtgttcaccccctctttggaagcgatgaagcatgtcaaggcagagaacggagtcattctcaccaagcccttccttgatgtctgcaagcaaatattgcctgtcctcgataaatttggaggtgctatggcaattgtaaagagtgatatcggcggcaatatcacaagactggaaaacaagtatacttcagaaccatcaaagtatgaacacttgtacagcatggttcaggaagaagttcaaaacaagaccgcaaaaggttcctcaagctgcacaaatgggcttctgtggctgacgagggccatggacttccttgttgagttgtttcgtaacctgcttgagcatccagactggaccatgggtcaatcttgcactgattcatacaccaagactttgaagaaatttcatggatggcttgccagttctagttttacggtggcaatgaagcttgctcctaatagagagaaatttatggaggtcattagtggaaccggtgacatcaatgcagatattgagaaattttgcacgaccttctctcctttcctcaaagaaaaccacaactttctggcgagcgtcggtcttgatgatctgaaggcttcatagatcaatctccatgctgattacaacaaaataagcatgtcttacgaaactcaaagtgttgccgagggtatacctgtttcccgtagccatctcccccttgaaaaactttaggagatggtaataatttgtcagcatgattgaccatggctacttacgcagagaattgacaccactcaacaaatttagttaccgaactctcgatcctgtgttacagcaaatcctatggttatgtggaactctggtgctgtaattctcttgtatgctacccagtatgccgcaggaaatcataattcggtgttccattgcagcaggaccatcgtgtcacttgtaggctacccatattgactttgtggctcagccagctgcccacttccaacacagttgagcgagaacatctagatgac

SEQ ID NO: 119418 - DNA, 932 bp, Zea Mays
caccaatccaaagtcttcaatccagttttcactctctctccgatgcaggggagcagcatcctttttatttagacagatagaagtcaaagctctcttgaaaaaaatcaaataagaatagaagaggaactaaaaagttaaaacatgtgtttgtacaatttccagttacagacgacattacgacaaacaacaaatagtcattcacttaatttgagctttgccaatacaaatgtctaatgaaatcctgatcttttaataactgttgcttcattcctgatcttttaagatagtttgcatgcttttagtcattatctctcttttatttgtgctttcattttgttgatttacttatatgagtgatcgcaggtggcaatgaagcttgctcctaatagagagaaatttatggaggtcattagtggaaccggtgacatcaatgcagatattgagaaattttgcacgaccttctctcctttcctcaaagaaaaccacaactttctggcgagcgtcggtcttgatgatctgaaggcttcatagatcaatctccatgctgattacaacaaaataagcatgtcttacgaaactcaaagtgttgccgagggtatacctgtttcccgtagccatctcccccttgaaaaactttaggagatggtaataatttgtcagcatgattgaccatggctacttacgcagagaattgacaccactcaacaaatttagttaccgaactctcgatcctgtgttacagcaaatcctatggttatgtggaactctggtgctgtaattctcttgtatgctacccagtatgccgcaggaaatcataattcggtgttccattgcagcaggaccatcgtgtcacttgtaggctacccatattgactttgtggctcagccagctgcccacttccaacacagttgagcgagaacatctagatgac

SEQ ID NO: 119419 - DNA, 1324 bp, Zea Mays
acacacatacttgttgtataccgcctttgttcggagagaatcatcgagtcggatagagtccagggctccaggcgctgcgtactgatcgaagaggcgtgtctcttcgatcgacctccaggcttccagctagctagctagcgagcgatggcattgagggagatcgagtcgacgctgccaccggggttcaggttctacccgagcgacgaggagctggtgtgccactacctccacaagaaggtggccaacgagcgcatcgcgcaggggacgctcgtcgaggtggacctgcacgcccgcgagccgtgggagctcccagaggtggcgaagctgacggccaccgagtggtacttcttcagcttccgggaccgcaagtacgccacggggtcgcgcaccaaccgcgccaccaggacgggctactggaaggccacgggcaaggaccgcgaggtgcgcagcagcagcagcgccaccgccgtcgtcgtcggcatgcgcaagacgctcgtcttctaccggggcagggcccccaacggcgtcaagtccggctgggtcatgcacgagttccgcctcgacaccccgcattcgccgccaagggaggactgggtgctgtgcagggtgttccagaagacgaaagccgccgacggcgacggcgatggcggcgcccaagacggcgactcctcgtccccgccggccgccttcaccggcccgtcacggccacgcgccgtgtcagagccgccggaccattccgcgccgccggcgggaggaggctactactacggcctcgcgttcgggccgcggcaggtggaggtggcgcagcagcagtgttacggcggcggcggcgccacggtcgccgaccaccaccacggcttcacgcgagacagcgggggcgctgcagggtttggcgcgacgtggggaggaggagtcgccggcggtgagtgcggggctggctacctcgatatggacggcgcctttgacgtcatgatggccggctgctttggcggtggagacatggatgagttccctcaagtgtggaggtgatcgattgggcaacgtcacggggttattaccatcctcttcaaagaggagaatacatattgttcttactggagacactgggtcagttaaatctattggttgtttaatacacatggggattggctggtagattagaatgggtttgaaatgctgtgagcttgacaaggttcattgtgaacgtgaactatcagatgtaaattaattgggaaatcctttcttttctatattatttagtgtatacagttaattgataattgtgcacgtaaaatattctatatgcactgccggaatttggttc

SEQ ID NO: 119420 - DNA, 673 bp, Zea Mays
agtctagccatggagagggtttcatcagctccagaaatggatgatgttatctcaactgatcagtcaagcagatcaacaaaaagaagggctaaagtttgggattatgttgattcagagctagtagatgggaaagagaaggcgatctgcaaatactctggtagaattcttggaaaaaataggacatcactatctcctgaaacacttgaagctttagtctgtgccaaagactggttgattggattcaatgatgaagaagaaggtgaaccaatgacaggaaagcgaatgtttgattcagatgatgaagaagatgattgggaaatttgattagcgagctccgtccgaaagtccaaatcttcagctctctccttgacgcatgcccggatcgatcggtccagctctacccaccggaggaggaggcagatcgtcaacgggcagctgactaaggtggatccacggaggaggctctaaattggacagttctgtgtatacctataaatttgacagttcattgtgaaaaccgtctctaaattgatgtttgctgtcagttccgggactgatattatgcttatgatgtgtattttgagacagatggatgtaaatagttttttggtagacttgcgttctgcaatgtgtggccatgtatgtgtgagcccatggattatactaattcaat

SEQ ID NO: 119421 - DNA, 1532 bp, Zea Mays
atgtcggtggtggggctgagcagggagtgtcgtcataagctggagcggctcatggggctgatgctggaccaggccatgctcgacgacctccttgtctccagcgacgacggcggcggcgtgtacgacgtcaacctggtcacgaggctggtcagggtgtttgtggcctccgaaggggaggcagacgcgccgtcggagaggatgtggaaggtggggcgcctagtcgacaagtacctcgacgaaatctcgcaggaccaggggctgaaggtgtccaagttcctcgccgtcgccgagagcctgccgaactcggccagggactgctacgacggcgtgtactgggtgctggacatctacctcgagaagattgtacaagggggaaatgagtttgtttggtcaggcttctatttgacgatctatttagagggatttgataggatggcatatcccaaaaccgctctacttaaaaggatggcaaacatgctcatccaaatgagtcttcagaacccccttactttggctcatcctgagcttaactgtcagacttttgatagacacttatccaatatactaatgccccaactgctcttgaagttaaaaagtcattggatggaggattacaccaatcctgacctttttgtcaaccaaataataattgaggggattgtgcagcttgagaaggacttcaaggaacaacaagttgtgcatggtgcagtggaaaacactttaggggctggttctatcaatttgctattagagaatccaataccaaagaaaatatacatgcacatcctatactttatagcagtgacgaggctctgggagggtggcgtcgcctgcaagcgcaagaaggtcaccacgaacagcaagcccaagcgcccaacctccgccttcttcgtcttcatgtctgaatttaggcaggagtatcaggttcagcaccctggcaacaagagcgttgcggccgttagtcatcttgcactctactctccctttatttttttggtgcgtttgcatatgtcttctttgttcgtgttggtggatcagttggcctacctgttggttgtgcttgtgcttctgttgggtgcaggacacgtgtggtggaaaagaagggctgctggccttggttgggcaacacactggctaaagttgtgggacccggcgaggtgcctactagactcggtggaagtcgagttcatttatgatgctgacactggactcgtgtccgtcgacctgctcgtgttggagcaggagctatacctgtgggcgttggagattgtggtgtagggcgtgacgcacgtgcgtaggtgtcggcacaggcacttgtcttcacgtctaagccattctgagctggatgaccattggcatttgtgatgtgcacgagattgccatttgcgatgtgcacgagagatgtattgtggtgtctcgctatataatttgtatggagagaatatgtttgctatgttcgtatttgtatactcaatatgctctgaatgttgtataatactggacaataaaggatggtgctccttcaatagaaa

SEQ ID NO: 119422 - DNA, 393 bp, Zea Mays
atgcctcccatgtgctcaacccaaaaccctagaaacctcaggctgagctacttgtgccactcacacgcggtgcacccagctcgacaacagcatcaacccgacccagagcagaagtacgaagaatctagagtgggcgagatgggagggagacaagggctttttgcacctcatgcatacctagagctcgatgagcagagccccacaacggcggccatggatggtggcgaggcagagtctaatgcagacgcggggtcgagcaccagtaacggcgcgaggttcacagttggaaggcggggcctagagcgtgtagaagccgatgaaggaagagaagcagacggtggacctaacctcgtccttgctcaccttaggcccttacgagccccatcgatctag

SEQ ID NO: 119423 - DNA, 465 bp, Zea Mays
ttgcacggctcataaggtttctgggtcatcagcgaaacagcactcagaaggctcgagaatcgatggaatacagttctgcgattcttcagacagtgaggatgactgtccagtgtgcctggaagaatatgatttcgagaacccgaagatcgcgttgcaatgcaaacataatttccaccatagttgcatttacgagtggatggaaagaagtcaagcctgccctgtctgtgcaaagattatgttgttcaatgaggatgaatgaccctgctgaatctgatggaagtcttcacggatggcaagtggaagagccaagctaaaacaaaggttctggaaacttccagcaatgtgaaaatgtgtgttgatgaaatacagtcctagatcgtttgctgaaacatccagcagtgtgaaaattcattttttctttatagagtagattattcctctctcttcatgacaaagttgatggtt

SEQ ID NO: 119424 - DNA, 329 bp, Zea Mays
aagaccactgctattttgtagtaaagtaaacaggcaacactatagtcttgtggcagttgttgtctgtttgggactaggagttgttgggttatgcaaggcattgtatagtggtttgtccataccatgggtttctccaaggaatttgtttttggggtctaggagagtatactatgtaggagatctgcgaaattttggcaacaattgctttcttaatgtcatcctccaggtaaatattgactctgtaattctactaacatccagctagatgaatgctaaataagacagcctttccttggcacgcacttgccagttgtgatggttttatttcc

SEQ ID NO: 119425 - DNA, 102 bp, Zea Mays
ctggtaagcactcatcacttccattattgtgtttttctttagatgttaggggaaaaatgaagagggcaatttctgttcaaagatatgtgcattatattgtat

SEQ ID NO: 119426 - DNA, 334 bp, Zea Mays
cttttttgcagatattaatgagatatgtaacatttgcatcacaccaatctgccttatcagccattcacagcgacgaatttagccactccccaaatcgaaatgccagtttcttggcaccaagcctcttctcctcgctatacgactctaccttgacgctggggaggactcggccgcctgacacctggggaggaagacgaccagcgcctgggggcggactcggccgcctggcacctggagaggaagacgagttgcggtcgcctgacgcctggggaggaagaggagccgcgcctggggacggactcgaccacctggcgcttggggagaaacacgagcc

SEQ ID NO: 119427 - DNA, 1420 bp, Zea Mays
tctttaaataggccacccggcccctcctccgaacgaggtaacccaaaagaccagagagaaattactgaagcatgagcgcggagctgaagagggactacgagatcggcgaggagatcgggcgcggccgcttcggggtggtccaccgctgcacgtcccgcgccaccggggaggcctacgccgtcaagtccgtggaccggtcgcggctgggcgacgacctggaccgcgagctcgcgcagctggagccgaagctggcacagctcgccggcgcgggcaacccgggcgtggtgcaggtgcacgcggcgtacgaggacgaggcgtggacgcacgtggtcatggacctgtgcccgggcccggacctgctggagtgggtgggccgccgccgcggcgcgcccgtgccggagcccgtggccgccgccatcgtcgcgcaggtcgcgcaggcgctcgcgctctgccaccgccgcggcgtcgcccaccgcgacgtgaagcccgagaacatcctcatcgacgccgccgccgggagcgacgacgacgaggaggacgaggccgaggcggcgccgcgcgcgcgcctggcggacttcgggtcggcggcgtgggtgggcgccggtgggctcgggcgcgccgagggccttgtggggacgccccactacgtggcgcccgaggtggtggccggcggcgagtacggcgccaaggcggacgtgtggagcgccggcgtggtgatgtacgcgctgctctccggcggcgcgctccccttcggcggcgacagcgccgcggaggtgctggcggccgtgctgcgcggcagcgcgcgcttcccgcccaggctcttcggcggggtgtcgcccgccgccaaggacctgatgcggcgcatgatctgccgcgacgagtggaggaggttcaccgccgagcaagtcctcggtgagttttttcgttcgttcccccgacaacctctctcctgctccgttgatttgatttccccttgttcgtcgatgcagtttatctaacagatctgccgttggtaataaaataatgcagctcacccgtggatcgtgagtggcggaggagcccgggcaatggagcggccaacctgaggaggaatccagacggacgtgtattgccgtagagcactcaggcacggcaaggaatcccggacgttatgtatgaggtttttgtacgtacgtacgtagtagtgtacggtagctgctgccagctgcagagcagatcgatcggcaaaagaagctttataggcttgtggttttcctttgcccccgggtttttggggacgctctttacctagcggagcagagagcacccgttttccgatgtgctggttttcctagctggatgtacatacactgaccgtcttttgtacagatggagtgtggtgttggatacataaataaaaaaaaaccaagcctttgtactc

SEQ ID NO: 119428 - DNA, 1269 bp, Zea Mays
gaggtaacccaaaagaccagagagaaattactgaagcatgagcgcggagctgaagagggactacgagatcggcgaggagatcgggcgcggccgcttcggggtggtccaccgctgcacgtcccgcgccaccggggaggcctacgccgtcaagtccgtggaccggtcgcggctgggcgacgacctggaccgcgagctcgcgcagctggagccgaagctggcacagctcgccggcgcgggcaacccgggcgtggtgcaggtgcacgcggcgtacgaggacgaggcgtggacgcacgtggtcatggacctgtgcccgggcccggacctgctggagtgggtgggccgccgccgcggcgcgcccgtgccggagcccgtggccgccgccatcgtcgcgcaggtcgcgcaggcgctcgcgctctgccaccgccgcggcgtcgcccaccgcgacgtgaagcccgagaacatcctcatcgacgccgccgccgggagcgacgacgacgaggaggacgaggccgaggcggcgccgcgcgcgcgcctggcggacttcgggtcggcggcgtgggtgggcgccggtgggctcgggcgcgccgagggccttgtggggacgccccactacgtggcgcccgaggtggtggccggcggcgagtacggcgccaaggcggacgtgtggagcgccggcgtggtgatgtacgcgctgctctccggcggcgcgctccccttcggcggcgacagcgccgcggaggtgctggcggccgtgctgcgcggcagcgcgcgcttcccgcccaggctcttcggcggggtgtcgcccgccgccaaggacctgatgcggcgcatgatctgccgcgacgagtggaggaggttcaccgccgagcaagtcctcgctcacccgtggatcgtgagtggcggaggagcccgggcaatggagcggccaacctgaggaggaatccagacggacgtgtattgccgtagagcactcaggcacggcaaggaatcccggacgttatgtatgaggtttttgtacgtacgtacgtagtagtgtacggtagctgctgccagctgcagagcagatcgatcggcaaaagaagctttataggcttgtggttttcctttgcccccgggtttttggggacgctctttacctagcggagcagagagcacccgttttccgatgtgctggttttcctagctggatgtacatacactgaccgtcttttgtacagatggagtgtggtgttggatacataaataaaaaaaaaccaagcctttgtactc

SEQ ID NO: 119429 - DNA, 227 bp, Zea Mays
gatgcaaacatacttgatgtgtttgtccccagggtgcggcaaacatttgatacaagggaagaagcctacctcttttaccttgactatgcaaagttggctggttttagtgtcaggacaaagaggtgtaattgcaactgctggtgtggtgtgattgcaaccccgcattaggtgtgattgcaactgctgtataattctacccaaatatctgttaaaaaatgtaaacaaaa

SEQ ID NO: 119430 - DNA, 172 bp, Zea Mays
ccggcgccggcccgtctgctcgacggggctctgggtagtctggttgccgccggacgacgggcgcacggcaccgcaccagacgcggttgcgcccggaggtgggctggtggtgggtggccactgagtgcgacgggcttggtggggggagcccgtgtgtgtctggactggacgcg

SEQ ID NO: 119431 - DNA, 2987 bp, Zea Mays
cctgccaacccccgcgcagtcgccgggtgcaccaacccccggtcctcgcgacctgagccgccctctgcgaccttgcggccatcacgagcactcgtgctgttggtaggaaaagggccaaaggcgaccaacccccaagccgcgctggcgcagcccgtcgctatttaagcgcggcctgcgcctacatttcgctccaagaagagcagcaccatccagtgcatcacgagctcttctgcaccagattagcaggccatcgcctacttttggcttccaaatcatttatttacggcgtacgtgccttctgttcaaaccccagccccgctgcaatggagtgcgacaacggccgcgtcgctgctaccaacggcgactccctgtgcatggcgctgccccgcgccgccgacccgcttaactgggggaaggcggcggaggagatgatgggcagccacctcgacgaggtgaagcggatggtggccgagtaccgccagcccctggtgaagatcgagggcgccagcctccgcatcgcgcaggtggccgctgtcgccgccggcgcgggcgaggcccgggtcgagctcgacgagtccgcccgcggccgggtcaaggcgagcagcgactgggtcagggacagcatgatgaacggcaccgacagctacggcgtcaccaccggcttcggcgccacctcccaccgccgcaccaaggagggcggcgctctccagagggagctcatcaggttcctcaacgccggcgcctttggcatcggcaccgacgccggccacgtcctgccggccgaggccacgcgcgcggccatgctcgtccgcatcaacaccctcctccagggctactccggtatccgcttcgagatcctcgaggccatcgtcaagctgctcaatgccaacgtcacgccgtgcctgccgctgcgcggcacggtcaccgcgtccggcgacctcgtgccgctctcctacattgctggcctcgtcaccgggcgcgagaacgccgttgcggtggctcccgatggcaccaaggtgaacgccgcggaggcgttcaggatcgccgacatccaaagcggcttcttcgagctgcagcccaaggaaggtctcgccatggtgaacggcactgccgtgggctccggccttgcctccacggtgctctttgaggcgaacgtacttgccgtccttgccgaggtcctgtccgccgtgttctgcgaggtcatgaacggcaagccggagtacaccgaccacctgacccacaagctgaagcaccacccaggacagatcgaggcggctgccatcatggagcacatcttggaaggcagttcctacatgaagcttgctaagaagctcggtgagctcgacccgttgatgaagcccaagcaggacaggtacgcgctccgtacgtcgccgcagtggctcggcccgcagattgaggttatccgtgcctccaccaagtccattgagcgcgagatcaactccgtcaacgacaacccgctcatcgacgtcgcccgaagcaaggcccttcacggtggcaacttccagggcacgcccatcggggtgtccatggacaacacccgtctcgccgtcgcagccatcggcaagctcatgtttgcgcagttctctgagctcgtcaacgactactacaacaacggcttgccctccaacctgtccggcgggcgcaaccccagcttggactacggcttcaagggcgccgagatcgccatggcgtcctactgctctgagctgcagttcctggggaacccggtcaccaaccacgtccagagcgcggagcagcacaaccaggacgtgaactcgctcggactcatctcctccaggaagactgctgaggccatcgagatcctcaagctcatgtcctccacgttcctgatcgccctgtgccaggcggtggacctgcgccacatcgaggagaacgtcaagagcgccgtcaagagctgcgtgatgacggtggccaagaagactctgagcaccaactccaccggtggcctccacgtcgcccgcttctgcgagaaggacctgctccaggagatcgagcgcgaggcggtgttcgcgtatgctgacgacccctgcagcgctaactacccgctgatgaagaagcttcgcaacgtgctcgtggagcgcgccctcgccaatggcaccgccgagttcgacgccgagacatccgtgttcgctaaggtcgcccagttcgaggaggagctgcgcacggcgctgcccagtgcggtggaggctgcacgggcggctgtcgaaaacggcacggcagcgataccgaacagaatcgccgagtgccgctcctacccgctctaccgcttcgtgcgcgaggagctcggagcagtgtacctcaccggcgagaagacgcgctctcccggcgaggagcttaacaaggtgctcgttgccatcaaccagggcaagcacatcgacccgctgctcgagtgcctcaaggagtggaacggcgagcccctgcccatctgctgaacagagaaaatacaaggagcagaagactgtattttttagctaatacgcactttttattcctaatttatttatgttcgtaagttcgttgatatgctacgcaatcttgttattcagctgcaacgccaacctgctttgctttgagcaaggtctggtgagtgattgaaaaaaatgttgttgcaagctgtaccttgtatgtttttcaacaggtgaatctcacgtttgatgcattggatcagacaatcagagagtgtaaataagagccaattattttttacaaaggcaattttagcttacttctcaaagcttcgtccaatcctaaaaacaacaaaactcttaaaagagatactcacaagtcaacaagtgattaaatattttcgatgatgacagacaaacacactgaaacactcaaatcgactaaaaatgacttcatgggaaaactcacaaaaatccgaaaattgagctctctacttcaatcgaaaataaagaaagagccaaaatcaaagacaccacaac

SEQ ID NO: 119432 - DNA, 102 bp, Zea Mays
atggtgggcaccgagctgagcgagaacgaggagcagaggagaatgactacgcgcggttatacgagagaagaaggagcacggctgatatttgaagactcctag

SEQ ID NO: 119433 - DNA, 180 bp, Zea Mays
gtcctaacaaagtttcaagtcacatgcactgcatgagaaaaaataagttaccacataaaaagatggtacaagcattatgccattgtagaccttatactcggacaagaacagcacaagagaagcagaacaaagctacacggccaagatccagaagtagacaatcctcgtcgggcttccacc

SEQ ID NO: 119434 - DNA, 2700 bp, Zea Mays
accgtgaaaaacaagcaccaccgtagctcagttacacacgacaccggcagacccgctcgccttcgtctcctcctcctccacctcccgctctcactctactggccggccctcgcctcggtgcgttcccgatgatcacgttcgcggacctgacggagccggcagcggccggcgccgaacggtgcgtggaccggcagctgtggctggcgtgcgcgggcggcatgtgcaccgtgccgcccgtgggcgccagcgtctactacttcccgcaggggcacgcggagcacgcgctcggcctcgccggtgcggccgacctctccgcggcgcgcgtcccggcgctggtcccctgccgcgtcacggcagtgcgctacatggctgacccagacaccgatgaggtcttcgccaggatccgcctcgtcccgctgcgcggcggggacgcggacgcggacgcgggtggcgtcgaggacgacgcggccgcggcggacgagcaggagaagccggcctcgttcgccaagacgctgacacagtccgacgccaacaacggcggcgggttctccgtgccgaggtactgcgcggagacgatcttcccgcggctggactacgccgccgacccgcccgtgcagaccgtcgtcgccaaggacgtgcacggggccgcctggaagttccgccacatctaccggggcacgccgcgccggcacctgctcaccacggggtggagcacgttcgtcaaccagaagaagctcgtcgcaggggactccatcgtgttcctccgcggcgacagcggggacctgcacgtcggcatccggcgtgccaagcgcgggttctgcggcgccggtggaggcggaggcgacgactcccctgcggccgggtgggaccattacgcgggcctcatgcgagggaatgtgagcccgtgcgcggccgccaaggcacggggcaaggtgcgaccagaggacgtggccgaggcggcgaggctggcggccgccgggcagtcgtttgaggtggtgtactaccctcgcgccagcacgcccgagttctgcgttcgcgccgccgcggtccgcgtggcgatgagggtgcagtggtccccagggatgcggttcaagatggcgttcgagaccgaggactcctccaggattagctggttcatgggcaccgtcgccggcgtccaggtcaccgatcccatccgctggccgcagtcgccttggcgccttcttcaggtgacctgggacgagccggacctcctgcagaacgtgaagcgggtgagcccatggctggtcgagctggtgtccagcatgccggccatccacctcgcgtccttctcgcctccgcgcaagaagccccggatcccggcgtacccggagttccccttcgaagggcagctcctgaacccggcgttcccgcccaacccactgccgcacggccagcaccaccaccatttccttcactcccactcccaccagcaccaccacccacccttcttcccgttcccggccggcagtgctcctgcagccatacagggagccaggcatgcgcaattcgttccacctttctcagaactccacctcacccacttgcagccgagcctgctgtaccccaggctccgccgtcccgaccatgtcggtccgacgaccccgatcccggcaagagtcagcacggacctgaccatcggaggcgcggcggcggcggcgcgcgacgacgacgacgacgacttcccgtgcgctcctccgtcgacgggtgccaacaggcagaagcccgacgccaagccggcggggctagtgctcttcggacgcacgatactaaccgagcagcagatgagccgcagcggcgcaacctccccagcggcgaccggcaacagctccacgtgctggaacgccgagaaggggcccaacgcctcggagggctcggggggatccggcgtcatccagaccagcccggccaaggccgcgtcgtcggagcggccgccgtggctcgggggcgacggcagccagcagcagcaggcctccggcgagctcgggctggggctggagcccgggcagtgcaaggtgttcgtggagtcggacacggtgggccgcaacctcgacctcgcggcgctgcgctcgttcgacgagctgtacggccggctgtccgggatgttcggcgtcgcgggggcggagctgcgcagccgcgtgctgtaccgcggcgccgccggcgacgagcccttcaggtaacggccgtgtgaggtgaccacaacgttttttttttttgcttcgcgcacctgacgcatatagaatagaaaaaaaggtctgattttttttgcgcacattttgctccgccgttcccagcgatttcgtcaggtcggcgcggaggctcaccgtattgaccgatgctgggagcgacaaccttggaagctaaacgacgacgaggagcagtgagagagaaccgttccattccagccgcgagggtttatgttcttcggtactggtactgttagactgtactagtactgtacaggtgaggccgggagctaaggttttgttcaaaatccgttccaagtctgaactctgaagacatagagagagagggagagaggtttcagatcgtaaggcagcgccaccatgaccaggcacgttgccttcatctcgtgtgtgtccatccaaaaaatcgctgtaaaacttggggggtaattaaaaccctactagtactactactactcatcttgttccttgtctc

SEQ ID NO: 119435 - DNA, 127 bp, Zea Mays
cgactctggtggtccggcccctaaaatggtttgttcggttgcggtttctgcttcgtactcgtacgggtgggtgggcagatcttgtcgtcgtagggaagggtggccggccgggtacaagtatgatttg

SEQ ID NO: 119436 - DNA, 1661 bp, Zea Mays
caaaacgtcagcacacaaaccatatagaattatgtgaatagcccttcggttgatcactggccaccagttcgactctggcgtgacataatgatgagggtttagtcggttgtgggcggcaaattattgtatacaaaaaaaactctaactaaccagaaaccaaaccttatccctgactaaattatactacgtattttgtaatcaattaagcgaggcgatgagctcgtcctctctcttgcacgagccgtcctcccacgccccacgcatatatacctcggcctctcgagtctccggcctcacaacacacaacaagcaaagcgaagcgcgcgcacagagatctagctgagctactagctatagcagcagctgctgcaggtctcctgacatggcgaagcaggacatcgaagcatcggggcccgaggccggcgagttctcggccaaggactacacggaccctccgccggcgccgctcatcgacgcggatgagctcaccaagtggtccctctaccgcgcggtcatcgccgagttcatcgccacgctgctcttcctctacatcaccgtggccaccgtcatcgggtacaagcaccagacggacgcggcggcgtcgggccccgacgcggcgtgcggcggcgtgggcatcctcggcatcgcgtgggccttcggcggcatgatcttcatcctcgtctactgcaccgccggcatctcaggtgggcacatcaacccggccgtgaccttcggcctgttcctggcgaggaaggtgtccctcgtccgcgccctgctctacatcatcgcgcagtgcctgggcgccatctgcggcgtcggcctcgtcaagggcttccagagcgcctactacgtgcgctacggcggcggcgccaacgagctcagcgacggctactccaagggcaccggcctcgccgccgagatcatcggcaccttcgtgctcgtctacaccgtcttctccgccaccgaccccaagcgcagtgcccgtgactcccacgtcccggtgttggcccctcttccgattgggttcgccgtgttcatggtgcacctggccaccatccccatcaccggcaccggcatcaacccggcgaggagcttgggagccgcggtcatctacaacaaggacaaggcctgggacgaccaatggatcttctgggtgggcccactgatcggcgccgccatcgccgccgcctaccaccagtacgtgctgagagccagcgccaccaagctcgggtcctaccggagcaacgcctaataagtccggcggcgggagctgtgggcgccaccgatcgatccaagtgtagatacgtacgctcccccgactccgtccagtatatgacgccctgtggtcgtccacatctgccaccacagtcccgtccgcttggtgctgttttctttctttccttgacggggaaaaaaagtgtgatatatctttgctttctgtatatgtgacaaaatgcattctgtaagccagtcatgtgagtttttatttaaccacagtctacttttagaacgatttaaacggccctgaatcttacttgcaactttagaggaaagtacgggaaaagaacctcacaagtcaccaagggacttgacagttggttggtatgtgttaggcctgcggcccaaataagcaagcccatcggcgggctccgtttctcctc

SEQ ID NO: 119437 - DNA, 1815 bp, Zea Mays
ccagccacggccacggggggcgctctcgagagaaagatccagccccaaaggcccaaacccgaaacccctctcttcttcctccttccattggggtcgcgtccaacaagaggttggccagccatcccgcgcgagccacttcctctctcctccccatcggatccagcgccacgcggatccgcaaggcaatccatggcctctacccaggcggaagcggaggcgggggcaccggccccgcccgaggcggcggaggcgaaggagaagggcaagcagggcggggtgctggggagggtgtggcgggcgctcttcggtggccgcgaggacttcgagaagcggctgcagtacctgtccaaggaggaggcagccgtgcacgcgcggatgcgccggcggacgcagttctcgcgccgcgccgtgcggaacctcatcgtactctccgtcctcgccgaggtgttagctgttgtttatgccatcatgacgacaagaaatgaggatctaacttggcaaatgagggcaatacgagtgctacctatgttcattcttcctgctgtatcctctgtcatatattcaacagttgttaacttcacaaggatgtttgagcagaaagaccagaagacccttgaaaaattgagggctgagaggaaagccaagattgatgagcttaaagagagaacaaattattatctaacacagcagcttattcagaaatatgatcttgatccagccgcaaaggctgcagcagcttctgttttggcatctaagcttggggaggagactggcttaaaagttcatgttggagaagaaccaaagctggatgctgcagtggccagaagcaatgatgttgagatagtaccttcagatggtttgagaaacaggaagcaacccagtgcaagaggaagcaggactgggagccccacttctcataccccagcacagggaactgaaactaatctacctcctgctcctgctagtgctggcctggaaactgcaccagctccagtggtggtagagcatcatcaaggttcaggggctagtgatggtggtggatggattgcaaagattgctgccttacttgtgggggaggacccatcacagtcgtatgctttgatatgtggcagctgccatatgcataacggcttggcccgaaaggaagattacccacatgttacttactactgcccgcattgtcatgcattaaacacatcaaaacagtccatggggcaatactcaggctccaactcaggccggtcgacccctgttgttctggctgatggattatctacttccagttcagtacaagagactgaattgagtaacctgacgacattgcaggagctacccgaggaaggaaagacagacaagcaacaagtggaggcaagttgatggttcttatgacttgtactgttgatgtgtgtggaactagtttatctttagacttatatcgtcatgtgttcaactggtggagccacaaatttagcactgttgtaaattggaaatagtgagtgatatgatcctcggaagcatagcacgcaaaaacaagaaatgggacatggtgtacatccttgagtggatgattttttgttgtcatatagagcgcgaagtcttcttcctgcgagacaaaaagctatatgacgttcagacaagatggtggtgcaggatataacataagatcattgcttgttcagagaacagcgacatgtagaattttttgcgtttgtcttgaccttcggtcttttctttgttgtttgttacattaccaccttacagcatttcgtacacagtttccttatgatgttgaaaccgtacttttcatttggcgtt

SEQ ID NO: 119438 - DNA, 1324 bp, Zea Mays
acacagagcaagagtcttacattcagtacaagttaattatatcaaaagcacatcatagagacatagatgaatttacaaacacgagtgcatgtttctgtttgtaaagatagtactaacatcatggtaggacgtaggagcgagttgtgggacttctcaggggaattgaacatgagatttttcaccgcaacaaagcaccaaaactgaaacgaactatccaaagttgacgacacaaggttttaatcatgccttcagtcttgacaaatcgaagaggagattagcaaaataaccttttgaaaactagccttctctagggactgtacaataccaacagaagctaacaagaaggcagagagtccaaaccctccagcaccttcggtggacactggacacagacacctcaagatggagaccgctgcagacaatagatcgaactggtcgtacactagagaagcagcacgggaagactcgaacgaaaaggaagaaaccaaatcaagcaacgatgattacacgaaagacggtggcccccaggcgctatccgtgaggagctcgctttccacatcgaattccacggcagcccgagcgaccgccaagctcccttcgttccactaggtcacgcaaacgaacggaaaaaaaaagcactaacgcacgagcgcagcggcccggccgccggccggcaccaaatcggggtgttttccggatcacgctaccgaactccatgagcccagtaaatcaagaaacgcacctgtgccggagccgcagcgcagcagcggcagaagacgcaagggtgcaggggggcgcagcagctatagcgatcgatcctgccgtgaatggagtgtgaggtggtggtctcttcttcgccgtgccgtgtgcttggttggccttctttaaatggtggtgccgtccggctttgtgcgctccaatggaaaaggcaggcagggtgcgggggagaggaggggagagcgcaactaaaaagcggcggccccgccgaccccaaaggcgagacgttgctcgtttatatgcgcccaaaaaggaagggccgggggcgggcaaagcgcagttcagttgcacaacttgcggcacaccgcaaacgagccgagccgccgctgccgccgccgtgatggcccgaagagaggaggacgaggggcagacgagatctcttggaattcagcgctgcgggatggaaacactggcgccgggattcccaatgcctgccaaacaattattgccaccataaactaactagtactgctagtctactctctctctctctctttctctcacacagcttttctttgtttcgcttccactttttctagcgaggaaa

SEQ ID NO: 119439 - DNA, 2719 bp, Zea Mays
ctgcaatctaatgtatttgaaagtcttactgttggatgtgtcccatgtgctagaacagatatagatggtgtcattgttagtggagtaaaacaaggaaaaaaatctagaaagtaagtttgatgattccatgtttgatgatattttttaatatatgcatgcacttgttgtttgagtgtaaatagctaatctcattgtttgagtaagtttgatgattccatgtttgatgatatttcaggaaaaaaaatggcaagcgcaagagaaagcaataaagatggatcatgtagtgaatacgagcagctgaagcaagaaaatattgaaagaaataaaaggaggttggcatctcttaacatccctgaaatcgtcaagagtatggagcaccaaggtccatccaaaaaaatttcaaagatctatttcaatcctgtgctagaaaagaaattcctgtgcaacttgatgttcctgtgcagtagtagaaaccagagaaatagtgcccagaattgtgctagaattagtgcccagaattgtaaaaaacagaagacaagtgttccaacaactaaacctccaaacttgcgaccaagaccacaaagacaaagtgttccaacaactaaacctccaaacttgcgaccaaggccacaaagacaaaatgctcaacctcaagacgaacaagcgattgctgatttgcagacggtgggagattttctcactgacaatgttgaagtttccgaggatgatccaatcaatgctacaaaaaagaggcctgcaaggggcataactaagatggagggaatattctcaaggtcacctgaaatgccaaaaatcaaaattttactcaatgatcgaggtcagcctattggtaaaagtgctagacaactttcaagtgctattgggtgtcaagttagaaagaaattgtctattgctaccacggactggaggcttgttgatataaacaagaagtatgagttgtgggaggatataaagacatattatgatgtagatgctgctgccttaaactgggttatgcgcacagctggaaagaagtggaagcaatttaaagcatccataaagcaacgatacttcaatcctgaattgtctataaaagaaattccagaatgtcctgataagagggttaatgatgatgattggcactctatgtacaactattggatgtcttctgaatttcaggatcgctcagaaaaagctaaaataaatcgacaaaagctaaagatgcaccatacagccggcagtgtgagctatgcatgttcagaatatgatttggctgtgaaactaggacgtcctccacgaagagatgaaaactttatccaaacccatacaagaaaaaatggtgttcctacagaacaggcaaaaccaataattgaccaacttaatgatgttcttggagtatatccagagttaaaggaccgatcaattcaagagggtgatgcattctctattgtttgtggaccgaaagagccaaaaggatatgttcgtgttttgggtttaggccctactcctcaagatattggcactccagagttgaagtcttatactgcaacaagactacaaatggagattcttgctcgtacaaaggttcaaagtgagaaggctgctttagaagagcgtgtacttgagctacagactcaaattgagcaaagggctcaaccagaccgggcaagtgaagagcccatgtcacatcgcggctctacttcatttcaacataaggtgatgaggaacaagtttgctgctgaggatgaggaagacaatgaagaatattgtgcttctgaagatgaggaattagatgatgaggatgatcaaatatttcatcagatgcaaggtgctaactcaccaagatctacaaggcactttgctgaagcttcacactctaaacatgatgatcttgtaatgctctcattcatttcatacattttctaacctttattttcataaaccctcaaaaacattgaagtaaattattcttaatcatttgcaccaggttggaaaagatgtcatattatatgctatgttgagatctgatttgcctgtggctaaagggacaattgtttctactaaaccaagcaccacagttggaggccagatccttggaaggcaatattgtgaagttattgtaacttgtgtgataaaacgagatacagttttgcctcgcccttgtgcaaatgtggaaactatggctgatgcttacatgatgtcagttgcatggccgtacaagaaagtaatattctatatcttatcttgtttatatttagatttatatgagccatcaacttaatgatgatcttgattgcaccagctgaagttggtgcataaggctgcaacaccgtctagtggagggtgttctggacaaagaaagcttgtaccttaaaacaggaggatacaagaagctggagtggttgcctgaaggcttttgaactgcttgaagcattagtgtagctttagtgcttttgtgactgatcagctctggagcagctagagtgatgtagttgtgggcttttgaacaatagctggagtgatatgaaacattagtgatgtagttgtgggcttttgaactgcttcaagctggagtgatgtcgctgtggtgcttttgtgattgatcatctctggagcttttgtgaatgatctagctatttgtaaatgatcgaattgtgaatgatattataattgtgatacttttgtgatcatataattgtggtgcttttgtgtttatgtg

SEQ ID NO: 119440 - DNA, 272 bp, Zea Mays
aatttgtaatagcagccatatgcacttacttgtagtctttaaaagtggtctttaagcaaggttattttttatgcacttcgctgcaaatacacttgaagaaccatcttgtcagtctccttgtcataaagcatttaccttttcttgtaggtaacttgggctcgacttactgacacgagcaacagtctgataacgctacaagacaccgatgtgcaatggtcgccgccctctatgggattatgcagaggtcagatcaacaaatagctatatttttc

SEQ ID NO: 119441 - DNA, 387 bp, Zea Mays
atggcgaccttcaccaagctcgaggattcccccatgttccgcaaacaggtggcgtccctcgctcttcgctcctctgcccacgaggcctccctgatccggccccgtcgaggcaatgtttcgtgtttcttgggatctcggtcggtcctacgtcgtcagttggatttgggtgtgtcgaatggaaggattcggggatcacttgatgaggcatatgcaggggatctatcatttgcagattctctgcaagcatttggtgctggtctggatgatcctattagtgttgccattggagggcccgtgatgtccaagtttactactgctttcagggagcttgggacatacaaggaactccttcgttctcaggtagttcgtgtaacacaaaaggaatga

SEQ ID NO: 119442 - DNA, 95 bp, Zea Mays
atttgttgaaagatatatctaccactatccttatgactgtaatactgtatacttctccttgctcaggatgccacgacgctggttactgtagtgaa

SEQ ID NO: 119443 - DNA, 1177 bp, Zea Mays
tgatgatatattcaaccttctgaggaatatccctggaaatgacagttgtgcagaatgtcgttcccctgatcctgattgggcatctctaaacttgggtattctgatttgcattgagtgctctggggctcataggaatcttggagtgcacatttcaaaggttcgatccttgagactagatgtgaaagtctgggagccagtaattatggatctcttccatgcactaggaaatgattacgctaattccatttgggaagccctgcttccaaaagaagatcaaggaatgaacgactcaaatggagctattctttttattgaaaagcctaaacctagtgatgctttctcaataaaggagaggtacatacaaacgaagtatgtggacaaactgctttttgccagagatcccgatcagaataccattaatattttggaagccataaggaaaaatgatgtgagagcagcatatcgaattcttgcaatagctgaagtcagtgctaacatgacatatgatgctttgagcaaagatgtccatcatgttcagccagtgacagacaagatgttacttgatccgatttcttgtgagataattcaggactctggaaaaccagaaggctgtctacaaggttgttctttattgcactttgcatgcgaatacggttatcctataatggtggagcttcttctactttttggcgcggatattaatatgcaggatttccatggccgaacaccattgcatcattgtgtccaaaagaaaaatgatgagctcaccaagcatctgctgaagaggggtgcgagaacgacaattaaagatggcggaggtctgactgctctggagagaagaatggaacttggagcgataactgatgaagacttattcatactatttgtgaggtgatgttgcaaacttgcaatacaggcctttggcaactagctgtttgtacctgatagcattgtattgtacccacctaatttagcttctggaaagaacatgatttctacacctgaagacaaatgccttttactgtaccacgatataacttatgggactgctgcgcttggctgtgttttaaaattccactggtcgacatgaccacatcgttggtttgtacaacaattataggcaatcacagtattcgattctttgagtatggttattgaggtatgagtttctgatgtc

SEQ ID NO: 119444 - DNA, 535 bp, Zea Mays
gttacacaggctgttaagctaatatgaattgcacacgtgcatactatacatacacatacaacggtgttcgctgcagacctgccagtgccaggcatggtgcctttcctgtctactgtagcgagaccatctaccaactatagttattcagcaatatgcccagtctaagaaccatagatctcatgctgaataacttcagtggcacgattccggaaagcatatactcctgtagaaagctgactgcgctacggctagattcgaataagttccatggacaattatcagaagggctaggcaacctaaagttcctctcgttcctgtcgcttacaaacaacagacctgccatgcatggtgccttaacctccgaagaagcagcagggatttggtttgcaaaacggggctcaatttctggagaggtagcaggaacagggacttgatcagctggaccagacggaaaaatcacagaggacgagctaccaggatcgttgctgctgacactattgctttccttgggtggagctgcaactgctgcaatagc

SEQ ID NO: 119445 - DNA, 2864 bp, Zea Mays
aattctagcacggtcgccataacggaacggtcagagtcaaaccacgtccacacttccccacggccacggccccttgcacaggactgttatgccgccgtccgatgggatcggacgatcggcatctaacctcggcagacgggccacacacacctcaatgcaaggacaatgcgcacccgctgccgcatgttactccaataaatttcggacacgtacaggcggtatagccagtgcgcagcgcatcgtcacccagccccggacccccactctttttttttttccttttctcttcttccggaagtcccagcccggcagtccaccactccaccccctcccccgctgctccaaaaggcgggcaccaaacaccaacccgagccccgagcacgagcgcccaaccaaatggcgccgcacaccaccgctggaggcgggggcggagccgaggatgaggtgtccgaggcggcggctgcatcccccgccctgcggcaccgccacgcgggcaagggcgaggggctgggcggcaatggcggcgctggggccgacggccaggcgtccgtggagcgggtgttcgcggacaaggcggtgccgtcgtggcgggagcagctcacgctgcgggcattcgtcgtcagcgcgctgctggccgtcatgttcagcgtcatagtcatgaagctcaacctcaccacggggatcatcccctccctcaatgtctccgcggggctgctcggcttcttcttcgtccgcatgtggaccgccgccgccgagaggatgggcttcctccgccagcccttcaccaggcaggagaacaccgtcatccagacctgcgttgtctctgcctacggcatcgccttcagcggtggctttggcagttatctatttggaatgagtgacaaaatagctaaacaagcaacagaggctaaagatgctaataacataaaggatcctcaccttggatggatgatagggttcctattccttgtcagttttattggtctctttgcacttgtacccctaagaaagattatgattgttgactacaagttgacctatccaagtggcacagccactgcatatctcatcaacggttttcacacacctgagggagccaagcttgcaaagaagcaagtaaagacgttgggcaagtactttgtgtttagctttttctggggcttttttcagtggttctacactgcaggggatgagtgtggattcaaaaattttccaacattgggccttgaagcttataacaataggttcttctttgacttctctcctacatacgttggagttggcatgatctgcccatacatcgtgaatgtgtctgttctgctgggtggtatcctctcatggggtttaatgtggcctctcattgccaagaagaaggggagttggtacccagctaacctggaagactcaagtttacatgggttgcaggcttacagggttttcatttccatcgctttgatccttggggacggtttatacaacttcattaaggtgctgatccgcacaattgcgggtttcatatcaatggtgcagcaaaattcaaaaagcatgcttcctgtttcggacaatggcagttccatgtccagtatggaggctgtatcctttgacgatgaacgtcgcattgagaattttctgaaagatcagattcccaagtcagttgcatacgggggctatgttgcagttgctgctatatctattggcacccttcctcagatcttcccgcagctcaagtggtactacattttagtagcctacgtcgtggcacctgtgctggccttctgcaatgcttatggaagtggcctcactgactggtctctcgcctccacctacggcaagctcgctatcttcgtgttcggtgcatgggctggcctctcacacggtggcgtgctcgttgggctcgcagcttgtggtgtcatgatgagcatcgtgtcgaccgcctcagacctgatgcaagacttcaagaccgggtacctgacgctggcgtcaccgaggtctatgttcatcagccaggtgattggcaccggaatggggtgtgtcatcgggccctgcatcttctggctcttctacaaggcgttcggtgacattggcgagagcggcaccgagtacccggcgccctatgccatcgtgtaccgcaacatggccatcctcggcgtggatggcttcggctcgctcccgaaaaactgcctcaccctctgctacattttctttgcggcagcgatcactatcaaccttgtcagggacctgaccccctacaaggtgtcgaggttcatcccgctgccaatggcaatggcgattccgttctacatcgggtcctacttcgccattgacatgtttctgggcagcgcgatcctcttcgtgtgggagcggctgaacaaggcgaaagcggacgcattcggacctgcggtcgcgtcggggctgatctgcggagacggcatctggaccctgccgcagtccattctggccctcgccaaggtgcagccccccatttgcatgaagtttttgtccagatcgaccaatgccaaggtggacagcttcctcggcttgtcatgattttacacagaatggcaagtagacacgccctcatcctgtaattattggtgcaagatgcaatcaccaggctacagctctgtaaaagagaagaggttttgctgtggagtgaccaaagctttgtccgtgtagtctgtgtcaagaggaaaatactcaatggccctctgcctttttttgtgcaattattaactagcgtattcacagttataggtatttttgaaatgtgaaacgttcactacaaatttttttttaacgaatggagcttttgaaggtggagcggcagctataaggtgtgcgttggaaaagggtccatgaaagcc

SEQ ID NO: 119446 - DNA, 780 bp, Zea Mays
ttttgtgaacgggcatatggcgaagcttctaaaggagctagcctagtcccttgtccgtgcagcaaatgtgacaaccggaaaagaaaaccaaagaaggccatggtagaacatatttggaagaatggatttacgccggactatactcggtggatcttccatggtgaagcgcatcgcacgagagaggaggtggtgagacaacgcgtcaaggattacgatgccgatgccggggtagcggacatgttgaacgactatcacgaggcacagttcgccgaaggacgtacggaggacgagcctgaggcgaccgtaaaggcattctacgacatgtttgacgcagcacagaaaccccttcacggcaagacaaaggtttctcaactggatgccattgggcgtataatggcgttcaagtcgcagtatagcatgagtcgagacgccttcgatggtttgttgacagttattggcagcctgcttccggaggatcacgttctgccaaagagcatgtacgaggcacagaaactccttcgtgcactcaagatgacgtatgagcatatacatgcttgtccgaagggctgtgtcctatttaggaaagaacacactgaggcaaagtactgtccgaagtgtaaatcgtctaggttcatggaggtagactctggtgatggacagaagaggcagctcgacatccccgtgacaatcctacgccaccttccgttcataccgaggatccagcgtctatacatgacagaggaatccgcgaaacagatgacatggcacaaaaaaggcaaa

SEQ ID NO: 119447 - DNA, 2151 bp, Zea Mays
aaaccacacacaccacagcactaaagtctattcatctctggctccccaaattcagctggagagcactttttcccatcatggataagaactacggtgaactctacaacatcctcggatggggtgaggagtacttcgcggtgaacacggaggggcacctcagcgtgaagcctttcggccgctggacggagcccgggcaggagatcgacgtgcactcggtcatcgtggaagctctagcgacccaacccaacgacagcaccagcaaatctcagttccccatgatccttcgcttccccgacgtgctcaagaaccgtatcgagacgctccataacgcattcaacagcgccatggagtccaccgggtacacgtccaggtaccaaggcgtgttcccgatcaaggtgaaccagaacaagcacgtcgtgcaggacatggttaggttcggccagcaatggaactatgggctcgaggctggctccaagccagaactgctcatcgccatgagctgcctccccgtcaccgaagccgagcccaagccgtacttgatctgcaacggctacaaggacgcggactacatcgcgctcgcgctctcggcgcgggccatgggcctgaaccccatcatcgtgctcgagatggaggaggagcttgccatcgtcctcgaccagtacaggaagctgcagcagaagctgccagacgacgatgccgtgcgcaagaagttcgagccgatcatcggcatccgcgccaagcttctcaccaagctaccaggccacttcggttcgacggccggcaagcacggcaagttcgggatgctcgccgaccagatctacgaggtggccgagacgctcggcaaggagggcaagttgcactggctccagctgctgcacttccacatcggctccatgatcccgacgacggggaaagtgtacgacgcggtgagcgaggccgctggcatctactgcaacctggtgaacgagcacggcgccaagtggttggccacgctggactgcggcggcgggctcggggtcgactacgacgggacccgttcaggcgactccgacatgtcggtggcgtacgggatacaggagtacgcctccgccgtcgtgcaggcggtgcggctcaagtgcgactacaacggcgtcgcgcacccggtcgtgtgcaccgagagcgggcgcgccatggcgtcgcaccactccatgatcatcctcgagacgctctcggcgatcccggagccgcaggacgaggacacctccgagcagctgttgaacaggatccaggacctatcttacaagcagccgagagctccggttggcggcgccacggcggccgtttactctcacgccgcagacctcaagaagcacggcatcgagatgtacaagcttggcaagaagctcggcaagagggtcgtcgccgatgccaacaccgtctataactaccacatgaacctctccgtcttctcgctgttgcctgacttctggggcatagggcagctcttcccgatgatgccggtgagccgcctcaacgaggagccgactctcaagggcacgctggtggacatcacctgcgacagtgacgggaagatcgagaacttcatcagccgcgaaaacacattgccgctgcacctgttcgagccgagcctcggtggctactacgtggccgtactcgtctccggggcgtaccaggaggccattgctggcaagcacaacctgttcagtggcccaaccctcgttcgtgtcaatagtagcactacaaaagatggcggcttcgagattgaacgcgttgacctgggcccagctgcggatgagatcatcggcagcatgaggtacagcgtcgaggaagacattatcaccgtcatcgagaagaaagccaaggggacagaagaagaagaacgtgtgtgggcgtgggagatggtggagccactcatgaccaaagcgctcaccaccatgccctacctcaacgaatacaaggtccctgaacctgaacctgaacctgaacccatcccttgaacttctgcactgcagagtctccggatttggctgcgactgcgatcatatatacaataagaactgcctggttgatgatggataagcagataacgaaagcagcctacgtatgtatgtttcccttttttgagtttaccctgctcgcttgcatcttgtt

SEQ ID NO: 119448 - DNA, 2202 bp, Zea Mays
aaaccacacacaccacagcactaaagtctattcatctctggctccccaaattcagctgagcactttttcccatcatggataagaactacggtgaactctacaacatcctcggatggggtgaggagtacttcgcggtgaacacggaggggcacctcagcgtgaagcctttcggccgctggacggagcccgggcaggagatcgacgtgcactcggtcatcgtggaagctctagcgacccaacccaacgacagcaccagcaaatctcagttccccatgatccttcgcttccccgacgtgctcaagaaccgtatcgagacgctccataacgcattcaacagcgccatggagtccaccgggtacacgtccaggtaccaaggcgtgttcccgatcaaggtgaaccagaacaagcacgtcgtgcaggacatggttaggttcggccagcaatggaactatgggctcgaggctggctccaagccagaactgctcatcgccatgagctgcctccccgtcaccgaagccgagcccaagccgtacttgatctgcaacggctacaaggacgcggactacatcgcgctcgcgctctcggcgcgggccatgggcctgaaccccatcatcgtgctcgagatggaggaggagcttgccatcgtcctcgaccagtacaggaagctgcagcagaagctgccagacgacgatgccgtgcgcaagaagttcgagccgatcatcggcatccgcgccaagcttctcaccaagctaccaggccacttcggttcgacggccggcaagcacggcaagttcgggatgctcgccgaccagatctacgaggtggccgagacgctcggcaaggagggcaagttgcactggctccagctgctgcacttccacatcggctccatgatcccgacgacggggaaagtgtacgacgcggtgagcgaggccgctggcatctactgcaacctggtgaacgagcacggcgccaagtggttggccacgctggactgcggcggcgggctcggggtcgactacgacgggacccgttcaggcgactccgacatgtcggtggcgtacgggatacaggagtacgcctccgccgtcgtgcaggcggtgcggctcaagtgcgactacaacggcgtcgcgcacccggtcgtgtgcaccgagagcgggcgcgccatggcgtcgcaccactccatgatcatcctcgagacgctctcggcgatcccggagccgcaggacgaggacacctccgagcagctgttgaacaggatccaggacctatcttacaagcagccgagagctccggttggcggcgccacggcggccgtttactctcacgccgcagacctcaagaagcacggcatcgagatgtacaagcttggcaagaagctcggcaagagggtcgtcgccgatgccaacaccgtctataactaccacatgaacctctccgtcttctcgctgttgcctgacttctggggcatagggcagctcttcccgatgatgccggtgagccgcctcaacgaggagccgactctcaagggcacgctggtggacatcacctgcgacagtgacgggaagatcgagaacttcatcagccgcgaaaacacattgccgctgcacctgttcgagccgagcctcggtggctactacgtggccgtactcgtctccggggcgtaccaggaggccattgctggcaagcacaacctgttcagtggcccaaccctcgttcgtgtcaatagtagcactacaaaagatggcggcttcgagattgaacgcgttgacctgggcccagctgcggatgagatcatcggcagcatgaggtacagcgtcgaggaagacattatcaccgtcatcgagaagaaagccaaggggacagaagaagaagaacgtgtgtgggcgtgggagatggtggagccactcatgaccaaagcgctcaccaccatgccctacctcaacgaatacaaggtccctgaacctgaacctgaacctgaacccatcccttgaacttctgcactgcagagtctccggatttggctgcgactgcgatcatatatacaataagaactgcctggttgatgatggataagcagataacgaaagcagcctacgtatgtatgtttcccttttttgagtttaccctgctcgcttgcatcttgttattgtacgtgttatccaataaataaaacaagcttcactggtgtgtttaattgct

SEQ ID NO: 119449 - DNA, 495 bp, Zea Mays
atgggtttcagcgcttgccctcgcgccgccgggcccaccggccagcagaggttactgctcttcttccccaacctcttcctcccgtccaaggtgccccacatcgcgaaaacctcgtcaaccgcccccacggacgcggcaaggcagggtcgagcctcttcgcacggcagccggccggctgcagcccctagccgtggccatggcggcggccagccccgccccctagctgacctcggccctccagcgagcccgctcgaccacctgagccgcggccgcagccagcctagtggcccggcgcggtggccagcccgcgcagccagcgtggcggctcgccggcctgccagcgcggcgcgcgtcgccagccaacctcggatggctagcacggtcctcggcacagcggccagggcatgcccggctcggcctgaggcgcggttgcccgtgccctgcgcgccctcgcagccggccgacgtggcacgcggcacccagcgcggccggtga

SEQ ID NO: 119450 - DNA, 298 bp, Zea Mays
ggatataaataacggcgcaaactcatctgattgcaaagcattcgctaaatcaaaaccatgtcatccttactgtctatatcgtatgcattgctaaaaaaaattagaaccgagctgagtattcataactaatctgtttccctattcagactgcggataaaattatctgctctaaattaaattatgcgcagtctgtacttattgacggatatcttttgttttgcccggtttacatctcgcaccgatttaatcagagaattaaattatctttatgttctcgtgtaaagaaaaataaaaaaaa

SEQ ID NO: 119451 - DNA, 498 bp, Zea Mays
atgtccctgccatcgacttgcggcagtataataaagctgctgcgctggtgtattggcgctccagacccggcggccaacgggcggcgcggatacggcaccggcaacgtcacccgtatagtggaaatcctagaacaggtcggggcactcgtgcctcaagtcgtgcaatccattacaaacgcagcgaaggcgttgctggagatgggcgcggtccgcgtggtcgtcgccggcaacctcccgatcgggtgcgcgccggcctacctctcgggggcgaacgtgacggagccggccgcgtacgacgccgacggctgcctggccgtcctcaacggcttcgcggagctgtacaacgcggcgctgcgggccgccgtcgcgggcctgcagcgggcgcacccgcgcgccgtcgtcgcgtacgcgaactacttcgtggcgtacgccagggtgggggaacggacgcggaaaccgcggcagtgggcagataacgattcgtggccgtgggaatga

SEQ ID NO: 119452 - DNA, 224 bp, Zea Mays
ggccctcttagagagggttggccgagcggggacgaggacgagacaggcactctcttggggccgctcgcttccctctcccgcgtggacgcttgtaaacccctactgcaagcgcacccgacctgggcgcgggacgaacacgaaggccgcgggattcctacctctctcacgccggccaccggccgcctcgctccttccccccttcgcgttcgccctcgcgctcgacc

SEQ ID NO: 119453 - DNA, 1553 bp, Zea Mays
ccaatgatgcttactgcatataatatgtgtccaatctttataagtacatatgatcggtaggtatgtgtatgaagataaatttatatacaacagtgaatatgtgtgtcccgacgagctttttatttttttttatcgtgcgtatgtgtatggcgtatttacccacccattgctacctacgtcccgtcttaccgcagcctcgtcctatccgtttgacgctcatccctggtatcccactcccctccctccccagccaacgacctccgccgccggccaccgcctgcctcagatcccccgccccgcccttccgttactcccagcgcgacgcggctgcgtccatgacgccctcctccgctctagccctcgcgctccaggccgcggcgtccccgctcccggcctccacgccgcggtcctcgcccaggtccagctcgctgagcctgggccgggggaccgccgggaacggcccgcgccgtcttgccgcagcagcgcccccacgggcgttcttctcatcgtccccctaccagccgccccaaccggaggggttctcgccacaccgggagtacggcctggtccccatggtgatcgaaaccacctcccgcggggagcgcgcctacgacatcttctcgcgcctgctgaaggagcgcatcgtctgcatcaacgggcccatcgccgacgacacggcctcgcttgtcgtcgcacagctgctcttcctcgagtccgagaacccactcaagcccgtccacctctatatcaactcccccgggggtgtcgtcaccgcggggctcgccatctacgacaccatgcagtacatccgctgccccgtcaccacgctctgcatcggccaggcggcctccatgggctcgctcctcctcgcggctggggcgccgggtgagaggcgcgcgctgcccaacgccagggtcatgatccaccagccctcgggcggcgcgcaggggcaggccactgacatcgccatccaggccaaggagatcctcaagctgcgcgaccgcctcaacaagatctaccagaagcacacgcgccagcccatcgacaagatcgagcagtgcatggagagggacctcttcatggatcccgacgaggcgcgcgactggggcctcatcgacgaggtcatcgagaaccgacctgcctcgctcatgcccgacggaatcgttggaggcctcgatgtgcccagcctcggtggcggtgggggcgggggcggacggggaagcgacgtcgaggagccttcggcggtgtgagaattggcctcaaaggtgaaatcccgttcgcatccggtggctttgttgtttgttgttagatctgaaggttcgattcttaccgtacaaggttaaccttgttattctggttacggaggcatccggctccccattctccttgttgcttcaattgcctgaattgagctattggtgatataattattacaactccaaggaaattctgttctgctggtactgataaattgacaaagtattgtgtatgttgtactatactactatattagtatcaattccatgccagggcattgaaatttttctctcttt

SEQ ID NO: 119454 - DNA, 100 bp, Zea Mays
agttgtgtcagctattgttgatcacatgtttctgcttcaagctttagtagttctggtcacgttttctgatggcaacattacattgttgaagttctcctaa

SEQ ID NO: 119455 - DNA, 1849 bp, Zea Mays
gtcggccgccgtggcactctctctcggtcagcggagcctgtgtgtatatatagccacccggagggggcgagatgtgcaccacgcaccagcagcagcgaggagctagagcagcggcagagcgcgcggcgcacaccacgcatcgtcctagctcacgatggcgggcgcctggtccttgctcgcgctctccctatcgctctgctccgtcgcggccgtcgcggtgcagcaggtgaacacggtggccgcggcgcagcaggcggcggaccgggtggcggggctcccggggcagccgcccgtggggttcgcgcagtacgccgggtacgtgaccgtgaacgagacgcacggccgcgcgctcttctactggttcttcgaggccaccgcgtcgcccgacaagaagccgctcgtgctctggctcaacggcgggcccgggtgctcgtcgattgggtacggggaggcggaggagctgggtcccttcctggtgcagaagggcaagccggagctcagatggaacaactactcctggaacacagaggccaaccttatgttcctggagtccccggtgggcgtcggcttctcctacacaaacacgagctccgacctgctgcaactcggcgacaagatcaccgctgacgacgcttacaagttcctgctcaactggttcaagaggttcccgcagtacaggtcccacgacttctacatcgccggcgagagctacgccgggcactacgtcccgcagctgtcggagaagatcttcgacggcaacagggcggggcccaaggagagctacgtcaacctcaagggcctgatggtcgggaacgcgctcatggacgacgagacggaccagacgggcatggtcgactacgcctgggaccacgccgtcatctccgaccgggtgtacgccgacgtcaaggccaggtgcgacttcagcatggccaacgtcaccgacgcctgcaacgccgcgctccaggagtacttcgctgtgtaccgcctcatcgacatgtacagcctctacaccccggtctgcaccgacgacccggccggctcgtcggcgtcgtcctcctacgacgcgcgcggccaccggaaggtcgccgtccacggcgccgcccccaggatcttctccaaataccgaggatggatcatgaagccggcgggctacgacccctgcacggcgcagtacgcggagacctacttcaaccggcccgacgtccaggcggcgctgcacgcgaacgtgaccaagatcggctacaactggacgcactgcagcgatgtgatcaacacttggaacgacgccgccttctccaccctccccaccatccgcaagctcgtcgccggcggcctcagggtgtgggtcttcagcggcgacaccgacgggaggatccccgtgacgtccacgaggctcaccctcaacaagctagggctcaagaccgtccaggagtggacgccgtggtacgaccatctgcaggttggtggatggacgatcgtctacgagggcctgacgttcgtcaccatccgcggagccgggcacgaggtgcctctgcacgcgccgcggcaggcgctgacgctcttcagcaacttcctggcaggcaccaagatgcccccaatggcgttcccctagtttcaaaagaattaaaaaaaaagtgcgtcctcttgcccggcaaagccggctgatatgtttatttcctcccttctcgcttctaccaaagttgcaagtgtaattcgattggaaaaaagttcagaaataaaagtcatagtgctgacctcaatgctcagtcacaacctcgcttatcgagaaatcattttttattttcttattactaaatacatcacagaccaacaccatcaagaacccgag

SEQ ID NO: 119456 - DNA, 1208 bp, Zea Mays
ctcgcgtgctcgattcccatctccccctccctgcgcacacccgcacaccaccaacaccagacgccgccgcccctcatcgctgtcccgtcccgcgcgcggccgccgcatccgtccgggcctcctcgtctccccagccccgctgccgccgcagcaaaaacctccacgaatcgccgacactccaacccggaagagccaacgaggtgactccgcgccccggtcatgggtgacagccaatactccttctctcttaccactttcagcccgtcgggaaagcttgtgcagatagagcacgcgctcacggctgtcggatccgggcagacctccctagggatcaaagctgccaacggtgtagtgattgccaccgagaagaaactgccttctattttagtggatgaaacatctgtgcaaaagattcaggcactaacaccaaatattggagttgtctatagtgggatgggtccagattttcgtgttctggtgagaaaaagtcgaaagcaggcacagcagtattatcggttgtacaaggagcatatacctgtaacacagcttgtgcgggagactgctgctgtgatgcaggagttcacacagtcaggtggtgtaagaccatttggagtatcactgttgattgctgggtatgatgacaatggcccacagttgtatcaggttgatccctcaggatcatacttctcctggaaggcatcagccatgggaaaaaatgtgtcaaatgcaaagacatttcttgaaaagagatacacagaggatatggaacttgatgatgccatccacactgcaattttgactttgaaagaaggatatgaggggcaaatttcctccaacaacattgaaatcggaattattcgagctgaccgtgagttcaaagttctaagcccatcagagatcaaggatttcttggaagaggtggagtaagttgtctgttgatgatttactgtttcaaacaagaatagcagcatcacttatgagcagccagcctgaagcttgtcttggttttatcactctgtaaactgatttgctccagcgacatgtcttggttttatcactctgtaaactgatttgctccagcgacatgtggttcttacatttgaaaccctcctgaacgcatactgtagacaaatgagatacgtaagatggattttgtatttgacagtctctacagtttgtttatgtgattcacgttcttgtgtgctgta

SEQ ID NO: 119457 - DNA, 1211 bp, Zea Mays
ctcgcgtgctcgattcccatctccccctccctgcgcacacccgcacaccaccaacaccagacgccgccgcccctcatcgctgtcccgtcccgcgcgcggccgccgcatccgtccgggcctcctcgtctccccagccccgctgccgccgcagcaaaaacctccacgaatcgccgacactccaacccggaagagccaacgaggtgactccgcgccccggtcatgggtgacagccaatactccttctctcttaccactttcagcccgtcgggaaagcttgtgcagatagagcacgcgctcacggctgtcggatccgggcagacctccctagggatcaaagctgccaacggtgtagtgattgccactgagaagaaactgccttctattttggtggatgaaacatctgtgcaaaagattcaggcactaacaccaaatattggagttgtctatagtgggatgggtccagattttcgtgttctggtgagaaaaagtcgaaagcaggcacagcagtattatcggttgtacaaggagcatatacctgtaacacagcttgtgcgagagactgctgctgtgatgcaggagttcacacagtcaggtggtgtaagaccatttggagtatcgctgttgattgctgggtatgatgacaatggcccacagttgtatcaggttgatccctcaggatcatacttctcctggaaggcatcagccatgggaaaaaatgtgtcaaatgcaaagacatttcttgaaaagagatacacagaggatatggagcttgatgatgccatccacactgcaattttgactttgaaagaaggatatgaggggcaaatttcctccaacaacattgaaatcggaattattcgagctgaccgtgagttcaaagttctaagcccatcagagatcaaggatttcttggaagaggtggagtaagttgtctgttgatgatttactgtttcaaacaagaatagcagcatcacttatgagcagccagcctgaagcttgtcttggttttatcactctgtaaactgatttgctccagcgacatgtcttggttttatcactctgtaaactgatttgctccagcgacatgtggttcttacatttgaaaccctcctgagcgcatactgtagacaaatgagatacgtaagatggatgttgtatttgacagtctctgcagtttgtttatgtgattcacgttcttgtgtgctgtatcg

SEQ ID NO: 119458 - DNA, 1142 bp, Zea Mays
ctgcgattctccatctctttccctgctgcgtttcgtcgttctcttccccttcttttcctcagccacttcgctccctccctagcagcaaaaacctccacgaatcgccgacactccaacccggaagagccaacgaggtgactccgcgccccggtcatgggtgacagccaatactccttctctcttaccactttcagcccgtcgggaaagcttgtgcagatagagcacgcgctcacggctgtcggatccgggcagacctccctagggatcaaagctgccaacggtgtagtgattgccaccgagaagaaactgccttctattttagtggatgaaacatctgtgcaaaagattcaggcactaacaccaaatattggagttgtctatagtgggatgggtccagattttcgtgttctggtgagaaaaagtcgaaagcaggcacagcagtattatcggttgtacaaggagcatatacctgtaacacagcttgtgcgggagactgctgctgtgatgcaggagttcacacagtcaggtggtgtaagaccatttggagtatcactgttgattgctgggtatgatgacaatggcccacagttgtatcaggttgatccctcaggatcatacttctcctggaaggcatcagccatgggaaaaaatgtgtcaaatgcaaagacatttcttgaaaagagatacacagaggatatggaacttgatgatgccatccacactgcaattttgactttgaaagaaggatatgaggggcaaatttcctccaacaacattgaaatcggaattattcgagctgaccgtgagttcaaagttctaagcccatcagagatcaaggatttcttggaagaggtggagtaagttgtctgttgatgatttactgtttcaaacaagaatagcagcatcacttatgagcagccagcctgaagcttgtcttggttttatcactctgtaaactgatttgctccagcgacatgtcttggttttatcactctgtaaactgatttgctccagcgacatgtggttcttacatttgaaaccctcctgaacgcatactgtagacaaatgagatacgtaagatggattttgtatttgacagtctctacagtttgtttatgtgattcacgttcttgtgtgctgta

SEQ ID NO: 119459 - DNA, 1145 bp, Zea Mays
ctgcgattctccatctctttccctgctgcgtttcgtcgttctcttccccttcttttcctcagccacttcgctccctccctagcagcaaaaacctccacgaatcgccgacactccaacccggaagagccaacgaggtgactccgcgccccggtcatgggtgacagccaatactccttctctcttaccactttcagcccgtcgggaaagcttgtgcagatagagcacgcgctcacggctgtcggatccgggcagacctccctagggatcaaagctgccaacggtgtagtgattgccaccgagaagaaactgccttctattttagtggatgaaacatctgtgcaaaagattcaggcactaacaccaaatattggagttgtctatagtgggatgggtccagattttcgtgttctggtgagaaaaagtcgaaagcaggcacagcagtattatcggttgtacaaggagcatatacctgtaacacagcttgtgcgggagactgctgctgtgatgcaggagttcacacagtcaggtggtgtaagaccatttggagtatcactgttgattgctgggtatgatgacaatggcccacagttgtatcaggttgatccctcaggatcatacttctcctggaaggcatcagccatgggaaaaaatgtgtcaaatgcaaagacatttcttgaaaagagatacacagaggatatggaacttgatgatgccatccacactgcaattttgactttgaaagaaggatatgaggggcaaatttcctccaacaacattgaaatcggaattattcgagctgaccgtgagttcaaagttctaagcccatcagagatcaaggatttcttggaagaggtggagtaagttgtctgttgatgatttactgtttcaaacaagaatagcagcatcacttatgagcagccagcctgaagcttgtcttggttttatcactctgtaaactgatttgctccagcgacatgtcttggttttatcactctgtaaactgatttgctccagcgacatgtggttcttacatttgaaaccctcctgagcgcatactgtagacaaatgagatacgtaagatggatgttgtatttgacagtctctgcagtttgtttatgtgattcacgttcttgtgtgctgtatcg

SEQ ID NO: 119460 - DNA, 991 bp, Zea Mays
tttttaatttgtacattacctaaatgtattgtccctgtgtgcaatccagctattgattttcaattaattggtgatatttaagtggtcgagggttaaatattgtttatttgccaagcgagccaaccaacatcatacatagaatatgcactatatctataacatttagtagatatttccatttattgattgccgcacttgacgtcgtcgtgatggcttgaccagacagttaaactaatagagattactaggatatacaccatccagtcaaaaggattgtactagcctctattgtctggggcttttaaggtgattagtgaaagcctgagatacgtatatgttaatgagttttacttgtgatccttatttgtttcagtggtgtaagaccatttggagtatcactgttgattgctgggtatgatgacaatggcccacagttgtatcaggttgatccctcaggatcatacttctcctggaaggcatcagccatgggaaaaaatgtgtcaaatgcaaagacatttcttgaaaagagatacacagaggatatggaacttgatgatgccatccacactgcaattttgactttgaaagaaggatatgaggggcaaatttcctccaacaacattgaaatcggaattattcgagctgaccgtgagttcaaagttctaagcccatcagagatcaaggatttcttggaagaggtggagtaagttgtctgttgatgatttactgtttcaaacaagaatagcagcatcacttatgagcagccagcctgaagcttgtcttggttttatcactctgtaaactgatttgctccagcgacatgtcttggttttatcactctgtaaactgatttgctccagcgacatgtggttcttacatttgaaaccctcctgagcgcatactgtagacaaatgagatacgtaagatggatgttgtatttgacagtctctgcagtttgtttatgtgattcacgttcttgtgtgctgtatcg

SEQ ID NO: 119461 - DNA, 202 bp, Zea Mays
gaaatattttttcctcacataaaggattttttcacagcctcacaggaaaaccctaaaatctagtgtgtggaaaagacagactatcgactctctatcattatatattactaatacataacatgtgcatagaaaatggtggattcgttcgagagaccaaatcgttaatctcaactaccttccaataccatctaacaccaaaaaa

SEQ ID NO: 119462 - DNA, 99 bp, Zea Mays
cggggcatgcgccctatgtcgtgggtgtaatattcaaaagtgtaataaagaggatagagataatctcaatagtttgtggcctctactattcattacatg

SEQ ID NO: 119463 - DNA, 1561 bp, Zea Mays
aacaaaagaatgttagaacgggaaagagagaaggcactggaactctgaagcgtcgcagaacgctcctccctctaaggctccgacctccgtgcctcgcgcgccctcgcccttgccctcgccctcccccaccaacccaaaacccgatccgttgctcgctgctcagggtccactactgatccgctccacgcgagctcccttgtccccgcgtcacactcgcgcccaagcaagcggttgctgcaaaggaagcctcccctgatggctctcgtgacctcgggctcgggtgccgaccaggtgatcgccgaggtggcgatgaacggcggcgccgacccaagtgcaaccaccgtgcgtgctactgtcgtgcaggcgtccaccatcttccacgacacgcccgccactcttgataaagcagagagattgatagcagaggctgctgggtatggttcacagttagttgtctttccagaagcttttattggaggctatcctcgtggatccacatttggtttcgggatcagtattagtattattaatccaaaagacaagggaaaggaagcattccggaggtatcatgcatctgctatagatgtgcctggtccagaagttacacgcttggctgctatggctgcaaaatataaggttttcttggtcatgggggtgattgaaagggaaggttacaccctttattgttccgtgcttttctttgaccctcttggccgttacctgggtaagcaccggaagctcatgcctacagcattagagagaattatatggggatttggggatggatcgactattccagtttatgatactccacttggaaagattggggcgctcatttgctgggaaaataaaatgccacttttgaggacagcgctgtatggtaaaggtattgagatatactgtgcccccactgctgactccaggcctgtttggcaagcctccatgacacacattgctttggaggggggatgctttgtcttgtcagcaaaccaattctgccgcagaaaggactatcctcccccaccggagtatgagtttgctggtttaggtgaagagccatccgcggacactgttgtttgccctggaggcagcgttatcatttctccatctggagaagtcttggcaggtcccaactatgaaggagaggcactgattacagccgaccttgacctgggagagattgttcgagccaagtttgatttcgacgtggtgggccactattctcgacctgaagtccttagattggtagtgaacgaccaaccgcagctccctgtgtctttcacgtctgccgctgagaggactccagctgccaagagtgatatcgatactaagtcttactgattgactggtcatgaaactgtgttgcgccgaacacttggtgatggtcgctcagctcctctagtttgctgttgtgtctcgtggatgggagttgggagttgtagctttgaactaaaaaaaaaactcttgccttcccaacgtaaaaaaatggtggccgcagttatgttccttgtgaaagctgttcgcttggctttaatctaaaactgtttctactttttctaaa

SEQ ID NO: 119464 - DNA, 1591 bp, Zea Mays
agagaaggcactggaactctgaagcgtcgcagaacgctcctccctctaaggctccgacctccgtgcctcgcgcgccctcgcccttgccctcgccctcccccaccaacccaaaacccgatccgttgctcgctgctcagggtccactactgatccgctccacgcgagctcccttgtccccgcgtcacactcgcgcccaagcaagcggttgctgcaaaggaagcctcccctgatggctctcgtgacctcgggctcgggtgccgaccaggtgatcgccgaggtggcgatgaacggcggcgccgacccaagtgcaaccaccgtgcgtgctactgtcgtgcaggcgtccaccatcttccacgacacgcccgccactcttgataaagcagagagattgatagcagaggctgctgggtatggttcacagttagttgtctttccagaagcttttattggaggctatcctcgtggatccacatttggtttcgggatcagtattagtattattaatccaaaagacaagggaaaggaagcattccggaggtatcatgcatctgctatagatgtgcctggtccagaagttacacgcttggctgctatggctgcaaaatataaggttttcttggtcatgggggtgattgaaagggaaggttacaccctttattgttccgtgcttttctttgaccctcttggccgttacctgggtaagcaccggaagctcatgcctacagcattagagagaattatatggggatttggggatggatcgactattccagtttatgatactccacttggaaagattggggcgctcatttgctgggaaaataaaatgccacttttgaggacagcgctgtatggtaaaggtattgagatatactgtgcccccactgctgactccaggcctgtttggcaagcctccatgacacacattgctttggaggggggatgctttgtcttgtcagcaaaccaattctgccgcagaaaggactatcctcccccaccggagtatgagtttgctggtttaggtgaagagccatccgcggacactgttgtttgccctggaggcagcgttatcatttctccatctggagaagtcttggcaggtcccaactatgaaggagaggcactgattacagccgaccttgacctgggagagattgttcgagccaagtttgatttcgacgtggtgggccactattctcgacctgaagtccttagattggtagtgaacgaccaaccgcagctccctgtgtctttcacgtctgccgctgagaggactccagctgccaagagtgatatcgatactaagtcttactgattgactggtcatgaaactgtgttgcgccgaacacttggtgatggtcgctcagctcctctagtttgctgttgtgtctcgtggatgggagttgggagttgtagctttgaactaaaaaaaaaactcttgccttcccaacgtaaaaaaatggtggccgcagttatgttccttgtgaaagctttttaatccaaaacgaacaagcttaaggagataaaccctattacttccatttcaatttcgaatagtaccaaatgataatcgcccattttaggctgcctc

SEQ ID NO: 119465 - DNA, 1051 bp, Zea Mays
aatccattataaatctacctggggctggggtgtccctctcccccgtcacctcaaaaacctctccaaccccaccggtccaccaccgccagccacctctccctcgctctcactcaggtcccccgcaacacgacgagaggcagcaggaccggaaggcgccatggccaccacccgcgacgtctccgccgcctccgcggccgccatgttccacgtgtaccagcccatgccgatgccatccacggcggcggcccccgcgaaggcgggcaagaaggagggcggcaaggaccggcacagcaaggtgaacgggcgcgggcggcgcgtgcggatgccgatcgtgtgcgcggcgcgcgtgttccagctgacccgcgagctggggctcaagtcggacgggcagaccatcgagtggctgctccgccaggccgagccctccatcgtggccgccacgggctccggcaccaccccggccgtcttcgtctcctcctccgcgccgtccacgtcctcctcctcccactcccactaccagcagcagcagcagcagcagcaggccaccgtcgtcgtcctgggcaagcgcccgcgcgaggagggcggcgacgccgcggcggcgtccgtgccggcgttctgggcggcggcgccgcggacgacggcagcagcggacgccagctggggcttctcgccgctggaggcccagcaggcggcggcggggtacgtgcccatggcacaggcgcagcagcagcagcaccaccaccaccacctcaacctgctcgccgcgctctccggtgccgcgaggcgcgccgaggcggcggaggagacccgatgactgctagcctagtagctacatgcatccgccactcgcgcgcatgcattggtcctttgttgtccgtgtgctcgctcttggcagcgtaaacgttcttgatttttgtttgtgtgtgtgcccttgtgatcttggctcgttagctagagtaatccagacttgttttgacacacgggtgatgataatgcatgcgcaaggatcgatccatggcatctgagaaattaacgttcagatgtgcaatca

SEQ ID NO: 119466 - DNA, 111 bp, Zea Mays
ggaggctaaaaggatacatacattgattttttatgtaaatgaatattcaaataataatttaaagactgggttcaggaaagatgctctaatgagtactgactggacaattcc

SEQ ID NO: 119467 - DNA, 1675 bp, Zea Mays
ccatgagccccatgactgtgtctgtgtgaattgcctttggatcgtcctagcagccttgtcgtcgttagaggatttggaacccgttccattcgccgcctttctttttcttcgcccgtccaccctacgagcgcgcacgctctcctggctatagcaaccgccgtcgccgccccacgctacgtgctcgagtctagcctcgtcggttccttcgtcagttcttcgtcggatcctttgctggcgaccaacacccaccagcttgctgtttcccccttctttttgcttgcttcatcgaagtcctttccaggatgaattctaagcgtaggaggagtcatagcccagttgaatacaaagaaggtcgtgaaaaagattatgaggcttctggaaggaaggataaatcaagagatctagatgatacatttgatgctaaaagaggtcatgaatcgggcaggcactctgataggcattcctatggaacatcacgtgaatccaggaggcatgatgactataggaggtaccatgataagtccggtgatgattatggtaggagctatccaagagcctcttggtcagaccgggaatcaagggctgatacttattatgatcgctcaaagcatgatagcacatctggtagatcacgtggtgaccagcaagatgttggcagtaggtacggagaaaaatctgtcaatcgagatcagaggagtataaatgaagaaaagcaggagccccctcgtggctatcaaaagagtgatgttggagaatacaataaatgtactgatgcaagaaagcaagagtacagaggttatggagatgatagagatcattacagggttgttcataagaacaaggaaaccatcaaagaggaggtcctgaagaggagaaatggaaaagaagttgagaaagaagctttagtggaaactagggagaagaaaagaagtttattcagctctactggaccaaatgttgataatccaggggatgccaaaccatcagccacaactgaagccttcgataactcagcaggaaccgtagatggtgtgaatgcagctaaagttgcagctatgaaagctgctgaattagtgaataggaacattgcagcatttggtgctggaactgggcgcctatccactgatcagaagaaaaagcttctttggggtaacaaaaagggtaatccttcggaggagacaagtaaacgttgggacttgttttctgatcgtgagcgccaagagaaatttaacaaactcatgagtctgaggatgccttggtggctatggtatgtcgcagggtgtgaagagcagtgccccggttcaggaaaacatggtcgcgagcaaggccgcgagctcagcggaagaagccaagaaactggaggagctcgacaccaacctggagaagcattacatagcaggcctccgcaggaaagatggcaggacagtcggccttggcctctagaaactctgcttgcagatgatgcagcgttaaaaagttcagatagcttgctctgtacaatctacagtatcgtttttattcttgcacttacaaattttcctggctggtttatgttaactgtgttgccgggttatcttgaagctgtaaaacatctatgcctgattgactcctgtattgcgttggcataacccgtcatctggggtagtaatttgcaggctatttgctctttgcgccc

SEQ ID NO: 119468 - DNA, 1557 bp, Zea Mays
gcctttggatcgtcctagcagccttgtcgtcgttagaggatttggaacccgttccattcgccgcctttctttttcttcgcccgtccaccctacgagcgcgcacgctctcctggctatagcaaccgccgtcgccgccccacgctacgtgctcgagtctagcctcgtcggttccttcgtcagttcttcgtcggatcctttgctggcgaccaacacccaccaggatgaattctaagcgtaggaggagtcatagcccagttgaatacaaagaaggtcgtgaaaaagattatgaggcttctggaaggaaggataaatcaagagatctagatgatacatttgatgctaaaagaggtcatgaatcgggcaggcactctgataggcattcctatggaacatcacgtgaatccaggaggcatgatgactataggaggtaccatgataagtccggtgatgattatggtaggagctatccaagagcctcttggtcagaccgggaatcaagggctgatacttattatgatcgctcaaagcatgatagcacatctggtagatcacgtggtgaccagcaagatgttggcagtaggtacggagaaaaatctgtcaatcgagatcagaggagtataaatgaagaaaagcaggagccccctcgtggctatcaaaagagtgatgttggagaatacaataaatgtactgatgcaagaaagcaagagtacagaggttatggagatgatagagatcattacagggttgttcataagaacaaggaaaccatcaaagaggaggtcctgaagaggagaaatggaaaagaagttgagaaagaagctttagtggaaactagggagaagaaaagaagtttattcagctctactggaccaaatgttgataatccaggggatgccaaaccatcagccacaactgaagccttcgataactcagcaggaaccgtagatggtgtgaatgcagctaaagttgcagctatgaaagctgctgaattagtgaataggaacattgcagcatttggtgctggaactgggcgcctatccactgatcagaagaaaaagcttctttggggtaacaaaaagggtaatccttcggaggagacaagtaaacgttgggacttgttttctgatcgtgagcgccaagagaaatttaacaaactcatgggtgtgaagagcagtgccccggttcaggaaaacatggtcgcgagcaaggccgcgagctcagcggaagaagccaagaaactggaggagctcgacaccaacctggagaagcattacatagcaggcctccgcaggaaagatggcaggacagtcggccttggcctctagaaactctgcttgcagatgatgcagcgttaaaaagttcagatagcttgctctgtacaatctacagtatcgtttttattcttgcacttacaaattttcctggctggtttatgttaactgtgttgccgggttatcttgaagctgtaaaacatctatgcctgattgactcctgtattgcgttggcataacccgtcatctggggtagtaatttgcaggctatttgctctttgcgccc

SEQ ID NO: 119469 - DNA, 1156 bp, Zea Mays
aatctgacaatctccatcctcagatagaacagcctcccaagcgacagaacagcctcaggaggcacccccgcggttagtctcgaagcttccgttcggaaccagggttagggtttcgcgtcctcccgtcgtcatcctcagccatgtccgggcgcgaggtccgcgagtacaccaatctcagcgaccccaaagacaggaagtttggtaaagggaaggataagatcgacgatgaggacatcaccttccagcgcatggttgcaaagatgcaagaggttgctggtgataggggaggctaccttcacggacgaggagcattggacagcgatgatttgctttacctgaaagagcaaatggaagctgaagaagatgcagagcgccttcttcgtcatactgagaagcgggcatttgctgcttttaagaaagcagcaattttagctgattctacacctgctgtccctgtggctcttcgtgttgaacctaaacctaaaagtgatataaggcaacaagatcttttgaagaacattgttgggatcaaaccaaagcgaccaaaagttagcagcccttcacagccaccagatagcaataagcctaaacatacggaagaagaccctgtcggcgagttgtcgccatcacggaatccgttgggaccatctcatgggactgtgaatcctgaccacacagcgccaaggttagatgaaccaacagaggtgaagcaacagaacagagctggaagtttgcttggtttagcttatgagagttcggatgaagaatagttgatcatgcgattccaatgggaactggactatttcttgtcagatgtctgcattccaaacgacaggcctggtgtattgatgagagctctcactgagtcatcctcaggttacgggtttgaaacagcgtgggtttggaacagtcagtcaccaggtcatgccaggagtttgaaacattgtgggtttaaaacggccttccttcatatttgcagaggaaggctgcctcattttatcctctttagtatttagctgtgtaattggttttataattagattatatttaatattcataataaacattcaaacatccgatatatatagactaaattttagtgctggaaccaaacatcccctatattacagtacatcagtttgagggtttgaagaaa

SEQ ID NO: 119470 - DNA, 1193 bp, Zea Mays
aatctgacaatctccatcctcagatagaacagcctcccaagcgacagaacagcctcaggaggcacccccgcggttagtctcgaagcttccgttcggaaccagggttagggtttcgcgtcctcccgtcgtcatcctcagccatgtccgggcgcgaggtccgcgagtacaccaatctcagcgaccccaaagacaggaagtttggtaaagggaaggataagatcgacgatgaggacatcaccttccagcgcatggttgcaaagggattttggttctctactcggtggttgataccaacagatgcaagaggttgctggtgataggggaggctaccttcacggacgaggagcattggacagcgatgatttgctttacctgaaagagcaaatggaagctgaagaagatgcagagcgccttcttcgtcatactgagaagcgggcatttgctgcttttaagaaagcagcaattttagctgattctacacctgctgtccctgtggctcttcgtgttgaacctaaacctaaaagtgatataaggcaacaagatcttttgaagaacattgttgggatcaaaccaaagcgaccaaaagttagcagcccttcacagccaccagatagcaataagcctaaacatacggaagaagaccctgtcggcgagttgtcgccatcacggaatccgttgggaccatctcatgggactgtgaatcctgaccacacagcgccaaggttagatgaaccaacagaggtgaagcaacagaacagagctggaagtttgcttggtttagcttatgagagttcggatgaagaatagttgatcatgcgattccaatgggaactggactatttcttgtcagatgtctgcattccaaacgacaggcctggtgtattgatgagagctctcactgagtcatcctcaggttacgggtttgaaacagcgtgggtttggaacagtcagtcaccaggtcatgccaggagtttgaaacattgtgggtttaaaacggccttccttcatatttgcagaggaaggctgcctcattttatcctctttagtatttagctgtgtaattggttttataattagattatatttaatattcataataaacattcaaacatccgatatatatagactaaattttagtgctggaaccaaacatcccctatattacagtacatcagtttgagggtttgaagaaa

SEQ ID NO: 119471 - DNA, 822 bp, Zea Mays
atgtcttcgagcagctgtgtggcgtacgagccggggttttggtcgaagtcgcgcgaagcccgccgcgatcggcagcctggctgcgccgcaccgggcatttgggtcaggctctcggccacgacgctcagcgtgggcgtcgtggtcgtcttcgacgacgtcttggacgagtgcgctctcgtctctgacgcttctgtgatctccagcttttctttcaccgccgtcggctccttcccacgccccgtagccttcctgggcgtcgcggcgacggcagtctcagcagatttcttgtgcggcctggcaccgtggttgctgctgttacggagagcgttgtcgtcgagctcggccatggggcagcgcctgtacggggactgctcgttcttcctggacgagctccggctgagcaccggcgccggccccgccgccggtccgcaagctccagcattctcgttccccgtccccgctgccatcctcgcgggagagctcgacctcggagacgcgcaccgcttcccagacgcggccacgggcgacggcgcgcgccccttctccctggcgggcacggacaccatcttccccggctgctgcctggcgcggtccccgccgccggatcccgcagaggtagcagcgccatcagcgcgtctcccgggcgaccggctggccctccggctcccggcgccggcgccgctcctctcccggcttcccgaccgcttgcgctgcggcgagcctcggtgcggcgacggcctgctgctggacacgggcgccgcgcgcccctgcctctcccagtcgcactcctcgtccgcgccgccgtcctggtcgaagtcgtag

SEQ ID NO: 119472 - DNA, 527 bp, Zea Mays
tcggtatttcggaaacatcggaaacgaaagttcggtgcggaaaatacaccggtaacggtcgaaatctaaaatatgatcggtaaacatatcaaacttcacaataaaacaaaattgacaaaacatcacaaataccacaagttcacaattcatgatataacaagttcacaaggatcacaaatttataatataaaaagtttacaaagatcagaagttcacaatataacaagttcacagtataacaagttcataaagatcacaagttaacatattcaaagttcacaattcacaatatccactcgatttagttgacatgacatacttactcatgaaatattttttccttacataaaaggttttttcacagcctcacaggaaaatcctaaaatctagtgtgtggaaaagacagactgtcggctctctatcgttatatattactaatacataacatgtgcatagaaaatggtggattcgttcgagagaccaaatcgttaatctcaactgccttccaacaccatctaacccaaaaa

SEQ ID NO: 119473 - DNA, 1268 bp, Zea Mays
ggggattccttatggcgtttttaattatcaggagaagaaagcggtcagagggaaaggtccagataaaatgatggtccttactccttaaggttggactgcggggaggaggaggaggaggagaaagggaggccacggcggtccctactgccgggacttccggcgtgctgggcacgtagtccatgctggtcgcctcactggcgaagcgagactggaggaagaggccgtgggcgttgtccatgtcgtagtcccacacggagctgccagggccccaggcgctgaaccacgcctcgtcggccggaccccacacgccgcccgaaggctgaaacatggccgtggtgccgtcgccttggtgatcggccgactggagctcaggattcggtttgggttccgagttgtctgcccgctctgtttccgtttccgggagcagaggcttcgcttcgccgctgcacggctgctcaccgtcacgcacacgctgctgctgctgagcagcttgcttcatgtggctgtcgtccggcgtcggcggagcagacgaggagcacgaggccgccgcgctggtgcgtccgctcccgccgacgcggcccttgccgaggaacaggtcggggaagttgagcctggcgttgtcgccgcggagcttgaatgcctcgcggtcgtacgccatggccgcgtcctcggccgtgtcgaaggtgccgagccacaggcgcgtgcggttccgcgggaggcggatctccgccacccacttcccccagtggcgctgccgcacgccgcggtagagcttgggcggccccgacgacgcgcgcagcagcagctgctggtacagccgcgccggcggcagtggcacggccccgccgcggaacccgcgggggctcaggttcagcgcctcgctccagtagcgcagcagcatttgctgctgcacctccggcgccacgagctgcggcgggaacagaggagtcgccgccgccgccgccacgaactcttggcgcggctgctggctgcttccgaacgagatcatctgctggagctgctgctgatccggcggcggcggcgtcatagggcgctggaactcgctggagtactgcagtagcggcaggagccgtggcgatccggctgtcgacgcctccggagcaagaaatatttgtcgggccgatggcagcggcgtggggttgaaagcagaggacgagtcaggggaaggaggagccggcgagagcgaggacagggagcggttgaggcggcggtccgggctgcggatcttcttcaggggccggagcaat

SEQ ID NO: 119474 - DNA, 120 bp, Zea Mays
atggaggagaggagtccatgggaggagaaacagcaacctgctcccaggcgtgacttcaacgaggaccgagcgcaggggcacgacagggctgagggcgatctcgacgagcaccaagggtga

SEQ ID NO: 119475 - DNA, 3105 bp, Zea Mays
cccagcaccagctgtgtattagcggccgggcggacaagaagcagttaccgcgacaacggacgacggcgacgcgagcagtcgagtaaagacgcggtggggcggcgctgcgctgggcgggtggtgagatcagaggaaggaacgggatcgctcccggttaggttgtcgtcgtgcgcgggtgctggggcgagggcgtggcggatctcatctaacgccgccacttgctgctaccacttccccttcccccgcacctctgagctctgacctcccgcccttctcccacccatcaccatctttgtccctcgcgcaattcgccgaacacaccgcgcgcgccgcgcctccctgcgacggctgcctccacggccaatgctggcggcgcgatgaacgtggatgaggaggtggagagcggggaggaagaggaggaggacctgttctacgagtcgctcgatcgcatcctctcctcctcgggctcctccacatctgcctcggacgacgacggcgccgacagcccgcgccgccgccgcggttgcgatgcgccggtcgcggccgccgcagcggccctcgacctgtggacctctcagccgtcgcccgtccaggagcggcgccgccggctgctccagctgatggggctcataggggatccttccctcgccgggtttgagactggccggtccgcctccgaagatgccgcgggcccgcccccagcctctcccgtctctcggtccagatcaggcggggccgccctcggctccgccgggaagccaccactcgggggcgtccgtctgcggtcatccttgtccgacgggcccgatcctgccgacgaggaccccaggtgcttgatcaggaaccttgacgacggcagagagtacgtggtgaaggaagaattcggtctccgcgaggtcggcacggggcgccaccttaccgttgaggagttggcccgctcacctattgttcaggagcttatgcggcgccaagcttttagtactcccaactccaactgcaactcaaattcccaaagtggcgcctccacaccgatcgaaaggtcgagctcaggttccagcaatggtgggtcgcgctccaagcggcgaagcagctggctccgcagcatccgctgcgcagctgggtccttggtcacccactcccgtgaccgcagcagcagcgacgagaaggacacgtcttcagagaaaggcgggcaccactccagctccgctacggatgacagccaggacagtgttccacgccatggcccggcccgtgtcaaggtgcggcagtatgggaagtcatataaggaactcagtggcctgtttatgacacaggagatacatgcacacaatggttccatctggagcatcaaatttagtcctgatggtcgttaccttgccagtgccggggaggattgcataattcatgtttgggaggtgttggagttcaagagggcagggaaggagagggaggtgaaggagaatggggtatgcaatccgcttgttgctatggtatacagtgagtcatcagagacgatggtggcatctggtgctccaagcgggagccattgggagaagaagctgcgatcaaaggtactgcaaggtgggggatcagtgagctcagacaggttgatggtgcctgagtatgtgtttgcactgtccgagaagcctgtgataacctttgcagggcattcagaggatgtgctggatctcagctggtccaaatctcagtatttgctttcatcatcaatggataaaacagtacggttgtggcacatgtcaagcacttattgtttgaaaaccttctcacacactgactatgtgacttgcatacagttcaatcctgttgatgatagatacttcattagtggttccctggatgaaaaggttcgtatctggagtattccaaagcgtgaaattgttgattgggttgatcttcatgaaatggttactgctgcctgctatactccagatggaaagggcgcgctgatcgggtcccacaagggcagttgccatttgtatgatacatctgatgacatgctttgctacaaaacacagattgacctgcaaaacaagagaagaaaatctagccagaagaaaataacaggatttcagtttgtcccaggggattcttcaatggtcataatcacatctgcagattcacgaatcagagttcttgatgattttgagctagttcataggtttaaaggattccggaacaccagcagccaaatctcagcttgtttagctggaaacggacggtatattatctcggcaagcgaggattcccgtgtatatatctggaggaacgatgatggttcgaaaccaagtaaaaagaagggcattgtttctgtcacaaatacccatgaacacttccactgcgagagtgtcacggttgctgttacctggccttttaccagcaccacaatgacttctttaatgaaccccaggaaacaagagcttgagcttgggtctgagaatggctattcaccgcaagatctgcaaaccaaacttgctaaggcacaggagatgacagatgttgagtaccggagcacaaatatcacaagttacaactcgaagcataacagtgaccggacatctccggcttggcctgaagaacttgtcacaccaccaaatcaaagtctcagcgctactacctgccatgccaacgagggagaccaagctctgaatcggtcggcctggggcctagtaattgttacagcaggccgtggaggtcaaatcagaacatttcaaaacttcggttttcctgtaagagtatagcatgagtccgaatacataagatagtcactgccattcaggagtgcagtttgtgtatagataggagatagtgggtgagtttcacactattcagggattgggtttgactgttccttggtgcacctgctagagatcagaatcttcatctaacatacactgtcagtagtccaaaacttgtgtatgccaaatttattttaccctgaaggcccaagttgtacatgaaagagaaagccctacagagagcaacactatcagctgactggagataattcatctgtcagcttcaaccctacctttcggttttagacttctattccgaaccatgacatgttcttgtaagaaaagaaaa

SEQ ID NO: 119476 - DNA, 132 bp, Zea Mays
atggctgtccgaggcgagcgcgcccgcagcctgggcgggctgggaaacaaccagggcgcgcgagattcggtggagaagcaggacagatgccgcggccagggaagctccacggcgggctggaacagagactga

SEQ ID NO: 119477 - DNA, 115 bp, Zea Mays
ctgtgcggggtctggggaagggtatctttaagcgccaagccttacccgcataatatgcagaggctggggctcgaacccgggaccttccggttacagacagtaggctctaccgctg

SEQ ID NO: 119478 - DNA, 3491 bp, Zea Mays
ggatctgcttgtttttttgctggatctggagagaatgttcaagtcgatggtttattacgtgaacacctcaatcggagaggtggaggtgtggcccaagggcgaggcgagcgcgggcctgaccatggcggcgtgggcgcgagaaatccgcgttgaacgcatttccccgcccagcgagcggtgccctccgctggccgtcatgcacaccgtggccgtcggcgcccgatgcctcgtcatggagtccaggccgcccgttgtcgccgacgttgtgccgcctctcgtcgtcatgcacaccgcttgcctcagggagaacaagactgcggttgttccacttggagatgaagagttgcatttagttgcgatgacatccagaagaaacttgacaaatcatgcatgtttctggggctataaattgccatttggtttgtataattcttgcttgaccatgttaaatcttcggtgcctgggtattgtatttgaccttgatgagacattgattgtcgccaatacatcacggtcttttgaggacagaattgacgcacttcaaagaaagctgagtaatgagactgatccacaacgtaggaatggtatgctatcagagatcaagaggtaccaggatgataagtccatcctaaagcaatatatagaaggtgatcaggtctatgatgatggaaaagtgtataaagcacaacctgagattgttccaccattgtctgataaccagcaaccaatgacacgtccagttataagattacaagataaaaacattatcctgacaagaataaatcctctgattagggataccagtgtgcttgtatgtttaaggccagcctgggaggatcttcgcagctacttaattgccagaggtcgcaagcgttttgaggtctatgtgtgtacgatggctgaaagagactatgctttagaaatgtggagattgcttgatccagattcaagattgattaattctgttcaactccatgatcggatggtgtgtgtaaaatctggtttaaaaaagtccttgctaaatgtcttccatgatggttcttgccatcctggtatggcattagtaattgatgatcgcctgaaagtttgggatgagaaggatcaattacgagttcatgtggttcctgcatttactccatattatgctcctcaggcggaggcaaattgttctatcccagttctgtgtgtagccagaaacgttgcatgcaatgttaggggtggtttcttcaaagactttgatgaaggcctcttaccaaggattagcaatgttcactatgaggatgaagtaaatgagatatctgcgccagatgttggcaattatttgataacagatgatgaaaatgtcgcattagtgaatgggaatagagattcattgccttttgatggtatggcagatgcagaggttgagcggagaatgaaggaagccaatgctcaatcattccatcaaacagcgggagactttgtcatgccagtagcccctgcccagaatttcgtttcgacttcagttgcatcattagccccacctcttggcatgatgccatctccatttagccagccagttgctccaccaggtttttcagattcactgcaaggttctccagctagagaagagggtgaagttccagagtctgagttggatccggacacaaggagaaggcttcttatattacagcatggccaagacacaagagatcctacatctccactaccagcaataccacccgtccaagttccagttcctccagtgcaaccccatgggaattggtttcccacagaggatgggataaaccaaagtaacctgaatagaggctcagcaggattcactgtagaatctgattctattgtctatgagaaaaagcaaccacctcatccttcattctttcatggtggggatagtcctatgccgtctgatagatttggctatcagaaccagaggtttccctctcagctaccacacgaggatcaccccatgatgcagaaccatgcacctccaaaatacagatccttttctggtgaggaactagcatcttggcatgttccctcaagccagagaaacaaccagatagaatcaggaagacactttgcacaatatgctgggacctctgctggcatattagaggggattgctctgaaatgtggttctaaggtggagtacaagtcagcattatgtgatactgcagaactacaattctctattgaggtttggattgttggggaaaaggtcggtgaaggaattggtaggacaaggagagaagcacaacgccaagctgcagaaatgtctttaagaaacttggccaataaatacttgtcatctgatccaaataagttgtctgatatgaaagaaaatgatttcagtagcaacagaaatgtctttggttactctggaaatacgagggatgatatgttgccactttcaagtacttccgaggaatctcgctttatgaaaatggagaacaataattcccggaaaacaggaagttctgttgctgctctcaaagaactttgcactgttgagggatataacttagtttttcaagcctgtccatcttcagcagatggtttagttgggaaagaatcttatgctcaggtacaagttggtggacaaattctaggcaaaggagttgggttaacatgggaagaggccaagctccaggctgctgctgaggctcttggaactttaagatccatgctaggtcaacttggtcataaacgatctggctctccaaggtcattggcaccaaattttaacaagcggttcaagccagattttccaaggaccgtacaaagagttccttacggaacatattctaggatcgaaggtcatgttccttaagaggtctgcataaatgatgtgcctgggcgctaaacttcaaaactggatgaagctttgaactgtcaggtcttcacacattgaatgcaagccgtagattcctggcttatagttggcttccaaggctctcacaagctgccactggctgagagtaccgacgaatataaaatacgtacttcatttaagtaagcgccaagagattgaaggattaatggtggccataactttatgcagaatttcattgccatgatcttaccagtcacaagtgttaccccatgttgtcaacttggcataatcgttgacctggaagtttaacggttgaaccagggaccggcatgcagctccatttcttttttggtgtgtgtccatggatcaaagagcagcgccgtggttgggcatttttacccttcctttggtttaggtgaaagttggacctctgtagctcggagtcttagcaggtagccagtttttatttctgataagtttttaggcaagttgtaagttgtagcacaaaatcgatcacttgatagtattaacattgcattgatgtagacatgtagtcatctttgtagctgtactctaggcaagcaacacgaatccagtggcttacatcattcatttgtatgctgtagtcatcttgtaatatatggcccatttcttt

SEQ ID NO: 119479 - DNA, 1425 bp, Zea Mays
gcgggggcggagtgtgctgtggagcggcccgcgtgcggcgagggtcgtccctacaagccgtctgacagttcataagaggtacccttttgggaaggtcctcaccatggatctatcccaggcactgacctcatccagtgatgatgaaaccagggcacttggtacattgcttgatatgttcagcagttccttttcacttgatgatatagctgatgcatatatcaaagcaaatggcgatgttaacaaagctggagatttcttatacgaccttcaacattcattgcctcataccaaagatgttgagtcaagtgtcgaggctaacctttcccatactgacaaggcagttgaagaaaactgtatggacaattcaagccaaccaagaactcttctccgtactgagcaggcagttgaagaaaatcatttcgagaattcagatcacacaaaaatgcctgaaaatctgcataagtctagtgctgcatttggtactgtctccagcatgttaagaaaagagtctatcagggctacaacaacagcgagtagagcatcaaaaaaaggcaaacctcttagggttgaactgccagagtacatgcgggatgattttaaggtgacatctgatgaatctgactctgcaccgaggagagagactttgaataacagggatgttgaggagtttctgttttgcatgcttggtgaaggatttaagctcagtaaagaattgatccatgaagttctaggcagctgtggatatgatattaagaaggctgctgatgctttcagggagggtaaccagaaagaagtcgattatcttatacaggaaggcaagcgctattatcagatggctcgactcgctgatgagaaatctgctagggagattatcaagcccagggaaacagagtcaaaaaatgaattttgtcttgatctgcgcaaacaagatgcaggaaatgtatctaatctcttgagactccatcttaaacagttggcaaacattccatcttttgattacctgagagttattattggtattgacgacagcagtttcaagatgggacaaagaagaagaaaggtgatgaagtatgtggaaaagaattcactccagtggactgaagaagaacctcgctctgggaacatcctcatccggattaatcaggtggaaaatcggcagggataggttcatgtatacaaaggtggcgtgacacaaggtgacagaagatggatcgtagatcttaataagtgccgttttgaatcaaggtgatgttctttcggcacagggagtcatgtaattgctgcattgctgacgtaatgtaaccagcaatgcagcaattaactcgaaacgtctgcaatgtatgcacaaaaagaataccattcatggcaacttgaacatgtggacaatggtttctgatatctcaagggtcctttgcagtttcgaaa

SEQ ID NO: 119480 - DNA, 272 bp, Zea Mays
gacaattttatcgaaaccaaacaggccaaaggccagtttggcgggcctcagaatggtgtcaacaagctcctgtaaaattttcagattttttggacacccgagcgaaaagttatgtctggtttaaggaatgtacctcaagttatgtttttggaggcacgactagaaagcggcggttagggaaaaatattcctatctgcagtcacagcagttagggcaagtcgattaatggggtggatcgacttgtgatctgggtaatggtggatgggatagcg

SEQ ID NO: 119481 - DNA, 406 bp, Zea Mays
ggtggacttccggatcgtacttagagatttgcccaaacttccggtgaaggcacctgatttttgctttgggaaagaagggatgtagcagcacggccaccacacttttaaataaaggaaccactgcttaataatgatgttaaacagggagggtcaagtctaggagattattacattctaatctttcatggtagttcaactgtttagtttggtgggctgagttgtctatcttttgtctggtcatgaatgttcatttctaccgttgtatttcaattatactatgtcaattatctttcttttatatcctgtataaactctatgtttcccttgttatgctactttcaagggaggtgctgccgttttttgcaatactttatttctctatgtgttgcataagttttgtaggaag

SEQ ID NO: 119482 - DNA, 551 bp, Zea Mays
ggagcgcctcctaactctcgccacttgtagctagctaccttgcgcttgcatagctgctcccggccggtggagtcggagaagctagcggccagccatgagacacgctccatcgtcgccggccatgctcctgttgttgctcctggccactttcacctacatcagctgcagagctccgaagcccgatgcggcgaccgccgcccgatgtcggcggcgacatgggcgcaagggcggtgcagggcgagtccaagaggctggttccccagggccccaacccactgcacaactagcctgaagccagctctgggctggggacacaggcactgctacaaccccacgtacgtgctctgtcgcgctgtctgcaattcgtgttttaatttcttcggcatttcggccttgctgttgtaactatagtagttagcgattaacaaaaatatagaagtcataatgacacaagactgttgtactgaactactgacgccatgtaatgtcgagtagcacaaagattgtgaagtcatgcccaatcggtcaatccatgcttcgatcaattcgtt

SEQ ID NO: 119483 - DNA, 1389 bp, Zea Mays
acaagcaccaagaccgccggcgctataaaacgtgcaccggatcatccgatctttatctcactgccaaactctcctctccacccacacacacgcgtaaccttctacaccaccttgctcaagaataatcagctttcagctgcactgacatggaaggagacacaggcagccgatctgagaaagaggtcgctgtggtcacaggaggcaacaggggaattgggctagagatatgcaggcaactggcttccagtggagtcaccgtagtgttgacagcaagggacgcggagaggggcgcggaggcagccagcacgcttgggctacccaacgtcgtcttccatcagctggatgtcggcgatccgtcgagcgctgcacgcttagctggttttatcgaggagaagtttggcaggctggatatattggtcaacaatgcagcaattactggaacgacaagtaacgtcgacgatccagaagcttttcgtcaagagctcgcaggcatggatctcatgcagaggatcgaagcaatcaacaagcacaacacagaaccgtacgagcaagcacagaagtgcttgcggacgaactaccacgggaccaaagctgtcacaaaagcgctgctccctcttctgcagtcctcgtcccatggaaggatcgttaacctgtcatcctcctatggactactcaggtttttcagcggagacgaactgaaagaggagctcagcagcatcgatggcctgtccgaacagaggctggacgagctgtcagagctgtttctcaaggacttcaaggatgggcagctggaggctcgagagggtggcccaatgaaggagggttcgtcacgtacaaggcgtccaaggcgctcgcgaacgcctattcccggatccttgcgaaggagcacccgtcgctgtgcgtcaactgtgtgcatcctggctacgtccagacggacatgaacttccggtctgggcatctgacggtcgaggagggcgcgcggggagctctcatgctggccatggcgcccaagggaggcgtcactggcgcgttcttggaccacactgaggtcgcgtccttcgtgtaatatatatgctcgcaccttgcaaccataaatataactcagatttgccttctctattatttctgtatttttagaaaccaacacccatatattgtaccatgtaatttgtatgcgattgaagtgttctacctttgtatccttcgtttttcagtgttttaaatcgccggctaataaggcatttaaaacttcacgagttggaaaaccaatgcactaggagtgaagcaaacatgttaacacacatatattcacactaggaatatgaccgtgactagctacgaaatcaatataataaaatatatttatatgcaaaaaacataaaatagtag

SEQ ID NO: 119484 - DNA, 856 bp, Zea Mays
gaaaacggacgtagtactattttattactagaacaaaatagaagtctagtctagcagtaaaaagatacaaatgcattttctcgtgtggaaacagctcgcaggcatggatctcatgcagaggatcgaagcaatcaacaagcacaacacagaaccgtacgagcaagcacagaagtgcttgcggacgaactaccacgggaccaaagctgtcacaaaagcgctgctccctcttctgcagtcctcgtcccatggaaggatcgttaacctgtcatcctcctatggactactcaggtttttcagcggagacgaactgaaagaggagctcagcagcatcgatggcctgtccgaacagaggctggacgagctgtcagagctgtttctcaaggacttcaaggatgggcagctggaggctcgagagggtggcccaatgaaggagggttcgtcacgtacaaggcgtccaaggcgctcgcgaacgcctattcccggatccttgcgaaggagcacccgtcgctgtgcgtcaactgtgtgcatcctggctacgtccagacggacatgaacttccggtctgggcatctgacggtcgaggagggcgcgcggggagctctcatgctggccatggcgcccaagggaggcgtcactggcgcgttcttggaccacactgaggtcgcgtccttcgtgtaatatatatgctcgcaccttgcaaccataaatataactcagatttgccttctctattatttctgtatttttagaaaccaacacccatatattgtaccatgtaatttgtatgcgattgaagtgttctacctttgtatccttcgtttttcagtgttttaaatcgccggctaataaggcattt

SEQ ID NO: 119485 - DNA, 1415 bp, Zea Mays
ctcagtgtcgccactctcctctccacacacacacatacacacacgtaacctagcttctacacggatcgggatcccctgcagtactgcatgggccactgccgcgtgggctccgcgtgcgacagggcccacgcgcagtgacccaacggcacggtgcagtacgtcagaggatccgtgtcccttctacaccaccttgcgcaagaattttagctttcagctgcattagcatggaaggagacaaaggcaaccgatatgggaaacaggtcgccgtggtcacaggaggcaacagggggatcgggctagaaatatgcaggcaactggcttccagtggagtcaccgtagtgttgacagcaagggacgcggagcggggcgcgggagcagccagcacgcttgggcaacaacccaacgtcgtcttccatcagctggatgtcggcgatccgtccagcgccgcacgcttagctggttttatcgaggagaagtttggcaggctggatatattaattgatcaacaatgcaggaattactggaacggcaagtaacgtcgacgatccagaagcttttcgtctggagctcgcgggcatggatctcatgcagaggatcgaagcaatcaacaggcacagcacggaaccgtacgagcaagcagagaagtgcctcaacaccaactaccacgggatcaaggctgtcacaaaagcgctgctcccgcttctacagtcctcgtcccatggaaggatcgttaacctgtcgtcctactatggactactcaggtttttcagcggagacgaactgaaagaggagctcagcagcatcgacggcctgtccaaacagaggctggacgagctgtcagagctgtttctcaaggacttcaaggatgggcagctggaggctcaagggtggccgaatgaaggagggttcgccgcgtacaaggcgtccaaggcgctcgcgaacgcctattcccggatccttgcgaaggagcacccgtcgctgcgcatcaactgtgtgcatcccggctatgtccagacggacatgaacttcgggtctgggcatctgacggtcgaggagggcgcgcgggccgggagctctcatgctggccatggagcccaagggaggcgtcactggcgcgtttttcgaccacaccgtggttgcgtccttcgtgtaatatgctcgcccttgcactcgcaccgttagctatcgcagtaataaaattccacagaaccaaaggaggatacactattaggtcctgaatcagatctgttctatcccctcccctgggaaaatatcctctcgctgtcgctgggtagatggccgtccaatttcattttggttgccgatgagtgttctcattcgcagcgaattagtctatcttgtatgattcatctgttatgaatataaaagaaataagaatcctcgtatcaaaaaac

SEQ ID NO: 119486 - DNA, 1521 bp, Zea Mays
cgccactctcctctccacacacacacatacacacacgtaacctagcttctacacggatcgggatcccctgcagtactgcatgggccactgccgcgtgggctccgcgtgcgacagggcccacgcgcagtgacccaacggcacggtgcagtacgtcagaggatccgtgtcccttctacaccaccttgcgcaagaattttagctttcagctgcattagcatggaaggagacaaaggcaaccgatatgggaaacaggtcgccgtggtcacaggaggcaacagggggatcgggctagaaatatgcaggcaactggcttccagtggagtcaccgtagtgttgacagcaagggacgcggagcggggcgcgggagcagccagcacgcttgggcaacaacccaacgtcgtcttccatcagctggatgtcggcgatccgtccagcgccgcacgcttagctggttttatcgaggagaagtttggcaggctggatatattaattgatcaacaatgcaggaattactggaacggcaagtaacgtcgacgatccagaagcttttcgtctggaggttggttaaccagtaactactactcggaatgcaagggtttggcttgaagggagcaatatcattttattattagaaaaaaaatgtctagtagtctagtctagcagtaaaagagatacagatatatttttctcgtgtggaaacagctcgcgggcatggatctcatgcagaggatcgaagcaatcaacaggcacagcacggaaccgtacgagcaagcagagaagtgcctcaacaccaactaccacgggatcaaggctgtcacaaaagcgctgctcccgcttctacagtcctcgtcccatggaaggatcgttaacctgtcgtcctactatggactactcaggtttttcagcggagacgaactgaaagaggagctcagcagcatcgacggcctgtccaaacagaggctggacgagctgtcagagctgtttctcaaggacttcaaggatgggcagctggaggctcaagggtggccgaatgaaggagggttcgccgcgtacaaggcgtccaaggcgctcgcgaacgcctattcccggatccttgcgaaggagcacccgtcgctgcgcatcaactgtgtgcatcccggctatgtccagacggacatgaacttcgggtctgggcatctgacggtcgaggagggcgcgcgggccgggagctctcatgctggccatggagcccaagggaggcgtcactggcgcgtttttcgaccacaccgtggttgcgtccttcgtgtaatatgctcgcccttgcactcgcaccgttagctatcgcagtaataaaattccacagaaccaaaggaggatacactattaggtcctgaatcagatctgttctatcccctcccctgggaaaatatcctctcgctgtcgctgggtagatggccgtccaatttcattttggttgccgatgagtgttctcattcgcagcgaattagtctatcttgtatgattcatctgttatgaatataa

SEQ ID NO: 119487 - DNA, 106 bp, Zea Mays
gatctggtgcttggtatagattttgcaaccactgaagaattttgtttattggcatgtctgtttggaaatgcccgaatcttgtaaaagctgatgcattactgaatta

SEQ ID NO: 119488 - DNA, 682 bp, Zea Mays
ttctattgtaactaggctatgcgttgtccattcagagtggtacactaaatgactttttttgttcctcttccgcctcttcctaatctttaggtctcagatgtgattgttgaaaaagttgcagatcacgctcttgtatggatcaataggctgctggctattgatcatgacattgccatcaagagagataggaaagtttctacaaaggtctgtctttatctgagattcttagtttctcagactattgtatatctatttctaattatgtgtgctcttccttatccctgttctccttgatgcaaaaggggatattgattttgtgggtggtttcattcattggaatgctcttcaacttccttacgctcatttacattggtgtaatgctctctctgttggttccaccactctatgagaagtaccaggatgagattgatcagaaggttggtgtagcccacagtgtactatcgaggcacatagataccatcattaccaggactcggcaatcaaccaagtagaagaagactgagtaaaagaaatcttttggttgtattgttgtgagttttattatgactagatgtgaaagtgaaatctattacttgatagtatggggcaaattaagtttcattgaatatgctctttattttttatttggaaacaaattttaccgtgaaattaagaaataaaa

SEQ ID NO: 119489 - DNA, 1147 bp, Zea Mays
atcgccggcgctataaaatgtgcaccggatcatccgatctttatctcactgccaaactctcctctccacccacacacacgcgtaaccttctacaccacctagcttgcgcaaggatcagctttcagctgcattgacatggaaggagacacaggcaaccgatctgagaaagaggtcgctgtggtcacaggaggcaacagggggatcgggctagagatatgcaggcaactggcttccggtggagtcaccgtagtgttgacagcaagggacgcggagaggggcgcggaggcagccagcaagcttgggctacccaacgtcgtcttccatcagctggatgtcggcgatccgtcgagcgctgcacgcttagctggttttatcgaggagaagtttggcaggctggatatattggtcaacaatgcaggaattactggaacgacaagtaacgtcgacgatccagaagcttttcggcaagagctcgcgggcatggatctcatgcagaggatcgaagcaatcaacaggcacagcacggaatcgtacgagcaagcagagaagtgcctgaggaccaactaccacgggatcaaggctgtcacaaaagcgctgctccctcttctgcagtcctcgtcccatggacggattgttaacctgtcatcctactatggactactcaggtttttcagcggagacgaactgaaagaggagctcagcaacatcgacggcctgtccgaacagaggctggacgagctgtcagagctgtttctcaaggacttcaaggatgggcagctggaggctcgagggtggccgaatgaaggagggttcgccgcgtacaaggcgtccaaggcgctcgcgaacgcctattgccggatccttgcgaaggagcacccgtcgctgtgcatcaactgtgtgcatccgggctatgtccagacggacatgaacttcgggtctgggcatctgacggtcgaggagggcgcgcggggagctctcatgctggccatggcgcccaagggaggcgtcactggcgcgttcatggaccacaccgaggtcgcgtccttcgtgtaatatgctcgcactcgtaccgttagctatcggctatcgcagtaataaaattccacagaaccaaaggaggatacactattaggtcctgaatcagata

SEQ ID NO: 119490 - DNA, 1328 bp, Zea Mays
atgtgttccctggccgcaattcgtgggatgtcccacccgcaccgggcgctggccgagcaccacaacgccaggtccagggcctccaccaccaccacatcgtcctcttcctcctccgcccgccgcgacgacgaccccgacccgccaccgaggtcgctcagggacccgccctacacgctgggccccaagatcttcgactgggacgagcagcgcgccgcctggcaccgccgccactcggagacgccgcccttcctcaacgacatcaagccacgggtgctgctcgtcacggggtcctcacccaagccctgcgagaaccccgtcggggaccactacctcctcaagtccatcaagaacaagatggactactgtcgtgtccatggcatcgaggtcttctacaacatggcgctgctcgacgccgagatggcaggcttctgggccaagctcccgctcatgcgggcgctgctcctcgcgcacccggaggtcgagttcctctggtggatggactctgatgccatgttcaccgacatggcatttgagctcccgttgggagcgctttcttgctgcgcaactggccagtggtcgcttgacatgctggatacctgggcgccaatggggccaaagggccctgtccgcattgaagccggcaaggtgctgaccaagtccttgaaggatcggccagtattcggggccgacaatcagtcggccatggtgtacatcctcgcgacgcagcgcgagaaatggggtgataaggtttaccttgagaatgggtactacctccatggctactgggggatcttggtcgacaggtacgaggagatgcttgagaattacaagccagggctcggcgatcaccggtggccactcgtcacacactttgtcgggtgcaagccgtgtggcaaatttggagactaccctgtcaagcgatgcctcaagaatatggaccgtgcattcaattttggggataaccagatcttgcagatgtatgggctcacacacaagtcactagcaagcaggagagtgaagaggatcaggaacgagaccagcaacccacttgagacaaaggatgagcttgggttgcttcatccagcattcaaggctgtgaagacttccacatgataattagagtacaattcaacttgttattttcttggttcgttctagatcctgttgggtctaaatccaaagtgttctttttgtagaatcgggtgacaacagaagtttgggttggggttatgggatggatatctttgttgtaatgtgaggtgttaggagaattatgttatgtttatttattggcataagttatgtcttacgctcgtagaaacgagtta

SEQ ID NO: 119491 - DNA, 1136 bp, Zea Mays
gttgagaccgcagagcgctcgccgaagcccctcatgtcctgtagctagctgatctccctccgaaactctctgctcgcccgcggcctgctggaagcttggcgcggtcccggcggcggcattctccggcaatggggtgcaaggcgtgcgacaagcccaagcccagctaccgcaagggcctgtggtcgccggaggaggaccagaagctccgcgactacatcctcctccacggccacggctgctggagcgcgctccccgccaaagccgggctccagcggaacggcaagagctgcaggctgcggtggatcaactacctccggccgggcctgaagcacggcaccttctccccggaggaggaggagacggtgatgagcctccacgccacgctcggcaacaagtggtctaggatcgccaaacacctgcctggcaggaccgacaacgaggtcaagaaccactggaactcgtacctcaagaagagggtcgagggacccagcacgccgccgtccaactcagacgactcgcattgcgccaagcccggccggggcggaagcacggcgcgggagacgggagacgaccgcccggcggactactccggctcgtcggagctgcgcgagccgtcgtcgtcgtcgtcgcccgacacgagctgcctgacgggcccgcccaaggtcatgttcgtggactggctcgacatggactgcatgggtggtggtggtggcccgccgggcgcggcggcagcggcagcggcacctggtctgggcgctgctgcgggcgtgaccagcacgggcgatgatcaggtgacgatggatgggtcggcgtccggtcgtgccgacgtgtccctgcacggtacgttcggtgacagcggcggcgccggctgctgggagttccacgagagcttcgatcagatgcaggcggccggcttctgcgacctgctctcctccattggcgagtactacttcggactcgactaggctctcggccctggttggtgatcggtcgttgctcaaaggatttgcgcgtttttttttaaatttgttagaagtttcgatggatggctttgtctgtgcttgtaaattgttgtcgtgtacggtatagatagagcaattttaaaggcagataaaagtcaaggacagtgacgagtc

SEQ ID NO: 119492 - DNA, 115 bp, Zea Mays
tcaattgtttgaatatcaattacaaatattgtatataggcttacctagattttacaaattcgccttatttgttggtcacatgtaaatatttttgtaaaagaccactcctttcctt

SEQ ID NO: 119493 - DNA, 321 bp, Zea Mays
ctgtgaggaagctagcgcacaccaccgcatggaattgctctcgacgcccgattgagccgagcgatgtgagagattgggagaccatgccctctccccgccaccatggattcccgcctgtgtggccaactgggcactggaggatggctttggcgcttcaccggtcaactgggatcatgcccagggcccgtgggatgatgcgagtttggctgggagaatggagctccgccgcagggccgcatgccgccgtgactagccatgccaccgccttccccgctgcgcgaggactcgtgtcatctgaaaagcaagttggtacctggattc

SEQ ID NO: 119494 - DNA, 1213 bp, Zea Mays
ccccccctgcccatcacctcctctctcaatttttgcagccaccaaaccctagccgtcccccccccaatcccctcctcccaaggtgccaatccttgccgctcggatcgtcgtctcatggtgcgattctccaaccgttttggtggagggaagaagggaggaaggaaagggggagaacccaaggtggtggacttccggatcgttcttagggattttgcccaaacttcggtgaaggcaagtaaaactgtgatggttattccgtctgtctgatgaggagtcttatacttgtttatgttgtgctatcatgttcaaattcatattttattttgagtaccatcatttgaaaatgttcatgtttcatggatttcgtatgttgagtttgaggtttgattatgttactcaagtggttattatgtggaatggttggaagtaaatgcctagcacatttttatttgggaagaacttatgatgttgtcatgcataatgcactcatcatccattgcattgaagtttcgtcgcgatcttatggtccgaccataccggtacattgagcatcatatgttgcccgagaaggggtatggtgcagcttcatatccttagagatatggaggcagaagtcattattgcatttgtagccatgtgcattcatgggagaggtgttgaatctattatgtggatgtggataatttggacttgtgcatggtgattctacttggcgttgagcttttagttacttggttacttgctgcaatttactgttcaaaagaaaagaaagaagtcctgaacacgtggttgtgaaagcacagttgatttacaatgtcctatttgttgttgttatgtttacttgctgagatgtgttatctcacatcttgcattgtttgatgcaggcacctaatttctgctttgggaatagagggatgtagcagcacggccactacacctttaataaaggaaccaccatttaataatgttgttaatcagagttggacaagtctagtgaattgctttgttcttggttgagcgtttattttggggtgggctgagtttcttatcccatttattttgcttcagttgggtcataattaagttttaccacttttgcatttcagtttctactatgtgaattatatgtctttatatcttgtatgagcttcatgtttcccctccttgttatgctagttttcaaaggaggtgctgccggattttgctatatata

SEQ ID NO: 119495 - DNA, 1474 bp, Zea Mays
agctatgccgcctcgtagagctcggggtagtccgcaagctcctagtggggactcgatgagtccggcggcaatgttagccgcgatgcaggccatgcagcaggagttggcccttctgaggcaagccattcctgtcgcccctgcgggtgctgctcagggtgctggaggtggagaagtgcccgggggcgctgtccctgcgggtgctgttccaggtggcggggccgaggtgcctcttccagtcagtggtctttctctgatgcagtggatgggcatgaagttggattcttttgatggcagtggtactccggtcgaggcggcagattggttgacttatgtggaggataagatgaatgtcttcgagattgcatatggagatcgggttcgctttggcactcagctgctgaagggagaggcgcaaatttggtggagaggcgtgcaggcagcgcactcctcctcaccaggagtcctatcatgggatgttttcattaggcagttcgaaaggagattctacccggtcacctttctggagaaaatgaagattgacttgcagtcctataagcaggagaagaagtctgtcacagagtatgaggtgggcttcaacaagatggtccgctttgtccctcatgtggcttataatgagatggagaaggcgagccaattccgtcagggtctgaagccttctatcaggcatgcactgggggcctttccattggtggacttccgtaccacggtggagcaggcgctgggtgtggagatgcaacaccagtataccatggagtcgcagaagtcttcgggtgttgatcagcctcgtagccaggacacgaggaggggcaacactggaggtccagctcacaagaggggcaagtctcagcatcagcgccaccatccttaccgtggcaaatcttctgactcgggtacttcgggaggaagtactcagaggtttcgggccgttcctaagcccgggctggggctggtgtgtttccgttgtggagatgcgcatcgccgtgcagagtgccagtggagtggcaggtgttcgatctgcagtcaggaccacaaggatgtggtgtgtaggaggaatcccaatgggaagctcagatgggagctggtgacttcctcctcttctcagggcactatcaacatgatgtcaagtgctgagcagcagttttcagttcctcttcctccacagcagctttatgtgtctgggacttctcagttcgtgccgatgcagggtttccctcagtatcaggtcgcgcctactcctgcaccgtctacccctgtgctgactcagtttggagctccgcgccagcctcctccggtggctcagtggggttcttctgttaatttcactccgggagcttcctcttctgcggccgaggcagaggccgaggcgttgtctgtatacgcccgagcccccgggagagatgccgctcataccgtagttgttgtaacagcgccggggcatgggctaaaggcctga

SEQ ID NO: 119496 - DNA, 1015 bp, Zea Mays
gtctatgtgcagttcgcaagattggaaggcccaattgaagcttccacctcctgatacacgctacaggacagaggatgttacagccaccaagggcaatgagtttgaagactattttctcaagcgtgaactcctaatgggtatttacgaaaagggatttgaaagaccctctcctattcaagaggaaagcattcctattgctttaactggtagtgacattcttgcaagagcgaagaatggaactggcaagactgctgcattttgtattcctgcactggaaaagattgatcaagaaaaaaatgctattcaagttgttatattggttcccacaagggaattggctctacaaacatcacaagtttgtaaggagcttggtaaacatttgaagatccaagttatggtcaccactggtggaaccagcttgaaggatgatattgttcgtctgtaccaacccgtgcacttaattgttggaacacctggccgtattttggatcttacaaagaaaggtgtttgcattttgaaggactgttcaatgcttattatggatgaggcagacaagcttctctctcctgagtttcaaccttccatagaacagttgattcgctacctccctgctagtcgacagattttgatgttctcagcgacattccctgtgactgttaaggagttcaaggacaaatatcttcctaaaccttatgtgattaaccttatggatgaacttacactgaagggaattacgcagttctatgcttttgttgaagaacgacagaaagttcactgtctcaacaccctcttttccaagcttcaaatcaatcagtcaataatattctgtaactctgtaaatcgtgttgaactattggcgaagaagatcacagagcttggttattcttgcttctatattcatgcaaagatgctacaggaccaccgcaatagagttttccatgatttccgtaatggagcgtgcaggaatcttgtttgtactggtatgctattaattttcttgtggacgaactctttc

SEQ ID NO: 119497 - DNA, 2456 bp, Zea Mays
cgccatatccaatcaaccagcccatgatatggggatggcgccaatgccatggccgcacggtccgagttcgacacgcaaaaccagaaccgctgagcttgaggcctctgcactgcttccctcccagtccatcccttcccttcccttccgcttcccccacgccacccgtctactccgtcgtcttgtcgcaggcagcaggtggaaatctccgccattaatagcgcaccccggggatcctcctcggccgcaaacaaaaccctcctcgtcatccgcggccgcttttcccctgacccctgcctcgaccaatcctccctcccacacacatcacacccacaagacaaaaaaaagcgcctttgagcgccgcgcgacctctggtgcttggtgtcgtcgcgacgcgttagtttcagagcgcgcacgcgcgtttgtgctgtgggggttgggaagagccgaagagcgaggcggcagcgcgatcgagagcggttcggcgggcggcggccgagccgatgggaagggcaccctgctgcgacaagaacaagggcctcaagaaggggccctggacgccggaggaggacaagctcctcgtcgactacatccagaccaacggccatggcagctggcgcctgctccccaagctcgcagggctgaaccggtgcggcaagagctgccgactgcggtggaccaactacctccggccggacatcaagcgcgggcccttcacagccgaggaggagaagtccatcgtccagctccacgccatcgtcggcaacaagtaagaaaacttttttgccgagccgaggtagcaactgcctgcccgtcccattcgatctgtggcaccggcagagagcagcacgtttcctctctcgtcatgctctcatctcactcactcatcatagcttagagagctcgcactgccggtgtactgctcggcgcagcgcctcactgtcgcaaagcatcgcgtcgcattgaatgatgccacctccgtccaaggcatcgcgtccaaaacctggcgccttcagcatgccggatgtgtattgctattgcctcgctctcgtagacgtagtactcctatttactagagccctgtctgctcatatttctgccacggcaattggtgattggctgattgctattggcaggacaactctctccctctccggaaaaaaagtttgcaaactattctcgctgcttgaagagtcaaacggtctaaacttcaactaaatttatataaaaaaatacaaacattttcagtacaaaaagaagtgtcattaaattaggtatacacacgctggtgctaattactataaacttggacagtttgattgtcataaataatattgttgcattctctcgagaacgaacggcatacgttgacggttttttttatctggtgttgatcctggtacctcaaggtggtccatgatcgcggcgcagctcccaggccggacggacaacgagatcaagaactactggaacacgcacctcaagaagcagctgcgccggatgggcctcgacgagcccccgcccggcccggccgccggctgccccgccgcgcgccacatggcgcagtgggagacggccaggctcgaggccgaggcgcgcctctccctcctcgccgccaccgccgcctcctccggcaccaccgcgaccaccacagccaccaccaccacgtctgcagcctcctcgtcctccaccaccgtcgctggcgcggccgacaacaaggcctccaaccccgcggacatcttcctgcgcctgtggagctcggacatcggggactccttccgccgcaagacggacacgacgccagcggtgcccgcgcttccggcgcccgtcgtcaagaggaaggacacggcgatcaagcaggagccgcgggcgctgctgctcggcctcagggacgactcctcggcggcgtccaacgacaacgagacggaggtggcggaggcgctggaggcgaagtaccagatgttcctcgacttcgcgggcgaagagctgggattgttccatggccggcacggcggcttctcgctgttcccgccgctcgacgtgctcgctgaggcgtccctggactcggctttcaagtgaagacgtagccagcaccacgtacgtacacggtacacatacgtacgggtacggcaagcggcagtagccaactggccatgcctctacggcttagctatacgcctcgaaatgcgcgcatggatgtatatagatatgcgtgtgactgcactggcatatcagcaattttttgggttaggccagcaagtgcgtggtttagcttgttattatccagggttggttttggtaggacatcatggtgtattattgcctgtatgaggattctctgttcattggagatgctctaatacatcacgagatgttcttcaatcttcggttagattctgggactgctttttcgcactggaaacatatttgacctggtttttagagcgggccattccatc

SEQ ID NO: 119498 - DNA, 562 bp, Zea Mays
aaacaaaaccctcctcgtcatccgcggccgcttttcccctgacccctgcctcgaccaatcctccctcccacacacatcacacccacaagacaaaaaaaagcgcctttgagcgccgcgcgacctctggtgcttggtgtcgtcgcgacgcgttagtttcagagcgcgcacgcgcgtttgtgctgtgggggttgggaagagccgaagagcgaggcggcagcgcgatcgagagcggttcggcgggcggcggccgagccgatgggaagggcaccctgctgcgacaagaacaagggcctcaagaaggggccctggacgccggaggaggacaagctcctcgtcgactacatccagaccaacggccatggcagctggcgcctgctccccaagctcgcagggctgaaccggtgcggcaagagctgccgactgcggtggaccaactacctccggccggacatcaagcgcgggcccttcacagccgaggaggagaagtccatcgtccagctccacgccatcgtcggcaacaagtaagaaaacttttttgccgagccgaggtagcaactgcctg

SEQ ID NO: 119499 - DNA, 1557 bp, Zea Mays
aaacaaaaccctcctcgtcatccgcggccgcttttcccctgacccctgcctcgaccaatcctccctcccacacacatcacacccacaagacaaaaaaaagcgcctttgagcgccgcgcgacctctggtgcttggtgtcgtcgcgacgcgttagtttcagagcgcgcacgcgcgtttgtgctgtgggggttgggaagagccgaagagcgaggcggcagcgcgatcgagagcggttcggcgggcggcggccgagccgatgggaagggcaccctgctgcgacaagaacaagggcctcaagaaggggccctggacgccggaggaggacaagctcctcgtcgactacatccagaccaacggccatggcagctggcgcctgctccccaagctcgcagggctgaaccggtgcggcaagagctgccgactgcggtggaccaactacctccggccggacatcaagcgcgggcccttcacagccgaggaggagaagtccatcgtccagctccacgccatcgtcggcaacaagtggtccatgatcgcggcgcagctcccaggccggacggacaacgagatcaagaactactggaacacgcacctcaagaagcagctgcgccggatgggcctcgacgagcccccgcccggcccggccgccggctgccccgccgcgcgccacatggcgcagtgggagacggccaggctcgaggccgaggcgcgcctctccctcctcgccgccaccgccgcctcctccggcaccaccgcgaccaccacagccaccaccaccacgtctgcagcctcctcgtcctccaccaccgtcgctggcgcggccgacaacaaggcctccaaccccgcggacatcttcctgcgcctgtggagctcggacatcggggactccttccgccgcaagacggacacgacgccagcggtgcccgcgcttccggcgcccgtcgtcaagaggaaggacacggcgatcaagcaggagccgcgggcgctgctgctcggcctcagggacgactcctcggcggcgtccaacgacaacgagacggaggtggcggaggcgctggaggcgaagtaccagatgttcctcgacttcgcgggcgaagagctgggattgttccatggccggcacggcggcttctcgctgttcccgccgctcgacgtgctcgctgaggcgtccctggactcggctttcaagtgaagacgtagccagcaccacgtacgtacacggtacacatacgtacgggtacggcaagcggcagtagccaactggccatgcctctacggcttagctatacgcctcgaaatgcgcgcatggatgtatatagatatgcgtgtgactgcactggcatatcagcaattttttgggttaggccagcaagtgcgtggtttagcttgttattatccagggttggttttggtaggacatcatggtgtattattgcctgtatgaggattctctgttcattggagatgctctaatacatcacgagatgttcttcaatcttcggttagattctgggactgctttttcgcactggaaacatatttgacctggtttttagag

SEQ ID NO: 119500 - DNA, 156 bp, Zea Mays
atgaatatcttatctccatgtggtaacagccaatcttggcaactgcatacgctgtacatttcatttgcgctagttttctggaattggatcataaccctgtggttcttcaaggcgaactggagctatagcagccaccacaacagaggcaccaaataa

SEQ ID NO: 119501 - DNA, 2607 bp, Zea Mays
gccagcagcggcggtgctcgaccttcaggcatcagagctgcgggacatcacacgcaccgctacgatctcctcctgcgagcgagatctcaccaccgcagcggcgccgcggccatggcgggaaggtatcaccaggatcagggcggggacgggggcgcgtccatggaggtagtcagcacgccgaaccaggagctggcccttaccaactgcgcatacgtctctcccgctgacctccgccgcttccccaacgggctcgccctcgtcgctgacgcctgggtcttcaccctacgatatccttttgtagacggtctctgaccacaatgctgttgcaagtggacgcattgccttgaatgctattcagcgtcggcaggcaaaggtttcagctggggattctgttactgttagcagttttgtcccccctgatgatttcaagttggctttgctcactttagatctagattatgccaaggcaagagccaaccgaaatgacgagctggatgctgttgtgcttgcccaacaactccgtaagaggtttctgaatcaggtcatgacctcagggcaaagggtgccatttgaattttatggaacaaactatgtattcaccgtcaatcaagctttgctagagggtcaagagagttctacaccattggatagaggattcttgtccagtgatacatacatcatatttgaggctgctcctaattcaggaattaaggtgatcaaccaaaaggaagctgctagcagcaagcttttcaaacataaagagtttaacctggaaaaattgggtataggtggattaagcgctgaattcactgacatatttcgtagggcattcgcttcaagagtctttccgcctcatgttgtcagtaagttgggcatcaaacatgttaagggtatattgctatatggacctcctggtactggcaagactctaatggccagacaaattggaaagttactgaatggaaaagatcccaagattgtgaatggacctgaagttctgagcaagtttgttggagaaactgagaagaatgtgagagatttgtttgctgatgctgaaaatgagcagagaacacgaggtgatcagagtgacctccatgttatcatattcgatgaaattgatgccatctgcaagtctagaggatctacccgtgatggtacaggtgtacatgatagcattgtaaaccagctgcttacaaagatagatggtgttgaggcgttgaataatgtattgcttattggaatgacgaatcgtaaagatttgcttgatgaagctttattgagacctggacgattggaagtacacattgagataaacctgcctgatgaaaatggtcgtttgcaaatccttcaaattcatacaaataagatgaaggagaattctttcctgtctccagatattaatcttcaggagctagctgcgcggacaaagaactacagtggagcagagttggaaggtgttgtcaaaagtgctgtctcatttgctttgaaccggcagataaccatggatgacctcactaaacctttggatgaggaaagcatcaaggttaccatggatgattttgtgaatgcacttcatgaaattacccctgcatttggtgcttccaccgatgatctcgaaagatgcagattgcgtggtattgttgattgtggcaaggcacataagcacatttatcaaagagctatgctcctcgtagagcaagttaaagttagcaaaggtagcccactcgtgacttgcctattggaaggtcctgctggaagtgggaaaacggctatggcagcaagtgttggcattgacagtgattttgcatatgtgaaaattatatcagcagaaacaatgattggtttcagtgaaagcagcaaatgcgcacagatttgcaaggtttttgaggacgcatacaagtctcagttcagcatgataattcttgatgatatcgaaaggttactggagtatgtagccatcggaccacgtttttcaaacttgatctcacaaactcttctggtcctcctcaagagagttcctcctaagggaaaaaacttgcttgtcgttggaacaacaagcgaggttggcttcctagaatctgttggaatgtgtgacgtgttctctgtgacctaccatgttcccaaactgaaaaaggaggatgccaaaaaggtattgcatcatcttgatgtgttcgatgacggagatcttgacgcagcagcagaagcactggacgatatgccaatcaagaagttgtacacacttgttgagatggctgctcaggggccaaccggaggaagtgctgaagcgatttatgccggagagaagatagatatcaaccatttctttagcatcttgagtgatattatccgttactaagcccgcatggagccgaaatgaaccctataagtatccagtaggagtttgtttgcacccgtgcttcatcaaccatttctgtagattggtttgatctttgatgtgttgtttttgtttgatgcacctactagagctgttggattagatcagaggcgaattacacgatatatcatttttgtattgtatgacgatgtttatacagttcttaatgggatccagctttacacctcagaacaccgataattttcacattc

SEQ ID NO: 119502 - DNA, 116 bp, Zea Mays
gtgacaccccagtgtcacctagggtttctcttaaaatgccaaaccaagaaccattatttcatgtgaaccaaagtaagcatgagcatcaaattaacttaagtaagaaagaatccacc

SEQ ID NO: 119503 - DNA, 1901 bp, Zea Mays
ggaggagtgtccatgaccggagcctgacgcgcctacagagggagaaaggagggggaatacccggcccggtccagatctctcagaccgaagcgctggacaaggggccgatggcttcggcggctgcagcggtgatcccggacggccggcgatggagcaaaggtccgggctcctcgtcgtcgccggtgacaacggccattttcctcttcttcttcgttgtcgtggtcggcgtcctcgtgtccgcccgctggatcaccaccacgactcatctgtcgaccaccaatctggatcagtggagctcaaagctggctatcttaaccgcgacgcacaccacctcctccatcccggccatccccgcggcaccgccgccgcctcggccgacctactccctctcctgcccggcgccgccgcttcaccgtgacccgaccatccccagcaacatctcccagaccctcgacctcgtgctctcccccaacgcctcctccgcctccacttgcgccgcctttcccgaccccccgccgctccctgccaactccaacgcctcctccacctgccccgcctacttccgcttcatccacgaggacctccacccatggcgcgccgctgggggcatcacccgcgccatggtcgaccgcgcgcgcgccaccgccaacttccgcctcgtcgtcatccggggccgcgcgtacatcgagcgcatcgcgccggcattccagacgcgcgacctcttcaccatctggggcattctgcagctgctccggcgctaccccggccgcgtccctgacctcgacctcatgtttgactgcgtcgactggcccgtcgtgcacgccgaccagtaccagggggagaacgccacgctattgccgccgctcttcaggtactgcggcgacaacgagacgctagatgttgtcttcccagactggtcattctggggctggcctgagatcaacataaaaccgtgggatgctctgcagaaggaattgaatggtggaaacaagagggtgaaatggttggctagagaaccttatgcttattggaaagggaatccagatgttgcagttacaaggcaggagcttgttaagtgtaacgtctccagtaagcatgaatggaatgcaaggatttacaaacaggattggctcaaagagatcaaggcaggatacaaacagtcagatttggctagtcaatgcactcataggtacaagatttatattgaaggatcagcatggtcagtcagtgagaagtatattctagcttgtgattccatgacactagttgttacaccaaaatactatgatttttattcaagggtgctgatgcccatgcaacattattggccaatttgggatgacaataagtgtagctccataaagtttgctgttgattggggcaactctcacaagcagaaggcacagaggataggaaagcaaggaagcaactttattcaaaaagagctcagcatggaatatgtatatgattacatgtttcacctcttaactgagtatgccaagctcctaaggttcaagccaagaaaaccacctgaagctattgaggtctgtcctgaatctctggcttgccaagctataggccgcgagaagaagttcatggaggactccatggtgagatccgccagcgatgctggcccatgtgacctgcctcctcctttcagtcctgaggaattcaaagcactgcgacgtaggagagagaaggcaatgaagcggatcgaaacatgggtgcaaaaaacttcgaggcccatggttagcaagccctgagagagcttcatgcttttccctccccaatagatacatacccaatttttgtcgtgctaataacccaaggcatttcttatctgtttgaatcaaatgtgtgattctgcagaagttatagatggtttcagttctccagatctt

SEQ ID NO: 119504 - DNA, 1889 bp, Zea Mays
atggcttcggcggctgcagcggtgatcccggacggccggcgatggagcaaaggtccgggctcctcgtcgtcgccggtgacaacggccattttcctcttcttcttcgttgtcgtggtcggcgtcctcgtgtccgcccgctggatcaccaccacgactcatctgtcgaccaccaatctggatcagtggagctcaaagctggctatcttaaccgcgacgcacaccacctcctccatcccggccatccccgcggcaccgccgccgcctcggccgacctactccctctcctgcccggcgccgccgcttcaccgtgacccgaccatccccagcaacatctcccagaccctcgacctcgtgctctcccccaacgcctcctccgcctccacttgcgccgcctttcccgaccccccgccgctccctgccaactccaacgcctcctccacctgccccgcctacttccgcttcatccacgaggacctccacccatggcgcgccgctgggggcatcacccgcgccatggtcgaccgcgcgcgcgccaccgccaacttccgcctcgtcgtcatccggggccgcgcgtacatcgagcgcatcgcgccggcattccagacgcgcgacctcttcaccatctggggcattctgcagctgctccggcgctaccccggccgcgtccctgacctcgacctcatgtttgactgcgtcgactggcccgtcgtgcacgccgaccagtaccagggggagaacgccacgctattgccgccgctcttcaggtactgcggcgacaacgagacgctagatgttgtcttcccagactggtcattctggggctggcctgagatcaacataaaaccgtgggatgctctgcagaaggaattgaatggtggaaacaagagggtgaaatggttggctagagaaccttatgcttattggaaagggaatccagatgttgcagttacaaggcaggagcttgttaagtgtaacgtctccagtaagcatgaatggaatgcaaggatttacaaacaggattggctcaaagagatcaaggcaggatacaaacagtcagatttggctagtcaatgcactcataggtttcttttttttcttctcgcggacaagttgaaatacacattatctgttcataatactgagattctttctttgggtgacaggtacaagatttatattgaaggatcagcatggtcagtcagtgagaagtatattctagcttgtgattccatgacactagttgttacaccaaaatactatgatttttattcaagggtgctgatgcccatgcaacattattggccaatttgggatgacaataagtgtagctccataaagtttgctgttgattggggcaactctcacaagcagaaggcacagaggataggaaagcaaggaagcaactttattcaaaaagagctcagcatggaatatgtatatgattacatgtttcacctcttaactgagtatgccaagctcctaaggttcaagccaagaaaaccacctgaagctattgaggtctgtcctgaatctctggcttgccaagctataggccgcgagaagaagttcatggaggactccatggtgagatccgccagcgatgctggcccatgtgacctgcctcctcctttcagtcctgaggaattcaaagcactgcgacgtaggagagagaaggcaatgaagcggatcgaaacatgggtgcaaaaaacttcgaggcccatggttagcaagccctgagagagcttcatgcttttccctccccaatagatacatacccaatttttgtcgtgctaataacccaaggcatttcttatctgtttgaatcaaatgtgtgattctgcagaagttatagatggtttcagttctccagatcttatcagtattcttct

SEQ ID NO: 119505 - DNA, 626 bp, Zea Mays
acgtacatttgtaaatgttttgcatgttttattaatgaccgtgtacatttgtaaatgttttgcatgttttattaatgaccatatccacgtattgcacttcaaatataggcacagaggataggaaagcaaggaagcaactttattcaaaaagagctcagcatggaatatgtatatgattacatgtttcacctcttaactgagtatgccaagctcctaaggttcaagccaagaaaaccacctgaagctattgaggtctgtcctgaatctctggcttgccaagctataggccgcgagaagaagttcatggaggactccatggtgagatccgccagcgatgctggcccatgtgacctgcctcctcctttcagtcctgaggaattcaaagcactgcgacgtaggagagagaaggcaatgaagcggatcgaaacatgggtgcaaaaaacttcgaggcccatggttagcaagccctgagagagcttcatgcttttccctccccaatagatacatacccaatttttgtcgtgctaataacccaaggcatttcttatctgtttgaatcaaatgtgtgattctgcagaagttatagatggtttcagttctccagatcttatcagtattcttctatt

SEQ ID NO: 119506 - DNA, 1407 bp, Zea Mays
ggagttccgcgacgcacgcgcgcccgcctcctcatcgttcgagcctctcctccaccgccgcgggtctctggagccagaccgccgcgcggtcgtccttcttaacaaggcagacctggtggacccatccgaaaccgaggtaaccaggcccctcctcctcagacctacgttgtttgtgcgctgcgtcctgggtggggcggctgcttctggatcccgatgcccgaggttgctgccggaatgtgcaagatggtgctgccgggagtttctgtcatgaattgggattttgtacttgaacctgtgctgtcaccttgctatgcaaggcctgaacttgttgaaagagcactaaagggacgctatcaagatgcgatgaacatactcgggcctcagggccgagaactcaacttgttgattgttatactgcctgacaataatggttctctttacggggatgtcaaaaggatctgtgagactaatcttggattggtctcccaatgttgtctgactaaacatgttttcaaggtgaacaagcagcagtatcttgcaaatgttgccctgaaaataaatgtgaaggtggttgcttctcaagactggcctgaggttacaaagtatgtaggattggtgattgctcaagcccatcgtcaagaattgatacaggatcttttcaaggtatggcaagatcctaaaagggggactgtctctggtggcatgatcagggagcttctcatatctttctggagggcaactggacagaaaccaaagaggatcatattctacagggatggcgtcagtgagggacaattctaccaagttctgttgtatgaacttgatgccattagaaagaagcgtcatcacaccaggttgtttgctaataatcacaatgataatcgtgctgtcgataaaagcgggaacatactgcctggcaccgtggtggactcgaagatctgccatccaactgagtttgatttctacctgtgcagccatgctggcattcagggaacaagccgccctgcccattaccatgttctgtgggatgagaacaactttacgactgatgggttacaaactctcaccaacaacttgtgttacacgtatgctaggtgcacacgctcagtatcgattgtctttcgagctcggttctacatggagccagatacgagtgacagtggatctatggcaagccgtggccctccactaggggggcgccacaccaaggctgccggtgttgggaatgttgatgttaggccattacctgccctcaaggaaaacgtgaagcgggggtgggtggcgtacatcaagaagcagaggagctgcccttgcgtcgcggtaaactcacacagcagggaaagcatcaaggaggtaggccaggtcgcggccagcagtgctgtttctggtggtttcgcaatcgtgtag

SEQ ID NO: 119507 - DNA, 1941 bp, Zea Mays
cgcctctagaatttgtcacctatcacaacagcttctcaggcgacactgcgactttaatttgttcgtgcatgtacaactacacgcaacaagaaaaagtttttgtcccgtgagaatggaatctttatttctaggcttgtgtcataacaagccaaaaaaatcggtggcaaccgcaatagttctggaagactatatttgcacgcagggtgatcttgccctcatcgattttattaaggaaattctttgtgaaccaagggtagaagtcgtgcttattgatgatgcctttgttgaaaggaagtcgatggaatgtttatttaagccgaatgcatatcttggtgacgaggttatagactgttacataaatttaataaaagctcaaaagcatctaaagtgccgatctagaggttgtgtccacatagaaaatgctttccagatcaattttctgaagcgagatggtgatgttgaaattaaaacagaggagctatatccaattaaagacatgtcacaaatatgtagcgttgaacgaagggttttactttacctagaccatgacatggtgtttattctgataaacatccgagagacacactggtaccttgtcgtgatcaatgcaagaaatatggagatacaagtgctcgattcacttggtacttcacaagaccgcaaagacctcactgactctattaaaggactccaaagacaaattggtatgacatctcaacgtaaggagttaaaagaccacaggtggccagacctccaagttgcttcttggccgctcagagaaatagaaatggcatatgcaaagcagacatatagctctttatgtggcctctttcttttgaactatatcgaatactggacatgggatgaattgtctgataattttacccaggatgacatgtcacactttagggaaacaatggctgctatattactatcttcagacctgaacaagagaaaggggtgtctgttatacaattatgaaaaagaagttgacactggaaactcatctgatgttgagatattagacatcccaacaaatcctaagaagagaaaactactccacgtgcttgatgaccgctgaaagggaattagggttacacctagttcctatataattttggtggttgaattgcccaacacaaataattggactaactagtttgcccaagtgtgtagattatacaggtgtaaaaggttcaccctcagccaataaaaggaccaagttttggattcaataaaggagcaaaggggcaaccgaaggcacccctggtctggcgcaccggactgtccggtgtgccaccggacagtaaacagtacctgtccggtgcaccaggggactcagactcaaactcgccaccttcgggaatttccagggcgactcggctataattcaccggactgtccggtgtacaccggacagtgtccggtgcgccaagggaggtcagcctcaggaactcgccagcttcgggaaaagccaacggctcgtccgctataattcaccggactgtccggtgtgcaccggactgtccggtgcgactccggagcaacggtcatctccgcgccaacggctctctgccgcgcatttaatgcgcgctctgcgcgcgcagaagtcagaatcgcccatgctggcacaccagacagcaaacagtacctgtccggtgtgcaccggacatccgggcgggcccacaagtcagaagctccaacggtcagaatccaacggcaatgatgacgtggcagggggcaccggactgtccggtgtgcaccggactgtccggtgcgccatcgaacagacaggattcccaacggccacatttagtggttggggctataaatacccccccaccattcattgtatccaagttttccacttctcaactactacaagagctctagcattcaattctagacacactaaagagatcaaatcctctccaattccac

SEQ ID NO: 119508 - DNA, 2801 bp, Zea Mays
gatgacatgggtgcgaagtttcaaccctttaagatagaaatatctgtcaaagacctgcaaaacatattaatgataaatcaagatatgactctaagatgttttggcatggtcattcggctgcttgccaataaagagtcatgtagaccgaaaggagaaatcataaagaatataaaacattatatggacatacgtttctgggttcttttgccatggaaatttaacggatgttacacccttttcataatagatcatgttaaaaagcatgtgacttttatcaactttacaccgactcaagattggtataagcacatgccaacaagaggttcgcagaaacgattatcatggcctcaaagaaatataagattgcctacaacaagaaacgttctggatgggcaggggatatttttaagtgggaacatacaattcggactggatgcaaagattcttcgaaggaactttctgattgatctgttaagttatgaggaaattttgtgccgatatgtcatccctgcaacatacaatagcgacttatcgatatcgctaaaaaggattagattaatatctattcagtatttaatcatgaagtctgttgatcgcccgcccagtaatccaaaaagattaaccattgaatccagtcaggagaaactgaatatccgctgcattccctatgatgttattgtatcatcttggataatgagcgatcggcagcgcgatgctgtcgctaggttgggattttcaagcatatttgatttgcgaactgatgccttagagagcagatcactcatcaggtggttgatggataaattggatccacatgacatgaccatacgcccaggggatggcaaggaactaaagataacaaaagatacggttcatctgattttgggtttgccatgtgctggaggaggcagggagtttactgattggtatggtgaagtggatgctgctgcaaaactgagacgtgatctcaatgttggtaaagaagaatttgatgttgtcaagcttcaagacaagatagtgcttggcaacgatgatgagctatcaattagatgcttttttctgattctattcaatcggcttctttttccttctgcttcttggggcattacaaacaatgaggtactcatgacttcaaacatggcccgaatgtctgatattgactggtgtcaactagtttacacggatttgtgtgatgctgccgcacgttggcataaaaggaacaaaacaaacatcacagcaacaatatatggatgctcactcattgttctgatttactatcttgatcacctacatcaccctgcatctcctgttaacaaatatgatactccacacattaagttttttgacaatgagaccataaaagagttggctcgtgataacccccctacctcaatgcctccaacaaatgatccagtatccacaccaactgttccaacacctgataaacaacaacatgatcaggaaagccatgttcctactgatcatatcaaagtatcagatgatgctcccacaacagacaagcctgctgctcctaagttaacaccagatataaatagtgaaggacaaaaatctgttacacatgatactcctgtatctggtgcacctctgttcgataaaaccccactgacagatgcaactactgacctggttgcaaaggatagttcctgtaaagctgcagtcgctgaacatcctcacgtgtcacgtgaagactgtgctcgcaacctgcttaagttcattttgtcaggaaaactagatccgagcatgtctatcattaattttggaggatttggagggtctgtccttgatgttgtccagtcgtttggtcccaacaaatgtcttgagaatactttcatgcatcgatttatcgactgtattcatcaggatgatgtattatacaatccagattctgtaatcaacactctaatactgaatgtcaacgttgggaccgttttgaatatcgaggagtttgaacaacacagttcaaatccacagcccttcacaacatcacttcttaaagaacatcttaaaccgacccttccttcagatgatgttctgaaccagattaaattgatcctggttcctatgctacgtcgaagccactggaccctttatgcaatcaattttgaacgtcgtcgaatagacatcttagattcaaatccttatggtacattgcttggaggcactacatggaaacaaatccataatgatcaaatgatgataaatggaacgaagataccttggtccagattaataatgagaagacttagcattgccttacatgaagctcgacctgagtcaactgtaccaaagtttggcaactacaagattgggctccttcccaattgtccaaccatgacaccagggtcaaatgattgtggtttttttgtcgcaaacttcctctgctactacgattttgatgatggcgacttatcagaattttatactccggatgaaccattggaccaacgttgcctttgttctgcattaccttacctttcatcgcaaacaacatgggtgccccccttccctgcagaactgctgcctttcaagtattctccaaggagacgccgctattttaaagccaagaacttagatagcatagctgaacatgattccctgtgggatccacaaaactgtttatgttacttgtcaagtcacttatgttaggcctctgatcatgtgtctgatactccgtgtgccacttatgttcaatgtgtctaatgtctatgctacttcgcatcagtttttatttgaagtgtgtcaaacataattgttaccagaatgtctatttatgttatctg

SEQ ID NO: 119509 - DNA, 1292 bp, Zea Mays
cagaagcgctggaatcacggccacggccaaaacgataaaaaaaaaaatctcccctggctggctctgccccacgggagccgaaggcggagtcagctcgcacccacacgcacaggcgctcctgtcctgccgcccgcgtcgcgcccacacgccattcctccgcgcacaccacagcacagcacacagcacagctcctcccctacctataagataacccgcgctgtcgcgctcccttgccagttgccaccagccactaggacgtcgctgcttccacgcctcctttactcctgctccaacggtgtattccaagcacagcgagaaagcggagacctttgcgcgagtgcgctctcgttctacctccagcagcagcagcagcggcgccgcagcggcatgccgaggagacggcacggagggttccggctcggctggaagctgctcggcgtctggtgctgggcggcgctctgccggcgccgccgccgcggccgcgggtacctccgcctgcacccgcgccaacaaggaggaggcagcgacagatccccgcccctccaggcgggtgtagcagcggtgtgcgccacgaagcagaagaagcagcagcagcagcagcgggatgactctgccgactcgcctcggatgctcacgtgggggcggtcgctggcgcggcggatgagcctcctgcgccggcgtgcgggagagaagggccggctgctggacgacgaggatgccgcggaggccaccacgcccaaggggcaggtggccgtgtacgtgggcggcgccgagcccggggcagagtcgatgcggtacgtggtccccgtggtgtacttcaaccacccgctgttcggggagctgctgcgcgaggccgaggaggagttcggcttccagcaccccggcgggatcaccatcccgtgcgcggcctcgcgcttcgagcgcgccgccgccgtggccgccgcgggcggcggcgccgggaagaaggtgcccgctggctggtggtagtggtagcagcatgtggcccacacggtggccgctgtacataccacacgtgcatgcccctgaccctcttcccctcagcggctcagcctcaggcaggaggatcccgattcccatggggaacgatccttcttctttttctttctcattagtttgactctctttttttttttttttgcccccttgctccgtttccttgtgtcgacggtcgattgaccatgtgcatgagatgcgaggaggcatagttgtattttgagagatcagagatgaacaaggctattctagggtcagcaagaacatgttctgattct

SEQ ID NO: 119510 - DNA, 176 bp, Zea Mays
cagaatcatcgcctatgatcaccaagcctgttaggcccagatacaagtggcatcattagtaggtaacctatcatggatagcccattcggcttctcaagagtcaagaatcattcccggcttcctggctctttctggccatccctattctccttcattccttaaaaaaagaaaaaaaa

SEQ ID NO: 119511 - DNA, 747 bp, Zea Mays
atgcacctgctcatcagcggcctcgtcgcggccgcactcttcctccacgtcgacgccgcgcggggcacgttcgtgtacgcagggtgctcgccgtccaggtacgcgcccaacacggccttcgagagcaacctcaactccctcctgtcctccatggctcccaccgcgtcctccggcgccacctacagcaccttcaccgcccctggcgccggcctggcggaggccgagtcccccgccgcctacggcctgtaccagtgccgcggcggcctgcgccccggcgagtgcgtggcgtgcgtgcgcgacacggtggcgcggatcggcgcggtgtgcgccggcgcggccgcggcgtcgctgcagtcggacgggtgctacgtgcgctacggcggcgcctccgcggcgtaccacagctgcggcgccggcaccagcggggacccctggttcctgaggtcccgcgacgccgtcctgtcggagctgcagggcgtggacgccaccgcggcctcgggctcgggctcgggcgggtacaaggtgagcgcctcgggccccgtgcggggcgccgcgcagtgcctcggcggcatcgcggcgggcgactgcgccgcgtgcctggcgcaggcggcggcgcagctccgcggcacgtgcggcgccgcgctcgccgccgacgtgtacctggtgcagtgctccgtgaggtactggaccgacggcgccaaccagctccggtcgtcgcaaggtgatcctcgtccatatatggcctag

SEQ ID NO: 119512 - DNA, 2761 bp, Zea Mays
tttttttaaaaaggttcgtttgcacgatttgcagtaatggttggtttccatcgaagatggaaacacacacagtgcaggccgtgatccgatggaaacacacacagtgcaggccgtgatcatcggatcgtccttccgtagccttccgtgaccgtgatccctcatccctgatcagctacttcgtacaggaaccttccagaactcttgagaactgggatccaacgcagctgggctcctctcggttttataaaaatctcaacagggtttcgttttttcgccttaatccccatcaaaccccaagcgcgcacccatcttctggcctttccagccgccaagccttctagaagcttcaagagctcgattcgatcggaaccctcgccatggccgacgaggcgaaggcgaagggtaacgcggcgttctcggccggccgcttcgaggaggcggcgcggcacttcacggacgccatcgcgcttgccccagacaaccacgtcctctactccaaccggtcggcggcgctcgcctcgctccaccgctactccgatgctctcgccgacgcgcagaagaccgtcgacctcaagcccgactgggccaagggctactcccgcctcggcgcggcgcacctcggcctcggcgacgcggccagcgccgtcgccgcctacgagaagggcctcgagctcgaccccagcaacgagggcctcaaagcggggctccaggacgccaagaaagccgccgccgcccctccgcgccgcgggtcgtccggccccgacgccatcggccagatgttccagggccccgagctgtggagcaagatcgcgtccgacccctccacgcgcgcctaccttaacgagcccgattttatgcatatgatgcgcgaagtgcagaggaaccccagcagcatcagtatgtatctctccgatccccgcatgatgcaggtgctcagcctcatgcttaatgtcaagatccagagacccgaggcctccgagccgtcgcagtctaccccgccgccgccgaagcagcagcagcagcagcagacgccgccttctgagacgaaggctagggatgtggagcccgagcccgaggcagagccgatggatttgactgatgaggaaaaggaccgcaagcagacgaaagctgctgctcagaaagagaaggagttaggtaacgcagcttacaagaagaaggacttcgaggtggcaatccagcattacaccaaagccttggaacttgacgacgaggatatttcctatctgactaaccgagcagcagtctacattgagatgggaaagtacgatgaatgcatcaaggactgtgataaggctgtggagaggggaagagaacttcgtgctgatttcaagatgatttcaagggcactgacaagaaaaggaacagctctggtcaaacttgctaagacctctaaggattttgatattgctatcgagaccttccagaaggctctgactgagcatcggaacccagacactcttaaaaagttaaatgaggctgagaaagcaaagaaagagttagagcaacaagagtattatgatccaaaattggcagatgaggagagagagaaaggcaatgagttcttcaaggagcaaaaatacccagaagcaataaaacactacacagaggctctcaagagaaacccgaaggatcctagggtttatagcaatagggccgcctgctacaccaagttaggagccatgcctgaaggtcttaaagacgcagaaaagtgtcttgaacttgaccccaccttcaccaaagggtatacgaggaaaggtgcaattcagttcttcatgaaagaatatgacaaggccgtggaaacctaccaggctggcttgaagcatgacccgaacaaccaggaactgcttgatggtgttaagaggtgtgttgaacagatcaacaaggccaacagaggtgaaataagccaggacgaattgcaagaaagacagaacaaagctatgcaagacccagagatccagaacattcttaccgaccctatcatgcgacaggttctaatagatttccaggagaacccaagtgcggcccaggagcacctgaagaaccccggggttatgcagaagattcagaagcttgtaagtgctgggatagttcagatgagatgatcgagcgatgcgatgattggctttgttcgttcacgtgcaccctggtcatacatatgttttaacaagcagcagcggcataagaatgaacctgttcgggggctaatcttattccttttggattgtaagtgcattgacattggataattcatgtttgtggcactgagtttcgagtatacgctactttctaatctttgagatgtgcgcacgctacgaactgatcatcggattttctgtacatagggctgcctcactgctcgttacccgtttgatttgaatttgaggcttgaggacttggttaaagccacacctccctccagtcaaactggtaaaaactgttcctttggcggtaaaacctgctacttctccgtccgtcaatttttcaatccaaaggagcttagattagatgtttcagcaccactcgcattggatctgtctgcaatgtggaatgtaaaatgacaaaggtctctttagaatgtaggcattttcgaagaagcatacagaaatttcattggaatctagggtggtcgactgtcgagggagcgtcttattcctatgaaatttctgctttattttataaaatttctactttctaaattgacccttcgttattgaaagctcgattgaaggattattttctg

SEQ ID NO: 119513 - DNA, 948 bp, Zea Mays
ttcctgatggaatggaacatcacgttactattgcgctgttgcagcgcacgtcaacacgataacacagaagagtcaggaattacaattacggtcgtaggataggacgatgtcgtcagcaattgaggcctgatcggcggcggctaggcagaaaagcatgcacgaagccagccgcacaaacaaatgatggcccggtaggtatcctactaaaaaactacagaaatcagaaggtaccgtacaccacaccaagataataaaaaaaaagtgggggggagggtagttacatctcttaggtcagtcgctcgcaccgttcatccgatccgatcagccgaacgaagggatcccgtatctccagccattggaggatcgccggcgagggggcggctgctgctgcggcgcaaagctgagcccgaacatctccctgaggacttgccctggctcctggagcccgatcagcttggcgacaagggaggcactctccctgacatgttctaggtcctcggcctcggtccagagccggcgagcgacctggagcttcctcttcttggagtccagcgaaatgccccatttggtgtacaggcgctccctttcctctgccgtgagccgcttctgcatctgcctcgcaagcatctcccgttcacgctgcagcttcttggcgctgcatgaagcggttcattggagaatcatttctcattctaagagaagacgttgcgacaattgtcatcaagttatgatacaggaaagtgcaagtatatatataaatatattcgcttacctcgcagcgggggaagagttcaagctgcctaccaccgcattgctaggggtgtttccccgagagtaggtatctctgaggaatgatagcctccggagctccacttccatgtagattgaatcagcttgttctcccttgaatagcaagaaaaagtaggtcctgtggactaaggaaataca

SEQ ID NO: 119514 - DNA, 944 bp, Zea Mays
tgatggaatggaacatcacgttactattgcgctgttgcagcgcacgtcaacacgataacacagaagagtcaggaattacaattacggtcgtaggataggacgatgtcgtcagcaattgaggcctgatcggcggcggctaggcagaaaagcatgcacgaagccagccgcacaaacaaatgatggcccggtaggtatcctactaaaaaactacagaaatcagaaggtaccgtacaccacaccaagataataaaaaaaaagtgggggggagggtagttacatctcttaggtcagtcgctcgcaccgttcatccgatccgatcagccgaacgaagggatcccgtatctccagccattggaggatcgccggcgagggggcggctgctgctgcggcgcaaagctgagcccgaacatctccctgaggacttgccctggctcctggagcccgatcagcttggcgacaagggaggcactctccctgacatgttctaggtcctcggcctcggtccagagccggcgagcgacctggagcttcctcttcttggagtccagcgaaatgccccatttggtgtacaggcgctccctttcctctgccgtgagccgcttctgcatctgcctcgcaagcatctcccgttcacgctgcagcttcttggcgctgcatgaagcggttcattggagaatcatttctcattctaagagaagacgttgcgacaattgtcatcaagttatgatacaggaaagtgcaagtatatatataaatatattcgcttacctcgcagcgggggaagagttcaagctgcctaccaccgcattgctaggggtgtttccccgagagtaggtatctctgaggaatgatagcctccggagctccacttccatgtagattgaatcagcttgttctcccttgaatagcaagaaaaagtaggtcctgtggactaaggaaataca

SEQ ID NO: 119515 - DNA, 1372 bp, Zea Mays
tatatcgaacccgacataattttatcataggttcaacaatattcaacattacatggcaatatcatgccttcaaatcacacaaaacatagcattgagtctaattgttcaatacacaatacttaatatttgaatatataagacttctaagctgttggagcttaagggcatccttctcttccaattccagtcttgttgctcagagtaaaagcttctacaaagcagtaattagaagtactactaccttattaacaaacataatctgaaactaacatcaaatgactctaaaattagcaacggattaaattctagcatacagttatacattgagatgtgataaaaaaatattacatggaatcttgataaataaagaacacattcaagtaaaaaaaagaggggtttgcgtgcatcgaaccccgttgatttcaacaactctacgctggagatggtggaagaatctttagcgggcgtagctggtggtccttcaacagcgaggcgacttcgattggcggtgacacgactcttcttgaatggcgaggccactgttttacccattagattatctttaacagtagcgccggccgtgacaacggtagcagcaacggcgtcccttcgcgaggtcgccgtcacgatgttagttcaatgaaagtttactcacaatcggtgctcagtacaatcgcacatataacaaacacaacaaaaacaaccatatattgaatcgaatataccaaaaatcaaacgaatagattgtgctcagtgctcacagctcaccttgcggtgtctgagttggtcgtctccggagaggatgatacgtcccctgcctgaatctgtagaggaggggatgaggctgctggcctagtgcttgggtcatggtcaccgttctctgtggactgtgggctcgacgtagccgataccgacgaagacatctgcagcggcggcgtacctgggagacggctggtggagtggcggttgcctggagccttggacgcgggcggctagcgggctggcggctgcctggacgcgggcggccggcggcgggacttggtctgtcctggacgcgggcggcaggacgccggacgcctggtgagctgtggatgtgcggcactgcggcggggagtccgtgcgttgggatcccgcgattcccgcccgtgcgctgggacgactggtggtgcgagttggagcaggcgagcagctgacttgcgagctgccgagttggagccgtggtccgtggagtactggagcgtgggcgtggtgccctggacggctggactggaggtttggagttctggtcttctggacggacgctggaggctggactctggtgggcggcggcagcgttagggactctggtgggcggtggcggcgttagggacag

SEQ ID NO: 119516 - DNA, 287 bp, Zea Mays
ggctaggtggtttggtagatctagagattttaggcgagtatctgatcaaccgtggttgttggattgtagaatggaggaggcggaggcatcaagcagtagtacgacttctggccgattgagcccatcaggtttagtggtgccggtagagacgacgccgtcgtcgtcgtcccactcaagaacatggggagcaggcgagggagctttcgttatgggaatcagatttgaagcggcgagaggtggatatcaagaggaggaaagaggcgctgaagaatggtgcagatccacat

SEQ ID NO: 119517 - DNA, 524 bp, Zea Mays
agacacaacaaggcatatttgcaaggagtgaatggtttcttagcttttgcatttagaaattcagctgtaggaagtaagatcttatggccctgtagaaagtgtgtcaactcaattttggaaagaggcaagtgaagtacatgagcacttgatatgtgatgggtttcttagagggtatatgatatggaacttacatggaaaacctagctcttctgtgaattatgggaactatgacgatgttgtaaccggttacacaggaatcattttgtagactgagtcctgattttggtgtagctaaacatgtaatggccgctatcatgaatcctagtggaggtagataaggcatcaaaactgtatttttatttgcaaatgtagcaacaatatactaatttgatgtacttttttctagggtgttctggacaaagaaagcttgtaccttaaaacaggaggatacaagaagctggagtggttggctgaaggcttttgaactgcttgaagcattagtgtagctttggtgcttttgtgac

SEQ ID NO: 119518 - DNA, 1052 bp, Zea Mays
atttgtttttgcataattgctgccatagctccaccaattgtgtttcatgagaaatcattaacataagtttgccactccttttatctaaagtaatcaaagtcattagttgttatgggtaatgtgagtaagcaccattgcatagatagccagtgatgttggctgctggaaaaggagaaatcaatgaattatagattgggatcatagaacttcagagaggaaactaggttgattgtgcaatattttttaagaacacttagtatcatggataatatgtgaaacaaacaatatgatttactccttagcttgtaatagcctgttcaatgtaaaaataagtatttaaccagccgcatagaagcatgtttgctttgtgaccttagaaactagccaggcacaggcagcacctcagccccctcctcagccagacggctactgtctcgaggcgtacagtggccgctcacctcgcggacgtgtctggctcgtcatcggcctccaatgccacgatcgcgctgctactccaatcgtcgctgacccgcatgatctccactgacttccgcaatgagtgcgggcaccttcggtcccatcagctgttaaggattacctcgcttatggtgttccacagagtgacatgaaactattttcacttatgcaaaagctccagtgtagaaccctgatttttatcagtgagaattctcagttaaactccaagaccgttcacttgacatcgaagctcgacatgagatattgtgctctagttgaggtttgtgcgtcaacaatactttttatcaaagttcactcgaggaatgcaagaattaggataggccaattagatcttttttattggtgtatactgagtttcctctaataaggaccctgtgtcaccacctgggtcaattttactaaacatttttgccactagccttaaatacatactacaaagtctgatttacgctaaaattctacacatatacgttgtttttggttcacgttttacactgaaatccgtacgagctagaaatagggcacaatcggatatgcgcgatttttatgctatt

SEQ ID NO: 119519 - DNA, 1800 bp, Zea Mays
gctcacactccactcgctcgctcaaagcaaaactgcccctccacgactttagcgccgatatcaaggccgcgccaaagcagtcctcgatcgatgcaacaatggcttcggttagtcgtcgcgtcctgctagcgctgctgtcccttctcctgctcgcgctccggcacgcggcgctgtccgctcccggggccacattcccgggcgacaaggcggcgctcgcggcgctgaggtccgccgtggccgcgtcctcggtcccgccccactcctgcctctcgtcgtgggacttctcccgcgacccctgcgcggcgttcccgtgcggcgtcagctgctacgctcctcccgccgccaactcctcctacctccgcgtcaccgccgtcgcgctcgaccccgcgggctactccggcgcgctcccagcggcgcttctgtcctcgctccccttcctcgcgtccttgtccctcgccgacaaccggttccacggcgcgctcccggcgggggtcccgctgccgccgaccctccgcatcctcgacctctccggcaacgccttctccggcgccataccggcgtctctgttcaccgcctcctccgcgctgcaggagctctacctctcccgcaacgccctctccggagggataccgccgcagctggcgctcctgggcgccctgacgcggctcgacttgcagcacaacgcgctcacggggaccctgccgagcctgggcgcgatgcgctcgctggtccacctcgacgtgagcggcaacgtgctgtcggggtcgccgctccgcgtgccagggacgctgccgccgtcgctctggtccgtcgcggcccggaacaactccttctcagggccgctcagcgccgcggcgctggctgcgctccccgcactgcgggtgctggacctcactggcaacgcggtgtccggcgcggtcccgggcgccgcgttcgcgcacccggcgctgcagcagctgcgcctgggttccaaccagctcgacgcggtccaggaggctcccgacggtggatcctcgagccagctcgtggagctggatctgagcggcaacaggctcgctgggcggctgccagcctgccttggcgcaatgccgcggctcgcggcggtcgcgctcgacaggaaccggttcaccggcggcattcccgaacggtacgccgtccgtgccgcggccgaggaatccacggaacagtgggtgccgttcgtcaggctgatgctgcaaggcaactatctgtgcggagccctgccgaggcagttgaggcagatccaggagggcagcgcagtggtgagcttggcggacaactgcctgccgaggtgtccacacaagttcttcttctgccaaggggccccgcagaaggaccacgccacgtgtcccaagtgcgatacttcgatccgtcgtcaggacattctgctgcggatgccctgattgtacattctgagctagtactaaaatctttgacaaaaataaaactacgtagtatgcattcttgtacgggtgtaccaaaacagcaaagtagaagctgcctatcaattgaatgtgttcaactgcattcttgtacgggtgtagagcaatacagcatgcattctgtaaaaccatagtttaaaatatagtacacttacaatattacttgtttaacttgtttttccccatgtttttcaaatgatatgaatgtctcaattacattatcttcatttactcgaaagcaaaatacttcgcttgatgaatgtgactagacagtcatccaatgctctatcatatatcttattcctttactttgtttccactataaccaatgcaaaaaaaa

SEQ ID NO: 119520 - DNA, 602 bp, Zea Mays
aatatcccctaggcttctccagatgtgttttctctctctctctcttccctttttatcagatcagtgttttcaaaaaaagtgatttatgcatttgaccctgttgcggcaccgcattcttcatgagtgctggattgctttctcaggggaatctagagagggagtgtcgcacagccgactccattgccggggttgtgctcatgccatcagttttggagtccggaggagggaggaaaagcagggtagccagaatctctgttggcgtcgcctgtttcattgtgttcatgatgatcctttcagtaataggccttttaggtagtaaaggaaacgtttgtgctctggtttctgcaagaggcttacacagatctgttttgacaagagccgagtagcgatgcttccattttggaccacgacctagctaaaggctaatggttccaaatgtctgaagtaccgaagatagggctagctcctcgttttttgtcatgtcaaaaaaatcgtgtatggttgcaacaatattggcaaaatatcgttgtactttatattttgatatactgtgaacaaaacaagtgccctctgagaccattgtgatttatgcattttcaaac

SEQ ID NO: 119521 - DNA, 605 bp, Zea Mays
cattcgatacggggccttttgaataggctgcgtacccgggatcagcttaatctcaaaagctgcattgcactccggaggaatgcctggaagctttgccagaaacacgtcagcaaagtcacacaccaccggatgtcctgcacccgcaaggcagcgtcaccctccaccaccatggagaaaaagatccccgacttccttgaccggcgatcaggaagcaattgcaccaacaaggataacgtgaacttcagggaacttcccaagaataccacctccttacccgacggtgcctgcaataacactgtcttccaaaaacaggatataaccgcgtgatactaggataaccaatccatacccaagataacatcgaatgcccccagggaaatcaccaccagattggccgaaaagacctcatcagcaagaatgacggaacacccctgacaaactgaacagctactaatggagccattagcagatctaaccaaaattgggtgacccaacctctgcaccgaaagaccagcacgcgacacaaaatcctccgaaacaaacgaatagctagcaccagagtcaaaaagagcatgggctgcaaacgaatcaactgaaatcgtacc

SEQ ID NO: 119522 - DNA, 1290 bp, Zea Mays
acgcagctaacggtcacccccttccctccctccatcccccttcgcctcgtcagtcgtctctgcctctttccttcctcatcttcgtctctttcctcaccccgacccccccgcaccgactcctccacgcgcacgcgcgcggcggcggcggcggagtcgggagaggtccctggtgctgcttctcgctcaacccgtacgctactccttcctctccgtatggcttccgccgccgtggaaaccctcgtctcgttcccaatcgcatcccgtccccgctcgctcctacgccccttcccgcggcgacctgccgccgccgccgccgccgggggatgcgcgccttcgatccggatatccgccgtgccgccgcggggcctcgggctcgcgctggtgcaccgccgcgcgcgccgctgcccgccagcggcgcgcgcgaatgttgagcacggcggcgacggcgcctctggtaacggcgagccgtcgtcctcgtccggggacggcgaccgcgacgcggctgcggactcggggggcgacaccaccggcacgagcaccacgagcgccgcccagacgccgccgccgccctcgtcgaagaggggcgaaaacaagtggcggcggaggctgactaagggaggtggcgtcgggcgctggctatgggagcccatagtccaggggcgggagatgggcttcctcctgctccagctcggcttcgccgtattcgcgctacgcatgcttcgaccggagatcgcgttgcctggctcagagccccgcccgcagaccacgtacgtcagtgtaccgtacagcgacttcctggcgagcatagacaaggaccaggtgaagaaggttgaggtggacggggtgcacgtcatgttccgactccgtccagaggttgagtcccaggtccgtgtggagcagacaccatcacagcgcggaacagatgctgtcgtcgataatgctggagtctcgaggagaattgtgttcaccacgactcgtccagtggacataaagacgccatacgagaagatggtggaaaacatggttgaatttgggtcaccggacaagaggtctggcggcacgctcaattctgcgctggtaaggcacttatgctgaaagatatctctgatgcaaacacaaggtttgtggctttgaaatcaccaaaataagttaggagtaataccagtcacacccgattagggattttaaaatttgtatctaagcatgcagaatgacagattggaaagtcacagatgttctgacctttgaaattgatggacgaataattgataatgaaatttgacaagcgaa

SEQ ID NO: 119523 - DNA, 2107 bp, Zea Mays
ctctttccttcctcatcttcgtctctttcctcaccccgacccccccgcaccgactcctccacgcgcacgcgcgcggcggcggcggcggagtcgggagaggtccctggtgctgcttctcgctcaacccgtacgctactccttcctctccgtatggcttccgccgccgtggaaaccctcgtctcgttcccaatcgcatcccgtccccgctcgctcctacgccccttcccgcggcgacctgccgccgccgccgccgccgggggatgcgcgccttcgatccggatatccgccgtgccgccgcggggcctcgggctcgcgctggtgcaccgccgcgcgcgccgctgcccgccagcggcgcgcgcgaatgttgagcacggcggcgacggcgcctctggtaacggcgagccgtcgtcctcgtccggggacggcgaccgcgacgcggctgcggactcggggggcgacaccaccggcacgagcaccacgagcgccgcccagacgccgccgccgccctcgtcgaagaggggcgaaaacaagtggcggcggaggctgactaagggaggtggcgtcgggcgctggctatgggagcccatagtccaggggcgggagatgggcttcctcctgctccagctcggcttcgccgtattcgcgctacgcatgcttcgaccggagatcgcgttgcctggctcagagccccgcccgcagaccacgtacgtcagtgtaccgtacagcgacttcctggcgagcatagacaaggaccaggtgaagaaggttgaggtggacggggtgcacgtcatgttccgactccgtccagaggttgagtcccaggtccgtgtggagcagacaccatcacagcgcggaacagatgctgtcgtcgataatgctggagtctcgaggagaattgtgttcaccacgactcgtccagtggacataaagacgccatacgagaagatggtggaaaacatggttgaatttgggtcaccggacaagaggtctggcggcacgctcaattctgcgctggtagctcttatttatgtcgtattgattgcagtagttttgcagcgtttgccaataagcttttctcagcattcagccggtcagttgaggaacaggaagaattctaattctggtagagcaaaagtttctgaaagtacagatatagttacatttgctgatgtggctggagtagatgaggcaaaagaagagcttgaagaaattgtggagttcttaaggaacccagaaagatatgttcgtcttggtgctcgccctcctcgtggtgtcttattggtgggtcttccagggactggaaagacacttcttgcaaaagccgtagcaggagaagcagaagtcccgttcataagttgctctgctagtgaatttgttgagctatatgtaggcatgggagcagctcgagtacgtgacctatttgctaaggccaaaaaggaatcaccgtcgattatttttatcgatgagattgatgctgttgcaaaaagccgtgatggtcgatatcgcattgtcagtaatgatgaacgtgagcagacactaaaccaattgctcacggaaatggatggcttcgacaccaattcggctgtcattgtactaggggcaacaaatcgagctgatgttttggatcctgcccttaggcgacctgggagatttgaccgtgtagttatggttgaagctcctgataggtttggaagagaatcaattctaaaagttcatgtgagcagaagagagcttccactgagtaaagatgtagatctagccgatattgctgcaatgacaactggttttactggagcagaccttgcaaacttggtaaatgaagctgctttgttggctgggcgattaaataaagaaattgtggaaaagattgacttcatccatgcggttgagcgatctatagctgggatagagaaaaagcatgcaaaattgaagggtaatgaaaaggctgtcgttgcacggcatgaagtaggtcatgcactcgtgggaactgctgtagcgaaccttcttcctggacagccacgtgttgaggtttgaacttaagcaattactgatagaacaatctgagagaagatgtaatttgacttactttttcaatgctgaatttaac

SEQ ID NO: 119524 - DNA, 3149 bp, Zea Mays
ctctttccttcctcatcttcgtctctttcctcaccccgacccccccgcaccgactcctccacgcgcacgcgcgcggcggcggcggcggagtcgggagaggtccctggtgctgcttctcgctcaacccgtacgctactccttcctctccgtatggcttccgccgccgtggaaaccctcgtctcgttcccaatcgcatcccgtccccgctcgctcctacgccccttcccgcggcgacctgccgccgccgccgccgccgggggatgcgcgccttcgatccggatatccgccgtgccgccgcggggcctcgggctcgcgctggtgcaccgccgcgcgcgccgctgcccgccagcggcgcgcgcgaatgttgagcacggcggcgacggcgcctctggtaacggcgagccgtcgtcctcgtccggggacggcgaccgcgacgcggctgcggactcggggggcgacaccaccggcacgagcaccacgagcgccgcccagacgccgccgccgccctcgtcgaagaggggcgaaaacaagtggcggcggaggctgactaagggaggtggcgtcgggcgctggctatgggagcccatagtccaggggcgggagatgggcttcctcctgctccagctcggcttcgccgtattcgcgctacgcatgcttcgaccggagatcgcgttgcctggctcagagccccgcccgcagaccacgtacgtcagtgtaccgtacagcgacttcctggcgagcatagacaaggaccaggtgaagaaggttgaggtggacggggtgcacgtcatgttccgactccgtccagaggttgagtcccaggtccgtgtggagcagacaccatcacagcgcggaacagatgctgtcgtcgataatgctggagtctcgaggagaattgtgttcaccacgactcgtccagtggacataaagacgccatacgagaagatggtggaaaacatggttgaatttgggtcaccggacaagaggtctggcggcacgctcaattctgcgctggtagctcttatttatgtcgtattgattgcagtagttttgcagcgtttgccaataagcttttctcagcattcagccggtcagttgaggaacaggaagaattctaattctggtagagcaaaagtttctgaaagtacagatatagttacatttgctgatgtggctggagtagatgaggcaaaagaagagcttgaagaaattgtggagttcttaaggaacccagaaagatatgttcgtcttggtgctcgccctcctcgtggtgtcttattggtgggtcttccagggactggaaagacacttcttgcaaaagccgtagcaggagaagcagaagtcccgttcataagttgctctgctagtgaatttgttgagctatatgtaggcatgggagcagctcgagtacgtgacctatttgctaaggccaaaaaggaatcaccgtcgattatttttatcgatgagattgatgctgttgcaaaaagccgtgatggtcgatatcgcattgtcagtaatgatgaacgtgagcagacactaaaccaattgctcacggaaatggatggcttcgacaccaattcggctgtcattgtactaggggcaacaaatcgagctgatgttttggatcctgcccttaggcgacctgggagatttgaccgtgtagttatggttgaagctcctgataggtttggaagagaatcaattctaaaagttcatgtgagcagaagagagcttccactgagtaaagatgtagatctagccgatattgctgcaatgacaactggttttactggagcagaccttgcaaacttggtaaatgaagctgctttgttggctgggcgattaaataaagaaattgtggaaaagattgacttcatccatgcggttgagcgatctatagctgggatagagaaaaagcatgcaaaattgaagggtaatgaaaaggctgtcgttgcacggcatgaagtaggtcatgcactcgtgggaactgctgtagcgaaccttcttcctggacagccacgtgttgagaaattgagtatattgccaaggtcaggaggtgcattaggctttacatacacccctcccaccacagaggatagatatttactctttgttgatgaactacgtggccgtttagtaacacttctgggtgggagggcagcagaggaagttgttttagcaggacgggtttccactggtgcacttgatgacataagacgtgctactgacatggcctacaaagctgtagcagaatacggtcttaatcagcgcatcgggccaatatcacttgctacactgtcaaatggtgggttagatgactctggtggttctccatggggaagagatcagggccatctagttgatctcgttcagagggaagtaaaagcgcttttacagacggcactggaagtagctctttcagttattcgtgctaatcctgcagttttggaaggcctcggagcatatttagaagagaatgaaaaggttgaaggcgaggaacttgaagagtggctaaagtcagttgttgcatcaaaagagttgacctcttttatcagaggacagcaagagcaagttcttcagctggaagcaggctcctagcgtcaggactcttaaaattaattacttacagaagtcttccagcaattagaacatacaatgcgagttccaaggtatgcaatggaaaccttgatactggggacagatctgtggccatgtggtggattgtatgacctctcccacccactcatgctaagacaaacttgggttgggcgcccacccttcgttcgttgaatcatgagctcgagccttagaggagaattttcagaaaaggaaatctacatgcccgagtgaccatgtaaatatttaccattgcagttcgcggacccatgagtaccaaaaaaaagagatgattcatattgacctgtaacattgtaagatcaacctcaggaatatttgaagcggttagttttcacatgttcatagatcgggtcggtgttacacatgtaaaagattctttttttgccctaggttcttgtcctcaccctgttagaagttattttcctctttacaatatgatcctagagatgatcaataggataattaatgcttatacggactatggttcctgtattgatatactctttccaata

SEQ ID NO: 119525 - DNA, 107 bp, Zea Mays
gaatgtcaaatgctaaagattgggggataacaagacaggctcagcttccccaaatggagaaaactggttgcctggtggccatattcaggtcaataaggtttcaagcc

SEQ ID NO: 119526 - DNA, 549 bp, Zea Mays
atgtcaaggattcagatgcagagatgtccgtgcatcacacgctcggcagaagccggcatcggatcaagtgttggattatgcatcagtagatcttcaccatccaaagccaaaatacggaccaagaaaaacaaacaaaacaagattggagatctgctgttactcagtggtggcaataaggttattggttcgattctgccggcaagtgtcctcactgctttcagaagagggagcttggtatcctcatcgcaacaatatgttccaccctccgatggggaaaaaaagcaaacggggatttcatgtagagagaaaatattccgaatagcaaataagcagagaaaaattagatggctcagttcagcgggaaaatcggcatacagatcgatctcatgtagagagagacctgtgatttggtctgttgagcttgaattttaccgagtcgtcactgccatctcacttgatacaaagaactgcttacgacgaacagaaagaacgatgcatccaccattatccggatgtgttctaagcctagagccggcagatctagcttga

SEQ ID NO: 119527 - DNA, 669 bp, Zea Mays
atggatttttaaaatctgtagtgtttaaagaaccagaaatggatttgcttgtttctaattcattttgcttgttggatgtcgatatacacatgcattttcagtcagcttatgatcaaggggacaaataagatcatgccaactctactccatgtactgctggtgtcacagactcacctctgcggcagtatgccctgcctttgctgtgtacttaaatctgctggaggatgatgcatgggcatgcacgacattagattctattactgtttgtttggctcacgataatgatcacagaaaagtggaacaagcactgttgaaaaaagaggccattcagaatttagtgaagttcttccaagattgcccagaacagttttttggccatatattggacgctttcttgaagataataacgaaatcttctaggctaaatacagcaatggctaccaatggtttaacaacattgctcattgcaagacttgaccattcaaatttggtggtcacaaaagtgtggagacttgaattcatataatgttaggcttaacattagtgcaaacagttgtattttagtttagatttagagtacacttatgtgtgcgttgtttgataatgcttatttatgatatattgaatggtacttatttatattatattaattataatgttgttcaatat

SEQ ID NO: 119528 - DNA, 83 bp, Zea Mays
gtcttaaacaaaaacataattcaagacggtttatcagacaaaatgacttaaacaaatacctttttcagatggttataaattaa

SEQ ID NO: 119529 - DNA, 246 bp, Zea Mays
gaaatggaagtaacagagcataatttaaagacacggcttgaaaatgctctgaaggagctagaggctgctcaacataaagcatcaacagcaacctctggaacagctgaaaatgctctactggaagctaagtcagtgactgatcttaaatctaaagatttggaggagaagaaaagggagcttcgtatggtacctcatgcaataatttcactcactacatgctcaattaagaagtctgatatcacttaa

SEQ ID NO: 119530 - DNA, 957 bp, Zea Mays
gattatctcctcaaacaagatatgcaaattgcaaaacccttaaaggatagtattagttctatttgttcataaagttctacagctagttgtttcttgctatgttcatggattgcaatactggataagatcatgatggatgtcgtgtgtgttttaatcaccatttctaaaatttattctattggtaagatgattctaagatacaggtcggagttggattccttgcatatacataaacagataaagaagcaaccggtttataacaaaaatatgtattctgttttgcctgttgcccaattctcttttagtgtagcctacttacaataattaaaagaagagttggtgtctgtttgagtagacagctaagtgcatatataagtatgtgcatgattttgattactaattgtgattttgatgatcttttttttgaagacggtctaacatataagtgcatgatttagatgaacggaattactattgtgctatttctgaagaatcttactattttctcttgccttcttagaacaacatgggaagaagtgatgatgacagtccatcgccgccaagaggtcacaggagaagaactcgcagcccaagtcctcgtggtagttatggaggccatggcaagcgccccacaactaatcttacggtgacgaatcttggtccggattgtaggattccgactctcatcaagtgactcttccccctcacgatgactttgcggacagatgtctcaattatagtggtggagatacgaacaacaatctgatgtcctgatcgagagcgatggagctaatgtttgaacttgtgtgtttgaacttgtgaactaaaaatgtgaactatggatgtgaacttatgtgaatttgtgaacttatgtatttggacttatgtgaatttgtgaacttatgtatttggacttgtgtgaatttgtgatatgaatacatatccatgtgtttgaaa

SEQ ID NO: 119531 - DNA, 180 bp, Zea Mays
gacctctttcgaacgcaagtagccgggagattcggaatcccgcgcgcgagttgggcttggtcagctggcgtcgtagccgcactctgggaggcctgtgggttcgagccgcggagggtaggggtaggggcgggtttcagttgttggcctgttgctgtatttcgcgtggtgatggaatttaat

SEQ ID NO: 119532 - DNA, 96 bp, Zea Mays
cattcagtaatttttctgctacagccagatcttgtagaaaactgtaaaaaaattggttgtgatgtcctagttcttatctagtcactatctcttcat

SEQ ID NO: 119533 - DNA, 92 bp, Zea Mays
cgaaaaggcccatatatttattaaaatcacacttcattccacactttcatatacttgataaagaacacaaagctagagataatactagttag

SEQ ID NO: 119534 - DNA, 1925 bp, Zea Mays
aagaacacaaagctagagataatgctagttagatgtttttttatatctttgaattagattgtgtggtgtaattttacttttgttatgaacattagacaataaactgaacttacgaactttgtatagagctgattatagtctttttccttctaacaaaatgatttataaacgaggtagtcattgcatagctgtggtaactttaatacaaatattaagtttgattttgtacaaatttatttgtcttatcttttatttgttttgttattttttgaatttagggctctaatgtgaatttcgggccaaaaactgaatttcgggccaaaaattgaatttcgggccctaatgtgaatttcgggcttttataatttcggaccgcccgaaataagcccggcacgtttaagcaattacgggccgggccgtgggccgagggctaggcccatgggccggcccggcacggcccgaaattcaaacgggccgggccggcccgaaattcaaacaatacgagccttttcggacttgggccgggccgggccgggcggcccgaatgtacacctatagtactcgacacctttaaaacctaaaaaatcatagggataatatgtgaattttacagtaatatttttttatagaaatatgcatctagaaaacagcgttccaaaagaagcccaattttttttttgaggacacgtaaaaatggacaccaagccttttcttttgtgcctcctgcgcttctcgtgtgccggcggtgccgtcgcttgcctccccgcgtggaccgtcctaagagaagagacgctgccgtgtctccgtcgcaccgaagcaaacgcggggccaacggccaccaaggcctccgcgagggcgaggacagcgatgacccacgcgggacgcgcacgcggctttcgctccgcagctctcgagtatttatcgttccgccccttgaatatctcacgtttgcatctccatccacctgtcctcgcgtctcccttcccagatccatcgactcgctcgggccgcccctcccgtcgtccccgttcgaaggtgcggcagccggcaggcgagcgatttgattcgacatgaatcccgagtagacgattcttatttggacagctatatcagcacaattggggttgatttcaaaattcgcacagtggagcaagatgggaagaccataaaacttcaaatttgggatactgctgggcaagagcgcttcaggacaatcactagcagctactaccgcggagctcatggaatcattattgtatatgacgtgacagaccaagaaagcttcaataatgtgaagcaatggttgaacgagatagaccgttatgcaagtgataatgttaacaagctccttgttgggaacaagagtgaccttactgccaacaaagttgtggcaactgagacagcaaaggcgtttgctgatgagatgggcatcccattcatggagacgagtgccaaaaacgccatcaacgtggagcaggccttcatggctatggctgcatccatcaaggataggatggccagccaaccagccgcggccaacgctaggccagcgaccgtgcagatccgcgggcaacccgtcaaccagaagacgtcttgctgctcgtcctaagattgcctcatttctttggttccttgtgactatttctacggtttgtgcgcgcacgcaaatgtatttgcattattcctgatagcatctattcgttggccagatgattagagagctgaaaatatgttaagaacaataccatagagagaagttcctcagtgctctcgcagcttaaggagcaaacagcaacactttacttcgttttttatactttattatagccgcactgtttattactcgggctacatttgtgaacagcgactgtaatatttttttactctatattcgtagtgagatgaaatcctgtgtgggcaacaaa

SEQ ID NO: 119535 - DNA, 2038 bp, Zea Mays
aagaacacaaagctagagataatgctagttagatgtttttttatatctttgaattagattgtgtggtgtaattttacttttgttatgaacattagacaataaactgaacttacgaactttgtatagagctgattatagtctttttccttctaacaaaatgatttataaacgaggtagtcattgcatagctgtggtaactttaatacaaatattaagtttgattttgtacaaatttatttgtcttatcttttatttgttttgttattttttgaatttagggctctaatgtgaatttcgggccaaaaactgaatttcgggccaaaaattgaatttcgggccctaatgtgaatttcgggcttttataatttcggaccgcccgaaataagcccggcacgtttaagcaattacgggccgggccgtgggccgagggctaggcccatgggccggcccggcacggcccgaaattcaaacgggccgggccggcccgaaattcaaacaatacgagccttttcggacttgggccgggccgggccgggcggcccgaatgtacacctatagtactcgacacctttaaaacctaaaaaatcatagggataatatgtgaattttacagtaatatttttttatagaaatatgcatctagaaaacagcgttccaaaagaagcccaattttttttttgaggacacgtaaaaatggacaccaagccttttcttttgtgcctcctgcgcttctcgtgtgccggcggtgccgtcgcttgcctccccgcgtggaccgtcctaagagaagagacgctgccgtgtctccgtcgcaccgaagcaaacgcggggccaacggccaccaaggcctccgcgagggcgaggacagcgatgacccacgcgggacgcgcacgcggctttcgctccgcagctctcgacgactaccttttcaaacttctgcttattggtgattctggtgttgggaaatcatgcttgcttctcagatttgcagacgattcttatttggacagctatatcagcacaattggggttgatttcaaaattcgcacagtggagcaagatgggaagaccataaaacttcaaatttgggatactgctgggcaagagcgcttcaggacaatcactagcagctactaccgcggagctcatggaatcattattgtatatgacgtgacagaccaagaaagcttcaataatgtgaagcaatggttgaacgagatagaccgttatgcaagtgataatgttaacaagctccttgttgggaacaagagtgaccttactgccaacaaagttgtggcaactgagacagcaaaggcgtttgctgatgagatgggcatcccattcatggagacgagtgccaaaaacgccatcaacgtggagcaggccttcatggctatggctgcatccatcaaggataggatggccagccaaccagccgcggccaacgctaggccagcgaccgtgcagatccgcgggcaacccgtcaaccagaagacgtcttgctgctcgtcctaagattgcctcatttctttggttccttgtgactatttctacggtttgtgcgcgcacgcaaatgtatttgcattattcctgatagcatctattcgttggccagatgattagagagctgaaaatatgttaagaacaataccatagagagaagttcctcagtgctctcgcagcttaaggagcaaacagcaacactttacttcgttttttatactttattatagccgcactgtttattactcgggctacatttgtgaacagcgactgtaatatttttttactctatattcgtagtgagatgaaatcctgtgtgggcaacaaagttcccttgtgactaggttttttttactagaccacccttttggctagttgtgtggtcacattcatctgcgatcgttgcgcccgggtctgttcgtggattgaaaggctcggattaaatctcctagacgggagacaggaatttataatctaactagattatataatccaacaaactaggaagattatataatccaacaaactaggacggatt

SEQ ID NO: 119536 - DNA, 2783 bp, Zea Mays
aagaacacaaagctagagataatgctagttagatgtttttttatatctttgaattagattgtgtggtgtaattttacttttgttatgaacattagacaataaactgaacttacgaactttgtatagagctgattatagtctttttccttctaacaaaatgatttataaacgaggtagtcattgcatagctgtggtaactttaatacaaatattaagtttgattttgtacaaatttatttgtcttatcttttatttgttttgttattttttgaatttagggctctaatgtgaatttcgggccaaaaactgaatttcgggccaaaaattgaatttcgggccctaatgtgaatttcgggcttttataatttcggaccgcccgaaataagcccggcacgtttaagcaattacgggccgggccgtgggccgagggctaggcccatgggccggcccggcacggcccgaaattcaaacgggccgggccggcccgaaattcaaacaatacgagccttttcggacttgggccgggccgggccgggcggcccgaatgtacacctatagtactcgacacctttaaaacctaaaaaatcatagggataatatgtgaattttacagtaatatttttttatagaaatatgcatctagaaaacagcgttccaaaagaagcccaattttttttttgaggacacgtaaaaatggacaccaagccttttcttttgtgcctcctgcgcttctcgtgtgccggcggtgccgtcgcttgcctccccgcgtggaccgtcctaagagaagagacgctgccgtgtctccgtcgcaccgaagcaaacgcggggccaacggccaccaaggcctccgcgagggcgaggacagcgatgacccacgcgggacgcgcacgcggctttcgctccgcagctctcgagtatttatcgttccgccccttgaatatctcacgtttgcatctccatccacctgtcctcgcgtctcccttcccagatccatcgactcgctcgggccgcccctcccgtcgtccccgttcgaaggtgcggcagccggcaggcgagcgatttgattcgacatgaatcccgagtacgactaccttttcaaacttctgcttattggtgattctggtgttgggaaatcatgcttgcttctcagatttgcagacgattcttatttggacagctatatcagcacaattggggttgatttcaaaattcgcacagtggagcaagatgggaagaccataaaacttcaaattgtaagattactatgctgtattgttcttttattcatcatatgtgcatggtttgatgtcttgtgatgccatatgtgacatatgttttcctaggtgaactggaaagtaaaaggtaaaatttatccttttcattatagtcagtagagaaactggagcattaatatctgttgacttatcatctacgaaataagtttgaacgtaatgtaacataagttcccactagttagctgatgaactatggaaatgatatttctactcttcatttttatctaaattttgtttaacctgttacattatctagaagcgcaatttggcatgaagtggtagaattatagctacatcaagagaatgtcataatctagtgttcattggtcaaccaagggaatatcataatctagtattcattggtgaatcaagggggaatgcgttgtttggtggtttcttctctttgcacagttgtttccttttataaaagctgtacatttggggcttcccttgcttaaacacaattatgtttatgaattatgatataactcttgcttattccctcggttgacatctttttgtaattgctgcagtgggatactgctgggcaagagcgcttcaggacaatcactagcagctactaccgcggagctcatggaatcattattgtatatgacgtgacagaccaagaaagcttcaataatgtgaagcaatggttgaacgagatagaccgttatgcaagtgataatgttaacaagctccttgttgggaacaagagtgaccttactgccaacaaagttgtggcaactgagacagcaaaggcgtttgctgatgagatgggcatcccattcatggagacgagtgccaaaaacgccatcaacgtggagcaggccttcatggctatggctgcatccatcaaggataggatggccagccaaccagccgcggccaacgctaggccagcgaccgtgcagatccgcgggcaacccgtcaaccagaagacgtcttgctgctcgtcctaagattgcctcatttctttggttccttgtgactatttctacggtttgtgcgcgcacgcaaatgtatttgcattattcctgatagcatctattcgttggccagatgattagagagctgaaaatatgttaagaacaataccatagagagaagttcctcagtgctctcgcagcttaaggagcaaacagcaacactttacttcgttttttatactttattatagccgcactgtttattactcgggctacatttgtgaacagcgactgtaatatttttttactctatattcgtagtgagatgaaatcctgtgtgggcaacaaagttcccttgtgactaggttttttttactagaccacccttttggctagttgtgtggtcacattcatctgcgatcgttgcgcccgggtctgttcgtggattgaaaggctcggattaaatctcctagacgggagacaggaatttataatctaactagattatataatccaacaaactaggaagattatataatccaacaaactaggacggatt

SEQ ID NO: 119537 - DNA, 2294 bp, Zea Mays
aagaacacaaagctagagataatgctagttagatgtttttttatatctttgaattagattgtgtggtgtaattttacttttgttatgaacattagacaataaactgaacttacgaactttgtatagagctgattatagtctttttccttctaacaaaatgatttataaacgaggtagtcattgcatagctgtggtaactttaatacaaatattaagtttgattttgtacaaatttatttgtcttatcttttatttgttttgttattttttgaatttagggctctaatgtgaatttcgggccaaaaactgaatttcgggccaaaaattgaatttcgggccctaatgtgaatttcgggcttttataatttcggaccgcccgaaataagcccggcacgtttaagcaattacgggccgggccgtgggccgagggctaggcccatgggccggcccggcacggcccgaaattcaaacgggccgggccggcccgaaattcaaacaatacgagccttttcggacttgggccgggccgggccgggcggcccgaatgtacacctatagtactcgacacctttaaaacctaaaaaatcatagggataatatgtgaattttacagtaatatttttttatagaaatatgcatctagaaaacagcgttccaaaagaagcccaattttttttttgaggacacgtaaaaatggacaccaagccttttcttttgtgcctcctgcgcttctcgtgtgccggcggtgccgtcgcttgcctccccgcgtggaccgtcctaagagaagagacgctgccgtgtctccgtcgcaccgaagcaaacgcggggccaacggccaccaaggcctccgcgagggcgaggacagcgatgacccacgcgggacgcgcacgcggctttcgctccgcagctctcgagtatttatcgttccgccccttgaatatctcacgtttgcatctccatccacctgtcctcgcgtctcccttcccagatccatcgactcgctcgggccgcccctcccgtcgtccccgttcgaaggtgcggcagccggcaggcgagcgatttgattcgacatgaatcccgagtacgactaccttttcaaacttctgcttattggtgattctggtgttgggaaatcatgcttgcttctcagatttgcagacgattcttatttggacagctatatcagcacaattggggttgatttcaaaattcgcacagtggagcaagatgggaagaccataaaacttcaaatttgggatactgctgggcaagagcgcttcaggacaatcactagcagctactaccgcggagctcatggaatcattgtaagttggccacctgaactagcaacttctgaaacttgtcaaccatattgatcatattacattattggcttattgttggctttcagattgtatatgacgtgacagaccaagaaagcttcaataatgtgaagcaatggttgaacgagatagaccgttatgcaagtgataatgttaacaagctccttgttgggaacaagagtgaccttactgccaacaaagttgtggcaactgagacagcaaaggcgtttgctgatgagatgggcatcccattcatggagacgagtgccaaaaacgccatcaacgtggagcaggccttcatggctatggctgcatccatcaaggataggatggccagccaaccagccgcggccaacgctaggccagcgaccgtgcagatccgcgggcaacccgtcaaccagaagacgtcttgctgctcgtcctaagattgcctcatttctttggttccttgtgactatttctacggtttgtgcgcgcacgcaaatgtatttgcattattcctgatagcatctattcgttggccagatgattagagagctgaaaatatgttaagaacaataccatagagagaagttcctcagtgctctcgcagcttaaggagcaaacagcaacactttacttcgttttttatactttattatagccgcactgtttattactcgggctacatttgtgaacagcgactgtaatatttttttactctatattcgtagtgagatgaaatcctgtgtgggcaacaaagttcccttgtgactaggttttttttactagaccacccttttggctagttgtgtggtcacattcatctgcgatcgttgcgcccgggtctgttcgtggattgaaaggctcggattaaatctcctagacgggagacaggaatttataatctaactagattatataatccaacaaactaggaagattatataatccaacaaactaggacggatt

SEQ ID NO: 119538 - DNA, 2208 bp, Zea Mays
aagaacacaaagctagagataatgctagttagatgtttttttatatctttgaattagattgtgtggtgtaattttacttttgttatgaacattagacaataaactgaacttacgaactttgtatagagctgattatagtctttttccttctaacaaaatgatttataaacgaggtagtcattgcatagctgtggtaactttaatacaaatattaagtttgattttgtacaaatttatttgtcttatcttttatttgttttgttattttttgaatttagggctctaatgtgaatttcgggccaaaaactgaatttcgggccaaaaattgaatttcgggccctaatgtgaatttcgggcttttataatttcggaccgcccgaaataagcccggcacgtttaagcaattacgggccgggccgtgggccgagggctaggcccatgggccggcccggcacggcccgaaattcaaacgggccgggccggcccgaaattcaaacaatacgagccttttcggacttgggccgggccgggccgggcggcccgaatgtacacctatagtactcgacacctttaaaacctaaaaaatcatagggataatatgtgaattttacagtaatatttttttatagaaatatgcatctagaaaacagcgttccaaaagaagcccaattttttttttgaggacacgtaaaaatggacaccaagccttttcttttgtgcctcctgcgcttctcgtgtgccggcggtgccgtcgcttgcctccccgcgtggaccgtcctaagagaagagacgctgccgtgtctccgtcgcaccgaagcaaacgcggggccaacggccaccaaggcctccgcgagggcgaggacagcgatgacccacgcgggacgcgcacgcggctttcgctccgcagctctcgagtatttatcgttccgccccttgaatatctcacgtttgcatctccatccacctgtcctcgcgtctcccttcccagatccatcgactcgctcgggccgcccctcccgtcgtccccgttcgaaggtgcggcagccggcaggcgagcgatttgattcgacatgaatcccgagtacgactaccttttcaaacttctgcttattggtgattctggtgttgggaaatcatgcttgcttctcagatttgcagacgattcttatttggacagctatatcagcacaattggggttgatttcaaaattcgcacagtggagcaagatgggaagaccataaaacttcaaatttgggatactgctgggcaagagcgcttcaggacaatcactagcagctactaccgcggagctcatggaatcattattgtatatgacgtgacagaccaagaaagcttcaataatgtgaagcaatggttgaacgagatagaccgttatgcaagtgataatgttaacaagctccttgttgggaacaagagtgaccttactgccaacaaagttgtggcaactgagacagcaaaggcgtttgctgatgagatgggcatcccattcatggagacgagtgccaaaaacgccatcaacgtggagcaggccttcatggctatggctgcatccatcaaggataggatggccagccaaccagccgcggccaacgctaggccagcgaccgtgcagatccgcgggcaacccgtcaaccagaagacgtcttgctgctcgtcctaagattgcctcatttctttggttccttgtgactatttctacggtttgtgcgcgcacgcaaatgtatttgcattattcctgatagcatctattcgttggccagatgattagagagctgaaaatatgttaagaacaataccatagagagaagttcctcagtgctctcgcagcttaaggagcaaacagcaacactttacttcgttttttatactttattatagccgcactgtttattactcgggctacatttgtgaacagcgactgtaatatttttttactctatattcgtagtgagatgaaatcctgtgtgggcaacaaagttcccttgtgactaggttttttttactagaccacccttttggctagttgtgtggtcacattcatctgcgatcgttgcgcccgggtctgttcgtggattgaaaggctcggattaaatctcctagacgggagacaggaatttataatctaactagattatataatccaacaaactaggaagattatataatccaacaaactaggacggatt

SEQ ID NO: 119539 - DNA, 652 bp, Zea Mays
tcgaatgtgtccatagatgagaaacactttgatctgcttaactattagaaggtgaatagtcatacatttcctgtggtatcttctatggcaaagaggttcttggctgttccggctagcagtgtgtcatcaaaatccacttttagcactgggggtatgatccttgatgattacaggagttcattgaagccagcaatagttcaggatttggtgtgtgcttctagttggatacgtgggtcttgaagttcacctattcttgtaattggagaaggtgatgatggtgacatcgagtccgtggaatttccaaagtgtgtggtggcaagtaattaggcacatggtcacatactcacatggaggagatggaggagagggagagctaggacccgagagaggagacaggagagggacatggtcattatattttgttggctgcaactgtaagtctgcaattgttggttgcaacttgtaagttgcaactgttgccaacctggcatattttgttggctccctacaactttgtcctgaactcctgaacctgaagtcctgatctataattgttggctgcatcactacatgtattttggttctagaactgaaactctgaaagtatggaattatggattatggaatgaaatggaactattatgaactataa

SEQ ID NO: 119540 - DNA, 1302 bp, Zea Mays
agcaaatctcgtgggcgtgtagcgtacgccacctgcgtccgcgccttttccatttccaccccgatcgcattttaccctactccccgccgcctgtccctgcgctagtcgacactcgacaggctcggtttccgccctcctctcccaccgccgcgcaccgagaagatggggaagcggtggatcccgctggaggccaacccggacgtcctgaaccagttcatatgggggctgggagtccacgaggaggatgtgcagttctgcgacgtctacggccttgacgatgagctgctcgctatggtgccccagcccgttctcgccgtcctcttcctctacccgctcacctccctggacgaggagaaagaagaatcaagtgtttctgctgccacatcgacctcagcgggcaagttgaggggtcctattttgagaagttctataagcaaacggctgatatggatccagctcagcgtgctgcctttctcgaggaagatgatgagatggaagatgcacattctgttgctgcatctgctggtgacactgatgctaatgttgatgttaatgaacattttgtatgtttctcctgtgttgatggtgaactttatgagcttgatggacgaaaatcacaacccacatcccatggcccttcatcacctgaaaccttgttgcaggatgctgcaaaagtcatcaaagctagaattgcagagaaccctaactcgatgaacttcaacgtcatggctctttcaaagaagtgaagtgtactgtgatggatggattttctttggcagaatacgggcctcttttcctttcgcttccgctgggctgcaccgagtggaaggtttgcatgggcaaacatagggggaaaaaactttatatgacctgagatgtttggttgatgactcgatgtattctcgtgccttcatggagagagaaatgactgttcacgatttcaactttttccggtgtattagtagtcgaatggagacttgcattggaagagtttcactttgctgtatctgaaccattctagcttcctcggcaggttgattccataaagctagcatttctatgttttccgtgcaaacgcatgtagttttctgtagaatgtaacttattaaacggaattggtgacacctggctaacgaatggaaacattatgtgggggattgcatacatttacaaagggtaacaagtaacaacagccaaaaacaccaggacttttttttgtggtcttattcgtatttgtattttctctctgtgttctgtattctatgaatctatgtataggtgctagagacatgaaaaacaaaa

SEQ ID NO: 119541 - DNA, 1425 bp, Zea Mays
agcaaatctcgtgggcgtgtagcgtacgccacctgcgtccgcgccttttccatttccaccccgatcgcattttaccctactccccgccgcctgtccctgcgctagtcgacactcgacaggctcggtttccgccctcctctcccaccgccgcgcaccgagaagatggggaagcggtggatcccgctggaggccaacccggacgtcctgaaccagttcatatgggggctgggagtccacgaggaggatgtgcagttctgcgacgtctacggccttgacgatgagctgctcgctatggtgccccagcccgttctcgccgtcctcttcctctacccgctcacctccctggacgaggagaaagaagaatcaagtgtttctgctgccacatcgacctcagcgggcaaggaattgagcaagaaagtatactttacgaagcagactgttggtaatgcttgtggaacagttggtgttattcatgcaataggaaatgcaacatctcaaatcaagctagttgaggggtcctattttgagaagttctataagcaaacggctgatatggatccagctcagcgtgctgcctttctcgaggaagatgatgagatggaagatgcacattctgttgctgcatctgctggtgacactgatgctaatgttgatgttaatgaacattttgtatgtttctcctgtgttgatggtgaactttatgagcttgatggacgaaaatcacaacccacatcccatggcccttcatcacctgaaaccttgttgcaggatgctgcaaaagtcatcaaagctagaattgcagagaaccctaactcgatgaacttcaacgtcatggctctttcaaagaagtgaagtgtactgtgatggatggattttctttggcagaatacgggcctcttttcctttcgcttccgctgggctgcaccgagtggaaggtttgcatgggcaaacatagggggaaaaaactttatatgacctgagatgtttggttgatgactcgatgtattctcgtgccttcatggagagagaaatgactgttcacgatttcaactttttccggtgtattagtagtcgaatggagacttgcattggaagagtttcactttgctgtatctgaaccattctagcttcctcggcaggttgattccataaagctagcatttctatgttttccgtgcaaacgcatgtagttttctgtagaatgtaacttattaaacggaattggtgacacctggctaacgaatggaaacattatgtgggggattgcatacatttacaaagggtaacaagtaacaacagccaaaaacaccaggacttttttttgtggtcttattcgtatttgtattttctctctgtgttctgtattctatgaatctatgtataggtgctagagacatgaaaaacaaaatgccaacgaaaaaaaga

SEQ ID NO: 119542 - DNA, 1951 bp, Zea Mays
gaaacagtttattcacatctggctcccattttcttatccttccatttaatggtatgaaagcaaacagatacatgtgcatcttgtctactttttgagttgtgcataattttctgatggacatcaatgcacatgtatatttgtatcaaatttgaacaaatgttaatttatttgaatttcttttttaccttgagaatatccctgagtcaatgttggatctattttttttctatccctgaatttgtataggaattgagcaagaaagtatactttacgaagcagactgttggtaatgcttgtggaacagttggtgttattcatgcaataggaaatgcaacatctcaaatcaagctaggtaactatgaagatttgcattgagctaatggtgtactgtcttaaattttacaagttgctgttttgagtcactacgagtctatgacctaatatagaaggtcaaacttctgtttcttatgccagttcagctagtttgccctaatgtaactagtaactagtaggcaataggcattcaggtctatgtacaaacagttagtactatttatgatatctggcttcagagtaaatactttgcttggatttatggaacttcagtctgtcctcttgtcttggacactagtcaaacttaaatttttttgacttaatcaactgagtttagcttgatacctgagggcatggttactggccaatcagcatgttttggagacaaactacaatgatactctattcagctccttgtctgttttgccttatgtttccatgatctgtcatcataaattggaaagttatcctattctgatcagatttttttttgcgtaatattattgatgtatacttcatattttcatgaaggtaagtattggcgatttatgacttgtctcagtagctatgcacacttttctctctctgtatgttgtgaaattcaatgtgttttcatgaacacacatgttaaatggagtagtttgaatttaaattacatttgacttgcttgtaacatgacttcatgggtaccttatttgcagttgaggggtcctattttgagaagttctataagcaaacggctgatatggatccagctcagcgtgctgcctttctcgaggaagatgatgagatggaagatgcacattctgttgctgcatctgctggtgacactgatgctaatgttgatgttaatgaacattttgtatgtttctcctgtgttgatggtgaactttatgagcttgatggacgaaaatcacaacccacatcccatggcccttcatcacctgaaaccttgttgcaggatgctgcaaaagtcatcaaagctagaattgcagagaaccctaactcgatgaacttcaacgtcatggctctttcaaagaagtgaagtgtactgtgatggatggattttctttggcagaatacgggcctcttttcctttcgcttccgctgggctgcaccgagtggaaggtttgcatgggcaaacatagggggaaaaaactttatatgacctgagatgtttggttgatgactcgatgtattctcgtgccttcatggagagagaaatgactgttcacgatttcaactttttccggtgtattagtagtcgaatggagacttgcattggaagagtttcactttgctgtatctgaaccattctagcttcctcggcaggttgattccataaagctagcatttctatgttttccgtgcaaacgcatgtagttttctgtagaatgtaacttattaaacggaattggtgacacctggctaacgaatggaaacattatgtgggggattgcatacatttacaaagggtaacaagtaacaacagccaaaaacaccaggacttttttttgtggtcttattcgtatttgtattttctctctgtgttctgtattctatgaatctatgtataggtgctagagacatgaaaaacaaaatgccaacgaaaaaaaga

SEQ ID NO: 119543 - DNA, 1014 bp, Zea Mays
atggaccggtggaccggcgtcgtctacgtcccactctccagaggcggacccctcttccgcgtcgctgcctcgctcctcctctcgccagccaaaacgctcgccgttccacgagtcaacgcgatccttttcacgggcgaccgcgtccgcggcacgggcgatccggtgatcgagcggctctctgacgccgcccacctggctggggtcctcgccgggaagctccctggggaggccaacgcgtgggtggtcgacgccgcgcgctttgctgggccgtttgcggtgtaccgagagctcgttccgaccgtcgacgccgctggagaccccaaggggtatgaccccactggcttccccgccgccgccggtgttgccaacatccttgcacgcagcattggtgagatacagaatcaagtcccggggttgtcggcgaaggattcggctggcaaccagcaccctccatcctaccatccaccggctaggactatcatccttggcttcagcaagggtggagtggtggtgaaccagctcgtgacggaactttctcggtggggggcatcaggatcaacgaaccaggcggcggcggccgacgttccacgaccagcagcagcaggtccaggtccaccaccccatccgacccagaacgaccttcttctcctgggggctcctactcggagcagcgacgacctgctgtcaagtatctccgagctccactacgtggacgccggcctcaaccgcgccggagcgtacgtggccgaccgcgcggtgatcgggaggatacgcgagcacgtcgtacgcgccggcgacaagagcctccgcttcgccctccacggtaccccgaggcagtggtgtgatccgagccgcccgtggatccgggaggagaaggacgcgatggtccaggtactcgcggacgaggcccggaggagcgaggggaggcttgtgctgtctgagaagctgtatttcgagggcagacctcgcagcctgctcatgcattttgaggtcttggaagcgatggatatataa

SEQ ID NO: 119544 - DNA, 1899 bp, Zea Mays
cggatgtgttgctactcccggtgtttggcggcgctcaatcaccaaaggttctgacaccacgttggactccccttcctcctcgtccgcgacctccgcagggtggctgttgcacttgcacctgcaccgtagtggggattccagcttccaccactgccccccgtccccgtcccggcgccggcagtagctcggaggccgggaccacgctcggtggcgtgtcgtacgtcagcacgcccatcccgacgacgacgcgttcgattcaggcggcgacaaatacctgctggccaagacctatttcgactgccgggagtaccgccgcgccgagcacgtgctgcagaaccaggtcggtcgtaaggctgtgttcctgcgatgctacgccttctgcatgagtgcatgtctggagggaagcggaaaatgctgttaatcaggaactagttgctttggagaaagagctctcaacacaccgaagaactggctctattgattcgtttggactttacttgtatggcattgtcctacatgataaaggatgtgaaggtctaactcgaaagatcttggtagaacctgtcaatagctatccttggaactggagtgcttggtcagagctacaaactttatgcaccagcagtgacattttaaacaaattaaatctgaagaatcgctggatgaaagacttctttcttgctagtgcatatctggaactagagacgcatgaagaagacttctttcttgctagtgcagattctttctttggcttgtcttgcacaatagatgctggaccgcagaccgtcttgctaaaagaggactttcccatcccagtgcgtgtcccctttgtgaccaagaagaggaaacaatacaacatcttttcatctcttgcgtctttgcaagacagttctggtacttcttgttgagcaggtctgggttgcctaatctttcaccggacaacgctttttgcagcctagatgactggtggagcagggctgtggagaagattccccgtgatctccaatcaggagaaggagactgctaaaaatatattgcaagggataaaaatgttacagtcaggatttccatcaatggatattgaccattttgcactgtaaagtccacccgcagataagttggaacattggacagtaagtgtcaagaagtcaatagccaaaaagccaacagccggaagtcaaaagctagcttcgagccaaaatcccaaaactgcagtacaaacaaacaggccctgaagggaatgattctaacgagggctgcccaactgatggaagctcaattgcacatctcgatcgggaattacttccaatcttcggtcacaggctcacagcgtgatgcttattgtttgtatcctcgtcacgagactccatgctgctggatacgatgacctaccgcgcatgatgctggctcgtagttcctggagcttggcaacaaggagaaccaggcgcctacatggcgcgaagatgagcgtcattggaatgagccagacccctaatgcaagtatcaacatagctgtcttctgtgagtagagctctaaatatctgcgggtttggcttccttcaccggacagctatctggatagtgttctccccatggttgcttgcatatataagcttcattggaagaccttgccttgccttgcgtgcaatgtgcatgtcaaattattggttatctgtttatcagcacacttgtccaatgccttacctttgacatttcgtaaaactaagcactgcagattttaaaataaaaggctagagtgtagggcaacggtgtggtagtactttgcacagtgtgcatgatgtgctactggaataaaacaagtctgtttagtgatgatgcgcgatgcaagttgtcattttagcctacgtcaggatcgcgtgctgctggtttctcacccta

SEQ ID NO: 119545 - DNA, 1066 bp, Zea Mays
ttttagcaccacctctcatgactatcacatttctttcgggaaagcagaaaaaaatctattacccatgaggccatgatactttccactttgacgaagcgaaattgttaattcctcccttccagtatatagctcgctcgctcacactcggagctcgtaacaaagtcatcactcatcatcacatgagcttgcttgtgactgccagctttgcccagtgttcatcgcccatggaagagcgggtactgttcccggtgtccgattccagcaccacctgcagcagctctggctgtaccggccccaactcccctgtctcgtcatcgcagtatttggacgacaccagcggcggcgctagcagctcgagcagccggaagcggccgcgccgggagctgaagcatccaacgtaccgcggcgtgcgcatgcgtgcgtggggcaagtgggtgtccgagatccgggagccccgcaagaagtcgcgcatctggctgggcaccttcgacacccccgagatggccgcgcgcgcgcatgacgtcgcggcgctcgccatcaagggccgcgccgcgcacctcaacttcccggagatgtcccacgagctgcctcgcgccgcatcggcggcccccgaggacgtgcgtgccgcggcggcgctcgcggctgcgatggagatggagagcgtggcgccgcccacttctagcgagtctcgcgacggcgcctgcaaaaatgacgaaaacgaagggccggccgcatctagctcgtccggcaacaacgccgacaatgcccagaacgaagagcgggctgcgccgtctgaccattcgatgctggctgacggtgacgggcacatccttaatctcgcggtcttcgagctgccggacatcctactcgagttcggcttcgcgctgccgctgccgccgccgtcgacgtcttgtagctatgatttgtcctgggacgagccgttgctgctctgggagcactgacgagcaagagggggcaacgtgacatgcataccaatgtgaagttagataggtgcagctgatgatcccatacatgcatacttttactaatcagcattgattcgttc

SEQ ID NO: 119546 - DNA, 1058 bp, Zea Mays
gctccggtagtctcagctacctcaccacaccacgccactcggctcctcctcgcacagtcacactcctcccggccggcagcagctctctactgccaaccaaccaactccaccccgcagcatcaggagtacgtacgtatagggacgagccaaggagccatggccatggacgactcatcctccggctccgagcccacctcctcgtcctccgcggaggctcctgcgtccccgggtaccaccgcgtcgtcgtcctccgactcctcctcctcctcctccgccacggcggccagcagcaagaagcgccggcgcaccacggacgggcagcaccacccgacgtaccgcggcgtgcgcatgcgggcctggggcaagtgggtgtcggagatccgggagccgcgcaagaagtcgcggatctggctcggcaccttcgccacggccgagatggcggcgcgcgcgcacgacgtggccgcgctggcgatcaagggccgcgccgcgcacctcaacttcccggagctcgcggacgagctcccccgcccggccaccgccgcgcccaaggacgtccaggccgccgccgcgctcgccgccgccgcagacttcccggcgcccgccgccaataataatgcagccggcgccagggaccccgatggcggcgcctcgccggcggtggcaccgctggacgacgacgcgctgttcgacctcctccccgacctgctcctcgacctcagacacggggcctcctcgtgccagctctcgtgcgcgccgtcgtggccgtacgacgacgtgtccttctccggcaccgccgccgccggcgcgttccgcctggaggagccgctgctgtgggactattgagtccgataaaaaaaaacacgacgatcaggttaggccatgcggcttcgagctgcatcgtacttatgtggctatggactgtaaattgcggcagtggaccacaagagagcgtcgatgcgaaccatgcagcgttggaccagcagaaatggaccctaattagagccatttcttttctcctttgcgtctgctcctccagatttagaaagcaaaccatgtat

SEQ ID NO: 119547 - DNA, 1368 bp, Zea Mays
gccgagcaacaagctcgtttccgcatacgcccaaggcgaggcatttcatcgaacataacgaccccccgttccaaaccatgccgctcacgaagctccacccctccctcgccgccgcctccacgctgaccccgaagcatagcctgaacgcaaaccgcgttgtggccctgaccccgtcggcgtcccaccgcagcggcggtctccgggtctccgccgcctcggtggcggcggcgcagcccacaccggcgtcacctgcagcgggcgctgcggcggcactgagccgcgtggacgtgctgtcggaggcgctcccgttcatccagaggttcaagggcaagacggtggtggtcaagtacggtggcgcggcgatgaagtcgccggagctgcaggcgtcggtgatccgcgacctggtcctgctgtcttgcgtcggcctccgccccattctcgtccacggcggcgggcccgagatcaactcctggctggcgcgcgtcggcgtggagcctcagttccgcaacgggctccgcgtcaccgacgcggtcaccatggaggtcgtggagatggtgcttgtgggcaaggtcaacaagcagctcgtgtccctcatcagcctcgcgggtgccaccgccgtcgggctgtgcggcaaggacgcgcgcctcctcaccgcgcggccctcccctgacgccgcctccctcggcttcgtcggcgaagtgacgcgcgtggaccccgccgtactccaccccatcatcgcgtccgggcacatcccggtcatcgccaccgtagcggccgacgaggccgggcaggcttacaacatcaacgccgacaccgccgccggggagatcgcggcagcggtgggagccgagaagcttctgctcctcacggacgtgtccggcatactggcggaccgcgatgatccagggagcctggtgagggaggtggacgtcgccggggtgagacggatggtggccgaggagaaggtcggcggcgggatgattcccaaggtggagtgctgcatccgtgccatcgcccagggggtgcgcaccgccagcatcatcgacggccgcgtcccgcactcgctgctgctcgagatcctcacggacgagggcaccggcaccatgatcaccggataaagctgccttgttatttgtttgcaagagggggtttgtgcgacacattgacatcggttggaattgttttgcacaacgcacccaacggtctgttttttcgcaaacgaaatatgagcttttaaactcaaccaaatataagtgtctttccatgagatatctgagatttatgttgttcaaggaacgaatcaaatcaaagtcagcatgtaactttatttattatacaaataattttattatgctggccatttcaaca

SEQ ID NO: 119548 - DNA, 915 bp, Zea Mays
atgcatacacaaccattaattgaacgtggcgaggagcaaaagcaaacgacgacggttttgaatccattcatccagagcggagatggagtggtgaataaattaggcgtagtcctggtccgcgacctgctggtaggagccgccaatgaagacgtcgccgtagacgaggccagcgaggccgccgccgacgagcgggccgacccagtagacccagtttccggcgaagtcgcccgcggcgacggcggggccgaaggagcgggcggggttcatggagccgccgctgaagggccccgcggcgaggatgttggcgccgacgatgaagccgatggcgatgggcgcgatggtgccgagcgagcccttcttggggtcggcggcggtggcgtacacggtgtagacgagcgcgaaggtgatgacgacctcgaacacgacgccttccagctcgctgatgcccgcgacggcgtgcgtcgggatggccttgccgtgggtgacgaacccgaggagcaggcacgccacggtggcgcccagcagctgggccacccagtagaagacgcccgtcaggatggtgatgtggccgcccacggccagcccgaacgtcacggccgggttcaggtggccgcccgagatgttcgccgcgacggacacgcccacgaacagcgccagcgcgtgcgcgatcgcgatcgccaccaggcccgccgggtccagcgcgccgccattcgtcagttgcccgtaggcgatggcggaaccgacgccggcgaagacgaagaggagggtggcgatgaactcggccacgtaggccttgatggaggtggcgctgaaggagtcgccgacgcttccgaaggcgagcttcaccatcttgtcttgcttgattgcgctcttcgcggccggccggaagacttgcttggcgcgcgctcgatctga

SEQ ID NO: 119549 - DNA, 2939 bp, Zea Mays
cccgtctccaaggaaagcgaaccattctgatcctgcaacccgtggcgccgccgccgccgcatcgcattgcccggacgccaaaacctagctcctgaactctcctcggctcctcgcccacctctcgctagccgttcccgctctgcagtctccgtggccggacgccgcggcgacatggcatcgacctgtttccgcgccgccgcccgcgtggcctccgccgccggccgctcggcggcggccacccgatcggctccctccgcggcccgtgccgccgccgccgcccaccgcgcctcgtccttctccaggatgccggtggagctcgggtgctgcgcgggattgtcgctgctgccgctgcacagcgcggtggcggcggccaggctgacgtcgcggctgagcacggcgtcgagctgccgtgctctctctcagggtatcctctgttgcacctatcccgggctttaacatcgtaagattattatgctcttgtccgtgtttgctttccatttggttgaacattgcgtccgtgtattttcttttatagtagtttcttagtttactgcgtgcttgtttgatagcagtatgtgtcgaaaacaaatgtcattcattgttgtattgtaacagcgaaatgtcatcctgaccattttaactcgtcaacgatcatgttcaacacaaaaccacttccattttcgtgaaagctgcctgctgctctttaacacacaacacatgaataccttatggtttctgaatggagaagtacatataaacaatgaagccttgaatgctggatgcaaacacctttcattgtacacattaaaaatcttgccttgaacgctggatgtaacttgcaagcactgctctgaactctgaatgcaagtacatataaacattttgatggctatatttaagtggaaatgatcatgtcctttagatggtttctatattctgacgattcttgtgcatatagcctatatagggaaactaatcggttgcccgtctcttaatacagtttctatatttacaatatctatttttttgtagaacacaaacaaatatgtattctagtggttagaagctaagcctgtgagagaaagggttagggttcgaaccctaggctctgttttttttcttttctggcggtgcacgtggtagggaggcgctcgaagaaattctcacttaaatatagtagagaaaatgccgaataatggtgtgactatatggagtaccgtcggatttactagcagtgtttcaccatacattgaaactatatggagtaccggcagatttctttattatctttcccttcatagggatatttttctttgatgggtaggaacaaagatgtagcagattcctagtaaacccctttcatatttcagtctctttgggaggttgtttagtagctcaatacatctcaaatgctgatgctcggtagaaaaaaaatctcacttgttgctttgcagttcaggacaagataatgttttccatgctgtgcgttttttgagagattcgcttattcaaaaaaaattggtgggttgaggtcaattaagttaagacatttggtttctgcaggcactgctgcaggcacatgactttgataaaagatattaccgggagcttgctgttttgcttcatacaatcatgaagaatgagtactttaacactgaaattgtaatggaaggctagtgttatgttatgtacctagcattactagttgcctctgttgaggaataccttgatgcaataatgtagcgtcctttttgaatgttctctacagtaattgatagttcactacttcacttgagtcaatatgtctgtgtacagtgcttgaattatcgtttatgcaagtctgctctttttttttggcatttttgagactcctggttgcatcctggtgtgtgctttcttgtttttttggtattcaacagagatttgatctggttgctgttgtagtttaccgtatggttactcttcttttctcagatgaaaacgatggtacgtgaaacatttgcccagtgtcttaaggtgggtggtgcttggatgtttggcaaagatgcacactcttgctaccacagcaagcacatgtagtcatagagcttatgatttagagtcaaatcttgtaaagtccttttgcaactgtggggggctaacacaacaactttgtatgcttaaagcttataattaaagaatgattcagtccaatcctctgatgtatgctttatttctttgttttatatagagatgggtctatccgttcgaaggtgataaatcgctggaagacttgctcatgtcatgctgttggactcaaatcatttctatagattagtcatctaaatgaacatctggagcactacacttcatcaccccttcgacaatcgtggctatcttagatttttttcccccaaggttttgagttcatgccttgtgagatatcatttgatgaaaatatgcaaggacggtttgccgacgtctgggctgtattcagccagtacaattctgcgttaaaaggtggttgatgatacctgaggattgtcattttgcgttaaaaggtggttgatgattatgttactatatgtattgcgtatgctttcttttgtttcaaatttttgaataaggtgacccgaacctgaacgtggctcgatctctagtgaacgctttgagcctccgggtttgctttggtatttttcttggttcagttttgcattggattgcttccttgtttatatattttgaaaaaaatacattgtggattcaaattttagccacatggctatatattcaaattccaatgggtaagctacatcacatcacatgcttacaactaggttgaggaaactattaaaatacgcaaggaaaactttgattgatttgtgtgacgaagcactcaaaacacaagtgatttattctagtttggaggtcaaagacctatttcatcggtgttcttcgat

SEQ ID NO: 119550 - DNA, 1757 bp, Zea Mays
gtggcgccgccgccgccgcatcgcattgcccggacgccaaaacctagctcctgaactctcctcggctcctcgcccacctctcgctagccgttcccgctctgcagtctccgtggccggacgccgcggcgacatggcatcgacctgtttccgcgccgccgcccgcgtggcctccgccgccggccgctcggcggcggccacccgatcggctccctccgcggcccgtgccgccgccgccgcccaccgcgcctcgtccttctccaggatgccggtggagctcgggtgctgcgcgggattgtcgctgctgccgctgcacagcgcggtggcggcggccaggctgacgtcgcggctgagcacggcgtcgagctgccgtgctctctctcagggtatcctctgttgcacctatcccgggctttaacatcgtaagattattatgctcttgtccgtgtttgctttccatttggttgaacattgcgtccgtgtattttcttttatagtagtttcttagtttactgcgtgcttgtttgatagcagtatgtgtcgaaaacaaatgtcattcattgttgtattgtaacagcgaaatgtcatcctgaccattttaactcgtcaacgatcatgttcaacacaaaaccacttccattttcgtgaaagctgcctgctgctctttaacacacaacacatgaataccttatggtttctgaatggagaagtacatataaacaatgaagccttgaatgctggatgcaaacacctttcattgtacacattaaaaatcttgccttgaacgctggatgtaacttgcaagcactgctctgaactctgaatgcaagtacatataaacattttgatggctatatttaagtggaaatgatcatgtcctttagatggtttctatattctgacgattcttgtgcatatagcctatatagggaaactaatcggttgcccgtctcttaatacagtttctatatttacaatatctatttttttgtagaacacaaacaaatatgtattctagtggttagaagctaagcctgtgagagaaagggttagggttcgaaccctaggctctgttttttttcttttctggcggtgcacgtggtagggaggcgctcgaagaaattctcacttaaatatagtagagaaaatgccgaataatggtgtgactatatggagtaccgtcggatttactagcagtgtttcaccatacattgaaactatatggagtaccggcagatttctttattatctttcccttcatagggatatttttctttgatgggtaggaacaaagatgtagcagattcctagtaaacccctttcatatttcagtctctttgggaggttgtttagtagctcaatacatctcaaatgctgatgctcggtagaaaaaaaatctcacttgttgctttgcagttcaggacaagataatgttttccatgctgtgcgttttttgagagattcgcttattcaaaaaaaattggtgggttgaggtcaattaagttaagacatttggtttctgcaggcactgctgcaggcacatgactttgataaaagatattaccgggagcttgctgttttgcttcatacaatcatgaagaatgagtactttaacactgaaattgtaatggaaggctagtgttatgttatgtacctagcattactagttgcctctgttgaggaataccttgatgcaataatgtagcgtcctttttgaatgttctctacagtaattgatagttcactacttcacttgagtc

SEQ ID NO: 119551 - DNA, 718 bp, Zea Mays
gtggcgccgccgccgccgcatcgcattgcccggacgccaaaacctagctcctgaactctcctcggctcctcgcccacctctcgctagccgttcccgctctgcagtctccgtggccggacgccgcggcgacatggcatcgacctgtttccgcgccgccgcccgcgtggcctccgccgccggccgctcggcggcggccacccgatcggctccctccgcggcccgtgccgccgccgccgcccaccgcgcctcgtccttctccaggatgccggtggagctcgggtgctgcgcgggattgtcgctgctgccgctgcacagcgcggtggcggcggccaggctgacgtcgcggctgagcacggcgtcgagctgccgtgctctctctcagggtatcctctgttgcacctatcccgggctttaacatcgcactgctgcaggcacatgactttgataaaagatattaccgggagcttgctgttttgcttcatacaatcatgaagaatgagtactttaacactgaaattgtaatggaaggctagtgttatgttatgtacctagcattactagttgcctctgttgaggaataccttgatgcaataatgtagcgtcctttttgaatgttctctacagtaattgatagttcactacttcacttgagtcaatatgtctgtgtacagtgcttgaattatcgtttatgcaagtctgctctttttttttggcattt

SEQ ID NO: 119552 - DNA, 682 bp, Zea Mays
gtggcgccgccgccgccgcatcgcattgcccggacgccaaaacctagctcctgaactctcctcggctcctcgcccacctctcgctagccgttcccgctctgcagtctccgtggccggacgccgcggcgacatggcatcgacctgtttccgcgccgccgcccgcgtggcctccgccgccggccgctcggcggcggccacccgatcggctccctccgcggcccgtgccgccgccgccgcccaccgcgcctcgtccttctccaggatgccggtggagctcgggtgctgcgcgggattgtcgctgctgccgctgcacagcgcggtggcggcggccaggctgacgtcgcggctgagcacggcgtcgagctgccgtgctctctctcagggcactgctgcaggcacatgactttgataaaagatattaccgggagcttgctgttttgcttcatacaatcatgaagaatgagtactttaacactgaaattgtaatggaaggctagtgttatgttatgtacctagcattactagttgcctctgttgaggaataccttgatgcaataatgtagcgtcctttttgaatgttctctacagtaattgatagttcactacttcacttgagtcaatatgtctgtgtacagtgcttgaattatcgtttatgcaagtctgctctttttttttggcattt

SEQ ID NO: 119553 - DNA, 887 bp, Zea Mays
gtggcgccgccgccgccgcatcgcattgcccggacgccaaaacctagctcctgaactctcctcggctcctcgcccacctctcgctagccgttcccgctctgcagtctccgtggccggacgccgcggcgacatggcatcgacctgtttccgcgccgccgcccgcgtggcctccgccgccggccgctcggcggcggccacccgatcggctccctccgcggcccgtgccgccgccgccgcccaccgcgcctcgtccttctccaggatgccggtggagctcgggtgctgcgcgggattgtcgctgctgccgctgcacagcgcggtggcggcggccaggctgacgtcgcggctgagcacggcgtcgagctgccgtgctctctctcaggagatgggtctatccgttcgaaggtgataaatcgctggaagacttgctcatgtcatgctgttggactcaaatcatttctatagattagtcatctaaatgaacatctggagcactacacttcatcaccccttcgacaatcgtggctatcttagatttttttcccccaaggttttgagttcatgccttgtgagatatcatttgatgaaaatatgcaaggacggtttgccgacgtctgggctgtattcagccagtacaattctgcgttaaaaggtggttgatgatacctgaggattgtcattttgcgttaaaaggtggttgatgattatgttactatatgtattgcgtatgctttcttttgtttcaaatttttgaataaggtgacccgaacctgaacgtggctcgatctctagtgaacgctttgagcctccgggtttgctttggtatttttcttggttcagttttgcattggattgcttccttgtttatatattttgaaaaaaataca

SEQ ID NO: 119554 - DNA, 1148 bp, Zea Mays
acggcacggggggcaacacttttggtagtagtagcgcacacacaccactgcacaaagcacgtcactgctcggcttgccttgtcgtcctctcttccttgcaatggctaccgaaatggtcctgctgtgtcgctttgtggccttcgtggcggctctcgcctgcctcctccgccccggcgcgcccgtcgagctccaccgcaagctctccgggtggtccgacgacgccggcgcgacgtggtacggcgcagccaccggcgctgggagcgacggtggtgcatgcgggtaccagaacgccgtcgaccagccgcctttcgcgtccatgatcgccgccggcagcccgtccatcttcctgaacggcaagggctgcggctcctgctaccaggtgaaatgcaccggccacgcgtcgtgctccggcagcccggtgacggtggtcctcaccgacgagtgccccggcggcgcgtgcctggacgagcccgtgcacttcgacctgagcggcacggcgttcggagccatggcgaagcccggccaggccgaccagctccgcagcgccggacgcctcaggatccagtacacccgggtgccgtgcagctggaacgggatggacatcgcgttcaaggtggacgccggctcgaacgcgaactacttggcggtgctgatcgagtacgagtccggcgacggcgagctcaggtccgtggagctcatgcagcgcgggcgaggcggcgcggcggcgtggacgccgatgcagcagtcgtggggcgcggtgtggaggtacaactccggcgccaccctgcaggggcccttctccgtccgcctcacgtccggctccggcaggacggtcgtcgccagcgacgtcatccccgcggggtggacgcccggcgccacgtaccgctcggtcgtcaacttcagcaactaacgatggcggaataacagaacaggtgtagatgcgcgcgcgcccgcccgccgcccgcctggacggagtggaaggcgtggcgctggcttggtttatgattcgagctgtgcgtgcctataccgtaccgacgcttagtttgtactgttgcgtgcgtgacatgtgcaaatccgcgcagtcaccgtgcgtgtttcgccggagtggcgtgttcgttgaataaataaaggctggattaatggaagcg

SEQ ID NO: 119555 - DNA, 765 bp, Zea Mays
acaggttcacgagctccatcgcttattcgcttatacaggatccagaagctcctgatgcgagacttcacacgggagctcaagctcaagagccagaggagcatgcccacctcgccgaacggcagctgcgccgagtacagcagaggggctgccggctggccggctcctctgtgcccctcgcgacttagccggacgctgggctggcccctgcccctggtcgaccggctgctgtgccgcgccgtgcagccgcaaaaagtgcacaagcagaagcaagagaccaagaagcaaaagcaggagtgcagaagtagaaccgcgacggctgacgacgaggcagtgaggtggacggtgatgggcggcgaccggcggctgactgctgtgctgtgcgcctgtgcgggttgctgcggccgggacgggcggaccgcggacggctgtgaggcgcgggtgcggcttcctaggcgcctggcgtcacgtggtgcggctgcaggctgctcgctgcctcgctgctgttaggtgttagatttaattaatgggccgggccgatcaaccagattagcagaagcaggccaacgcccaacaggaagacaggaagtaggcccaagccaatccacaatccgggtacccgcccgaatagtacccgtatcctatccgggattttcgggtactgaccgggtatttgtgattccgtatcctacccgtatccgaggtttagtatccgggtagtacccgtacccgtcccgttaaacaaaatatccgtatccgtatccgaaa

SEQ ID NO: 119556 - DNA, 1792 bp, Zea Mays
ctgttcagtttaatgccctagtacactcagctcaactgcatgcatcatggcgacgcccagaagcaagtcgtgatcgatcgacaatggtgacgatggttatggagaaccagaagtagctggcgcggacgtcccactgtggtcctggcgccacccctacctcctcctccctctccgccgctgccgtcgtcgtcgtctccgcaagcgtacaataaacaccgctgcaaggtgtgcagcaagaaggggttgatgtgcgggcgcgcgcacggcgttacggacgatgggcacaacaccgacgacgcggcgttcgacgacgaccactgtggcggcaaatggcactctatggtgtcaggtggcaagcgcatgcactcgccccgcatcagcgcgggccgggacgacaaagattgcgggacgtacagaaaaggcgggaaggagtccacgtcgtgtaaatcgctggctgatggcggcatgaacaactacgatcacgacaaggacaacttcaacaccgttggcgccgacgacgctgacggagaagacgatgcagaagacgatgaggaagacgatgacaacgtaccattggccgacggttgctccaaaggcaatccagcgcgccgagctaacctgatccatgtagaaaaaagagagatcagcgagaacctcgccacctggctcgctgaactcacatcatcattatcatcatcgtcatcatcggcgcaagcaatcctcgaacaagcagacacaacggcgaacaaggatgagaacacaccgtcgagcaccaaccctgtgccggcacgaccaatctttgcggcaccacatactgccgtgccacaactcaagtctgcgccggcgtcgccgtttcgtggcttgtttcagtgcagggcgtgcaggaaggtgttcccgtctcaccaggctctcggcggccaccgtgccagccacaaaaaagtcaaggggtgttttgcggccaggctagggagcggccgcgacgattttccgcgaccagcaggcgcaaccgtttccaacaacatcgtcgatacagaatcgaatggtgtagatggcaacacgatcaataatgacgatagaaccacctccgcaccagaaactactattgtgcatgtcgacgagacgtcctcatccttcactgctccatcctcctccttcttcaacaaggaggagacgaaggtgcacgagtgctccatctgccgccgcgtcttcatgtcagggcaagcgctcggcggccacaagcgacgccactggctcacgacgacgactgggacgaccagtgaccagctgcagacggcggctgccaagcttcagccgccgcccttcggtcctcaagatcacgtcatgcacgccatacgcgagcagttcaccattggtcccacaatgtatggcacgtccgactcatgccttgacctcaacatgccgacgatgaatgaatacgcagacggcctagccgccactagacaggaagccgaactcagtgaaagcatgatgatgagcctcaatgcaccggcagcgtcactgtacatggactcaagggcaggacctacagcgaacggtcaccacgacttgcaggaagccacagccaccgaggatgaagaggatagtacgagtgccaaacgagccaagatcagtgacctcaaggacatgaacatggctggtggggagacctcgcagtggctgcaagttggcattgccctaccgcccgagaccaacgagagattactaaaacctaatggctagaatctattatacaaatatatgggaagcacttacttatatatagtttcaaata

SEQ ID NO: 119557 - DNA, 1402 bp, Zea Mays
tgttccactcttttctaacttccccgtagctctctctctcgctccctcacgctctctctcctcaccatttttgctcctgccgagagctcgccaagctccgaaaggcgcaagttttcttgccatggggaagaacacatgcaagctctgctcccgccgcttcgccagtccccgcgccctcgccgggcacatgcgctctcattacatggccgcagctaaggagacggcggcgacggcgacggcggcggcggcggcggccgcagcagcggcgaagcagcagatctcttcggcatcatccgcgtcgacctccatcgccgccgccgacgaggaagtcggcttgatgatgaccgcttccaccaacgggctccgggagaatccgaagcgcagccttggcgtggcggatgtcggtttctcggatcgcgagagcgagaccgagtcgaccccgccgcaggccaagcgcgtgaacgccgccggcatctggggcgaacccgaggcgtcgagctcgctgtcagaggtcgcaacgccggaggacgtggcgctatccctcatgatgctctctcgtgactcgtggccgtcgggtgtactcgccgagaaggacggctccgacgacagaagcgacgacggctacgcgccgcccgccccaccccggcgggccccggcgccggtggtggagaagcggacgcagttccagtgcgtcgcgtgcaagaaggtcttccgctcctaccaggcgcttggcggacaccgcgccagcaacgtgcgcggcggcagaggcggctgctgcgcgcctcccgtggctcctccggccccacccccgcagccccagccgccgctgtcgccattgccggagcaccgtgacggaggcgaggacgaggacatgaacgccaagcagcagccgcgcgagtgcccccactgcggccgcgtgttctcggggcaggctctcggggagcacatgcggttccatgtgtgcgcctcgtcgccgcttgccggcaccggcaccggcaccgccaccgcctccaccacctcagccgccactcctgcgtccccgaccaacagtccctccatgatcgatctgaacgtggcgccgcagtccgaggaggtggagcactctgccgtgtcagatccccgcttcaatccaggtgcctgaagctgaagcaggcagatcagcgccgataaaggtaaaaaaaaataatcaagaaaacagatttgaagctaagaagcatcttttgtaggttataaatgtagcttccttaagttttccaattccattgatcagtgattacaatgttctgccgttgctgttaatttcgttttctgttcgaagcgactggattatatggaatacatatattatatagattgttagtacgagcagctggcaaagctggctccggttcttggaaacaaa

SEQ ID NO: 119558 - DNA, 1572 bp, Zea Mays
aggtggtgttcagagagcagcatggaattctgaattggagaagagcctcgttgatttgttgtttgagcacaatgtacctccatatagggctcaaaatggctagagtccagatgcttggaacaaaattgttactgaattcaacaagaagcatgagtatgtcacattcaacaagattcaaattcaggagaaggagagggaattgaaaagggattacaagatgttgaaagaggctagaaagcaaagtggcgtttcctggaatgagaaacgatgcatgattgttgctgatccaccaatatgggaaaacatcataaaatcatttcctagggccaagaaatttcaaaagaagtctttccctctctttgatgctcttggggaactatatgatgggcacattgctcaagggacctagaacataacatctacacaactaccacaagaatggaacacaatttcaaatgaagaagaacaagtgaacaccacaagaatggatgaggaaggcattattcaacaacaaccacaagaagaggattcaagattggaacaagatgaagatcctatgattgaaaggactgaacagaggtctactgcaacgagaaggtctactgcatcaacaatcaatcaagataaggaagcaaagaggatgaagaaggattctttggaaggacttgttgggagatatctagatctgaaatcaaaacaagttgaggatgagattacacaaatggcgaaaggaaaagaatctgctcaaggtaatgacttctccatcatgagatgcatttctgttcttagatccatgaatgtgacagcagatgagaagataaaagcagctgaggtgttcgacataccaaacaacagagagacatttatcagttttagtgttgatgaaccagaaactgccctcctatggttaagacggaagattgataagctctaaggtaagtataatctatgatttcataccttgatgaactagaaactgccctcctatcagttttagtgttgcatggggatgaatgcaacgggggtactacatttgtattgcttgagagagactgaatcccatggttgggagtagttgtacttggttccctgtagctggtgagttctttgttgttgctgctgttaatcagcctccatttgtgctcactcaagaaaagtgtagcagcaacaacaacatgcgcttgcatattttgaggacccgatgtttattaattgatatgggttccctgctgtttttctttctgcataaatttcatttttttatctgttgatttctgcttttgattccttatttgaactttgcagacaggaaatattggtcatatggagacagttctgcacattgttttgagtgctagtatgagctatatatatgttgcatttctccatgtttgggctcagcatgtaatagaactgaaggaaggttgttgcgagacttgtatgacatgtttaaatttctggataaaatctagcatatactaagtctattacatgcttaaatttttgaaaaaatatgtatcgagaattggatggaatgcttaaatttctagagaaatgacatgttctatgttt

SEQ ID NO: 119559 - DNA, 705 bp, Zea Mays
tagatgtaactgatcctgctatctggcttaagttggaagctgcaactgatgagtacattcagaagaattttctagctttcaagaatctttgtgagcttctggtcccaaggtaccaagaggaagaaaagttatctgctatttacaattctctttcattttcaaggttgtcatcattgaatcaaggactaggaggctatccacattctgtgagatgagctgagtcgagtgcagagagggatgagcagctttgcaacatatgctagaagcatgcatggagatgcagatagagatgcatcgatccattaggcaagaagtgtctgccgctcttaatcggtctctaaccatgcgagatgaagaaacattagaggatggatcacagtggaagctagcaagtggtcctgccaaaaaggtctttggaggctatcatgttcacattagaggagcctacatgatttggaattagttgcatgggaaggttagcgatggatcaaggtgctccactttagatatgtgtgcaccagcgcctacgcttctcgcttctgaccatagatcgggtcttccttagtgttcaaccatcgcaacttattctattcggattcacagctactattcattccatctactgaggttcttgtcaagtgcttgttttttattgaactttgtgcatagtccgagatcatattgtcaaattattttgtgctccca

SEQ ID NO: 119560 - DNA, 104 bp, Zea Mays
ttttccttatcttttcagcacctcctaacactgcaaagctaatgttcttccgtgtcacagggtacttgcagatagatatcggctctatggacgaacactcgacc

SEQ ID NO: 119561 - DNA, 773 bp, Zea Mays
cgaacgcacccaagcaagatcctgcttgactgatttttttttgttgcctcgtacaagctgtagtataatcatgaattcctgatctggatggaattccaaaccaattccacaagctttcccaatcgccgctgccggcgcgcatggcaaacgcagccacctcgccgccggcgccggcgctgtcaaggcccaccctcctaggcggcgtccggggcttcgacgcggctgtgtccctccgcctccacgcccttttcctcccggtgccgcgcctcctcctcaaggcgctcgaggtcgccggcgacggccgcatctggctccccgtccccatctccctgctcctcctctccgcgtcccccgccaacgcgtccggggcggcctccccgctgctggcaggccttgttgccggcctcgtgctggacctcatcctcgttggcctcgtcaaggtcttcgtccgccgcccgcgcccggcctacaacgccaaggacatgtacgtggccgtaagcgctgaccactggtctttccccagcggccactcttcccgcgccttcctcgtggcctccttcctcgccgccggcggcttccgtccccgtgaggcgctcttcctctgggccgccgcaacgtcggcgtccagggtgctccttgggcggcactacgtcctcgacgtcgtcgctggggcttgcctcggcgtgttcgaggcctggctcagcatcttgctcttgggattcatgtgcgctcaaagcaccttccttgtatgctaatccttgttatcgtagtac

SEQ ID NO: 119562 - DNA, 1428 bp, Zea Mays
agcccatccgatccggaacttcttcttcccctaccaaacggatcgagccctgcgctacgctgccaaccgtactacactcgtcagtcgtcatagcctggctttcgtttgtctctctcgtaacttttgcttccgggagcagaaaaacgtcgccggggccctcccccgtcttgggatatttcatcagttttcaggttcttggctcttgggatcggatcttccatattctttggttctcgagactccagaggagaggagggagagagagagagagagagagagagagagagagagagagagagagagagagaggaggaagcgggggtgatcgttgtttcttgatcgccgccatgagtaacacgctgcttcgggtctgcccgtccgacctgaagatgccattcgaggtcaagaagcacagttcggcatgtctcgagctcgtcaacaggaccgatcggtgggtggctttcaaggtcaagacgacgaaccctaggaagtactcggtgcggcctgcctccggcgtcgtgcagcccaggggatcctgcggcatcacaatcacgatgcaagcgcccaaggaggtgcccccggactaccagtgcaaggacaagtttctcgttcagagcgtcgcggcggcggaggggacgacgcacaagggcattgtccctggcatgttcagcaaagcgccaggtaagttggttgaggagttcaagttgagggtggtctatgtccctgccaaccctccgtcaccagtgcccgaggaaacagaggaagatgacggatctcttgattcagatgtggaccatgaagtggggacaccatcgacgtccaactgtgcagcaggacaagggcatacatgtagatcacaagcttcagatgacgagggtgactctacatccaagttaggactggaaagtagatatgcagaggaaaacaagatggttcagaaagacctgatacaggatgcctctatatccgagttagaactggaaagtagatatgcagaggaaaacaagaagatccagaaagagctggatctcctccggaagacacatgcatctcctggggacttctcggcgacgtctgtgctgcttgtcttcttgttatcttcacttgttggatacctgatgttcggaagcaaaacttagcaagttcttagaagcaagataatgacagcacatcattctgcggctccggcacagctctatcgtcttttgtgtattgctccttttagtacaaaatatatatagttaagtagtccacaatacatgacagatactcctcccttgctagtcccgtatgaacagatactcctcccttcttgagtaggtgtttttttctttctaagggctagtttgggagccacaaaaccggagtggattgaattgtctgaaatctccttcttaattaattttaaataaaaagtgaattttaaca

SEQ ID NO: 119563 - DNA, 940 bp, Zea Mays
atggccgcggggttcatcacatgaacgctattgtgcctagtgcaccgatttattaatcacccgaggctgtactataaatacatcggtaatactgtgatcaaagcatcgcaaacaagatctctaaccactgcattattggctatagagagtgatcgcgatcgtggtagctcctggctttgtgatcgagacgagcaatggcgtgcaaggcatttgcgctgttcctggccgtgaacctggtggtgctgggcgtagccagcgcctgctcgccctactgcccgaccccgaccccgaccccctcgacgccgacgacgcccacgcccacgccgtcgtcgttcggcaggtgcccccgcgacgcgctcaagcttggcgtgtgcgccaacgtgctgggcctcatcaaggcgaaggtgggcgtgccgcccgcggagccgtgctgcccgctgctggagggtctcgtcgacctggaggccgccgtctgcctctgcaccgccatcaagggccaaatcctcggcatcaacctcaacctgcctatcgatctcagcctcatcctcaactactgcggcaggaccgtgcccaccggcttcaagtgctgagctgagcgcgttcgcctcccttgcatgcatatgcacgcacacgatgatgagtgaatgagtgatgcatattatggtttggttgcatttccacgtacgcgcgacgactagtccgcatcatgcatgtacgcatggccgtgatttgtattctccccgcctggctgctgcctctttatttgctccccgtgcatttgtcatgttgcaaagagttagccggctgtcacttgtatgccggtgatacataagttccaatcaagtttgtcttgcgctttatatttcagtgttttgcatgttctgatcatattctggccgtacttgagcttatatggatactaccagtaacacgtatttag

SEQ ID NO: 119564 - DNA, 2783 bp, Zea Mays
catccggaggcaatggcagtagagagagaagaggccaccgagcaagcagagagagagagagagaggagggaggcctggagccctggagggagcgcatgagctgacagaagagagcacagaggcacttggagttggcacgcggtgctctgcttgcccccgcctcctccctgttctatactctcgcaggcccaggccaagcccctcccccgccctcagacgcaccgcggcaagaaatcctccactccatcccggtttccccggagagattatgtgggattaggtagatgagggcggcgctgttcggtgccgagcggaacggggctgcggacctcgtcggagacgggaagacgctgttctggccggaggggaaggcgaaggtgctgttggagccgaggtccgtgctggactgcacgcggagcctcagccccaacaactcaacatcgacgttgtcgtcgtccgtgggtggcggcgctgcggactcgaccggcatggcggtggcttcggacagcagcgccgccgccgaagccaccaaatggggagcccccggcgagcacggcggcggcgggaaggaggactgggctggcggctgtgagctgccaccgattcccaccggcctcgacatgggggtcggcggcggcgacagctgggacgccatgctcggcaatgccgctgcggcggggcaggaccagacgttcttgaactggatcattggggccgccggcgacctggatcagccagggccgccgcttcccgtgcaccagcagccgctccttgacaatgtgggcttcgggttcccggcagcggacccccttggtttcacgctcgatccacacctctgcggccttgcctgtgacatgtcgtcccctggtgcggtgtcgcacactaccaacagtagcggcggtggcaacaaggcgtcctcggccttcggcctcttctcaccggagtctgcttccctccagccgccgccgcccccggtgctgttccacgaaggtatcgacacaaagccccctcttcttggtgcgcagctgcccggcctcctccaccagtaccagcaccagccgacccccggcacaaccttcttcatgcccatcccctccttccccgaccccaatcagcgctcgccactcatccaaccaccgcccaaacgtcctcaatccataggggatgacctctatctcgcccgaaaccggcttctgccgccgccggcggggcaaggtcatgcctttccaccattaaatggcccttctccgttccagctccagccttcgccaccgctgtcccacggggcgatgaagacaacggctgcggaggcggcgcagcagcagttgctggacgagctggcggcggcggcaaaggccgccgaagctggcaattccattggcgcgcgagagatattggcgcggctcaatcaccagcttcccttgctcgggaagccgttcctccgctccgcctcctacctcaaggaggccctcctcctcgcgctcgccgaaggccaccacggcggctgccacctcacgtcgcccctcgacgttgccctcaagctcgcggcgtacaagactttctctgaccactcgcccgtgctccagttcaccaacttcaccgcgacacaggcacttatcgacgaaattgcccgcagcacatcgtcctgcatccatgtcatcgattttgatcttggtgttggaggccagtgggcttctttcttgcaggagctcgcacaccgccgtggcgcaggcggtgcggctctgccgtccgtgaagctcactgcctttgtatcagctgcttcccaccatccactggagctgcgtctcacgcgtgacaacattgcacagtttgctgcagaccttgggattccctttcagttcagtgctatcagcgctgatacgatcaaccctgcagagctcgtttctgccaccgctgatgaagttgtagctgttgtcctcccggttggttgctctgctcgtgcaccaccgctgccagcgatccttcggttggtgaaacagctggctcctaagattgtgatagccatagaccatggcgctgatcgtgctgaccttcccttctcgcagcacttcttgaattgcttccagtcctgcatgttcctccttgattcgcttgatgctgctggcattgatgctgattctacctgcaagattgagaagttcctgattcagccaagaattgaggatgcggtgcttgggcggggcaaggtggacaagccaattgcatggagaagtgcatttgcagctgctgggttcgcacctgttccacccagcaatttggcggaggcacaggccgactgcctcctgaagcgggtgcaggtccgcggtttccacgtggagaaatgcggggtcgggctcacactatactggcagtgtggcgagcttgtcactgtatcagcatggcggtgctgatcagcgatccacgcctgtgcgcaccatgttccaccaacatttgctggcatcttcaacccgagtaatgtgtattttgtcttgcaattaaatgctactaaggaaactgatatattgctgttgaaccctccatgttcatcatctttgcaacttacgagctagaactagtggatttttagcaatgttggtgccaatatctctagtgtaatgatgttggcctaagattttaccctgcttgctctcagctcactagacattcccatgtcatttggaacactgcttgtgaggagagggtataattaacctatcaaatgtctgtggtatagtactgatatgtgtttcatgtttctttatatcagtcattgttcttatggt

SEQ ID NO: 119565 - DNA, 2667 bp, Zea Mays
ggccaccgagcaagcagagagagagagagagaggagggaggcctggagccctggagggagcgcatgagctgacagaagagagcacagaggcacttggagttggcacgcggtgctctgcttgcccccgcctcctccctgttctatactctcgcaggcccaggccaagcccctcccccgccctcagacgcaccgcggcaagaaatcctccactccatcccggtttccccggagagattatgtgggattaggtagatgagggcggcgctgttcggtgccgagcggaacggggctgcggacctcgtcggagacgggaagacgctgttctggccggaggggaaggcgaaggtgctgttggagccgaggtccgtgctggactgcacgcggagcctcagccccaacaactcaacatcgacgttgtcgtcgtccgtgggtggcggcgctgcggactcgaccggcatggcggtggcttcggacagcagcgccgccgccgaagccaccaaatggggagcccccggcgagcacggcggcggcgggaaggaggactgggctggcagctgcccggcctcctccaccagtaccagcaccagccgacccccggcacaaccttcttcatgcccatcccctccttccccgaccccaatcagcgctcgccactcatccaaccaccgcccaaacgtcctcaatccataggggatgacctctatctcgcccgaaaccggcttctgccgccgccggcggggcaaggtcatgcctttccaccattaaatggcccttctccgttccagctccagccttcgccaccgctgtcccacggggcgatgaagacaacggctgcggaggcggcgcagcagcagttgctggacgagctggcggcggcggcaaaggccgccgaagctggcaattccattggcgcgcgagagatattggcgcggctcaatcaccagcttcccttgctcgggaagccgttcctccgctccgcctcctacctcaaggaggccctcctcctcgcgctcgccgaaggccaccacggcggctgccacctcacgtcgcccctcgacgttgccctcaagctcgcggcgtacaagactttctctgaccactcgcccgtgctccagttcaccaacttcaccgcgacacaggcacttatcgacgaaattgcccgcagcacatcgtcctgcatccatgtcatcgattttgatcttggtgttggaggccagtgggcttctttcttgcaggagctcgcacaccgccgtggcgcaggcggtgcggctctgccgtccgtgaagctcactgcctttgtatcagctgcttcccaccatccactggagctgcgtctcacgcgtgacaacattgcacagtttgctgcagaccttgggattccctttcagttcagtgctatcagcgctgatacgatcaaccctgcagagctcgtttctgccaccgctgatgaagttgtagctgttgtcctcccggttggttgctctgctcgtgcaccaccgctgccagcgatccttcggttggtgaaacagctggctcctaagattgtgatagccatagaccatggcgctgatcgtgctgaccttcccttctcgcagcacttcttgaattgcttccagtcctgcatgttcctccttgattcgcttgatgctgctggcattgatgctgattctacctgcaagattgagaagttcctgattcagccaagaattgaggatgcggtgcttgggcggggcaaggtggacaagccaattgcatggagaagtgcatttgcagctgctgggttcgcacctgttccacccagcaatttggcggaggcacaggccgactgcctcctgaagcgggtgcaggtccgcggtttccacgtggagaaatgcggggtcgggctcacactatactggcagtgtggcgagcttgtcactgtatcagcatggcggtgctgatcagcgatccacgcctgtgcgcaccatgttccaccaacatttgctggcatcttcaacccgagtaatgtgtattttgtcttgcaattaaatgctactaaggaaactgatatattgctgttgaaccctccatgttcatcatctttgcaacttacgagctagaactagtggatttttagcaatgttggtgccaatatctctagtgtaatgatgttggcctaagattttaccctgcttgctctcagctcactagacattcccatgtcatttggaacactgcttgtgaggagagggtataattaacctatcaaatgtctgtggtatagtactgatatgtgtttcatgtttctttatatcagtcattgttcttatggtattttcattgtgcagttcaattgttttgggtcaaacatcaatatgtcttgttaccttatctgcaatttgcttcagattgatggtgccatactgccatccatcatcacagtaccagatttgggtctggctctaattagactggaacatttaaaatcagtactgttgtggtcagttatttcaaaacgttagcgtgctggtcgtgcttagagttagaaccagctgtattggaaatagtagaactgaagtttcgtttcaagaagttagttagagattgtttagaagtttactgatttacatagtacatttctatttgagctgtactcgtaatggtccattcctaagtctttcttcggtt

SEQ ID NO: 119566 - DNA, 81 bp, Zea Mays
caccatgcacaagagctaggatatcacattcatctgtcgtgcagcagatcaagggagagtggtgtctccgaaccgtcgccg

SEQ ID NO: 119567 - DNA, 110 bp, Zea Mays
cggctataggtgtccaaatagccggagcctgctagccactcgcccactcccagatacagctagacccgatccaaattagggcctccggctaggaattaatccggggctcc

SEQ ID NO: 119568 - DNA, 1086 bp, Zea Mays
gatccattgtcggttgtcgcctctgaccgtaccacctctgttacctgcaccgccgctccgttaaatcgcggcccgatcgccgatgcctccccgccccgtcccactattctctcgcctgcgcttccgcctcccgagttgcgccgccgtctccatctccacccctccatcctccgcggcgcccctgcactacggccatcgcactcccctcgctagcccttttcctctgtccccaccttgcccgcgcatcctccgtgcggccgtcgcggtttcttcgctggatctgcgcccgatcaccggcgggttcgcgctattcagcatggctgctgcctcctccgccacctccgtccacgacttcaccgtcaaggatgctagcgggaaagatgtggaccttagcacctataaggggaaggttctgctcatagtcaatgttgcatctcagtgtggcttaaccaattccaactacacagagctgagccagttgtatgagaagtacaaggaccagggttttgagatccttgcattcccatgcaaccagttcggtgggcaggagcctggcactaatgaggagattgtccagtttgcttgtactcgcttcaaggctgagtatccaattttcgacaaggttgatgtcaatggtgacaatactgcacccatttacaagttcctgaagtccagcaaaggtagtctctttggcgataacataaaatggaacttctccaaattcttggttgacaaagaggggcatgttgtggagcggtatgcaccaacaacttccccactgagcatcgagaaggacatcaagaaactactagggagttcttaaaccttgtaattggattcagtagccctaccaaactgctgctttgcatcgagcacctgatgcctcagtagcgttttaataaagttgtttttataaccgagatgttttgtatttcttctgtattccctgctttgtggtaaatggcatgtaataaaaatgatgcaatccacgatttatcttgaaaggttatgtatccaggttggttgttatgagatatttgagaaatgagttttggcatgggggcatatcttgcgtacctgcctacc

SEQ ID NO: 119569 - DNA, 598 bp, Zea Mays
attgttttcaaaaacaaatggagggggtattagggaccattttcattgtttaatttatgcatcagttgaattatccatatgcctgtgaatgtgattctgattagcatatacgtagtttgaagtttttaactttcttcgttaggttgatgtcaatggtgacaatactgcacccatttacaagttcctgaagtccagcaaaggtagtctctttggcgataacataaaatggaacttctccaaattcttggttgacaaagaggggcatgttgtggagcggtatgcaccaacaacttccccactgagcatcgaggtaaattccattttaaattgacctggtcggtggtctggtcatttgtttcttgtctcatcttacagcattaactatggcaaaattttgcagaaggacatcaagaaactactagggagttcttaaaccttgtaattggattcagtagccctaccaaactgctgctttgcatcgagcacctgatgcctcagtagcgttttaataaagttgtttttataaccgagatgttttgtatttcttctgtattccctgctttgtggtaaatggcatgtaataaaaatgatgcaatcc

SEQ ID NO: 119570 - DNA, 2473 bp, Zea Mays
ggagatactgaggacgcgaggccaagctcccccgacggcattagagtaggagggaggaggggaagcagagagggacggcccttctcgtcctcgcaccctgtgaaacgcggcccgcgaccgacagcagctcgctcgctgtcatctctcgagatctcaagcagttcgttggttggccattttctttttctttttttgatatacttgctagcttggaagttggtaaaagatgaactcaacacgccgagcttcaaaagcggcaaagtcaacaatcaattaccacaggttttcattagatgagcaccacttatttgagccagatgctttgattaccaaggagcgagatgccaatcatcaatcaaggcaaagttctcaatcttgcagaacatatgcatacagaagattgaccactccccagtttgtatctgcattgtctggaatctggaatcttgttggccagcctgaatcatctggcacagctcaaagatctagtattcatgggatttcgagtagggaagaccctgtgtgctttagcagggaccaacaaggaaatatactgacaccttgctgtgtggaaaactctagtggtctgagatctcaatactgtttctctacaccaaaagaaatttatgaggatcttatttacgtaaagaagaagatgttaacgctgacaccattcaataacattgttggtgcatcatccacatggatgcatatgcattccacaaataaggttgaaggtgcgcattatttgcaatttggaactatatactctgtgcaagctgaaaagatggaaaaaatcgagacttctcagaatagcaaaagaagcatgtgtgaggaaacttgtgctagttccaacaatatggatattagggacaatagctattcaaatcaaacaagacacatgcctaacgagctatttactatctcaaatgaagaagctagcagtacacatgattgtgaaagttctcggcacaatactgaatgcaatctagaaaaaaatcaagaagattctaattttttagcttgcccagtacatgaaatggaaattgccaaagaggtgaggataatgccagggagtcaggttttcagtaaggcgtgcacagatgctcagcttgacaaatcaaagcacatgtcttgtctggtgggtgatgctgttgttcttaattcagcaaatgcagatgaaagtgcttgtagggaggacgtgtgtctgcagctttctctagacaagtgttcacaagagctccaaccaacttttcagcatcgatttgatggtgctgttaccataaacaggcatgctgtggcaggagcattagctgggacagcagtcagtgtttctttgcatccaattgatactgtgaaaacgataattcaggctaacagttatggacagagttcagtctaccatacactaaggcgcacccttattgagagaggtgttctggggttatatggaggacttgctagcaaacttgcttgttctgcaccaatttctgcaatttataccttaacttatgaaacagtgaagggggctcttctgcctgtttttccaaaggaatatcattcaattgcgcattgtgctgctggtggctgctctagtattgcaacatcctttgtttttacacccagtgaatgcataaaacaacaaatgcaagtgggttcccattatcagaactgctggaatgctttagtaggatgcctcaaaaagggtggcattgcttcattatatactggatggggtgctgtcctttgcagaaatatcccacattccatagtgaagttctatgcttatgagagtctgaagcagtctctgttgaaatcagcacctgatagggccaaactcaattctggccaaacgcttttatgtggaggttttgctgggtcaactgctgctctctgtacaacaccgtttgatgttatcaagacacgagtgcaattacaggcactcagccctgtttgcaagtatgatggggtggttcatgcactaaaagaaatttttcggcatgaaggcttgtgtggtctttacaggggtttgactccaaggctggctatgtatatgtctcaaggtgctatattctttacgtcctatgagtttctcagtacattaatgtttcctgaacccgaacaagaggttcatgcgaggagcgtttgatcgtgaaatgagaagatggcacagcaaaatacagaactcggggatagtctgacatgtgatgtgaggggtttgaatccaattttgggtgttgtttacaaagttgtctgttaggaataggatagcattcatacatatttttcggtaatctcaggtctagctaggcgattgaaaattttgtagtagaacctgattttgtattttagtctcgtatatatagagaaacaatggccagttttggtatcctattgttttgtatccacatgtatctgcatacatggccaagtgaatctggaattaaacagcatgggacgcaagactttctat

SEQ ID NO: 119571 - DNA, 2706 bp, Zea Mays
cttggcgccctgcggatggagggcggcagcggcgctgcgcacaggccgtgggatacggcgtcgcagctgcagtacagcttcaggacgtccgtgagcagcctcagcgaggtggaggaggaggaggcgagcccgccaccggtggcggtggaggacagggtcttcgtggccgtccccgaggacgccaagaacggcaagagcaccctgctgtgggcgctggagaacccagccaaggactgcgccggggttgtcgtcgcccacgtccactgccccgcgcagatgatccccatgatgggggcaaaagttcatcacagcacggtgaatccacaacgggtcaacgaatacaggaagaaggtgcgagcggaggtggaggagaaactagatgaatacgtccttgtgtgcagaagacaaaaggtcagctgccagaaagttgtaatcgaaatggatgatgctgtacgagggcttgagcagctcatcactctccatggcgtcgctaagcttgttatgggagcagcagcagacaaacactactccaagaaaatgaaatcactgaaatccaagacggcgctcagactgacggaggtggcggccccatcgtgtaagatatggtttacctgtaaagggcgtctcatatgcaccagggaagcgaacacaactgttcccgccatgccaccaccatcacctgcactcacgagcgcatcaagatcatcagtaagcagcgttgctagccagctgagatcaatgttactcagtcgctcagagagtgacgggtcaagctcgaacggaagtccaaggcatgacctgaccaggtcgcgaacagaggcggggctgctgctgtatccctctcacgaaaccgtcaacatcggtacgccgtctcggctctatgaatcctacggcaggaggccgcctacgacagcatcagtgagttccagcgattcctggaacgaattcgggaggagatcgcagaactcgtggcacgatgatctatcgagaaacgacggtgcggccaccactactgtcgtcgtctccggatcagcgatgcaagaacctgacgacgagaacttctcgtccccttctcatgagctggaaaacccgggcgtcgatgctaacatatacagaagactcacggaggctctgagtgaagctgagcgctgcaggaaagaggcataccaagagtcggccaaacgcctgagagctgaactagacatggcttcggctcttgagaatgtaatcgctctcccatcatccatgcatatgcacgcacgattgggatggcaaatactgaaccaccgctgctttttacaggtaaacgagctgtatcagcacgaggtaaggcagcgcaaagcgatcgaggaaacgctggcgagacaagcgcaggagatggaggaaatgaagagacagcacggtgtggcatccaaggagctgcacgacgtcaaggagcagagactcgtcctggagcggcaagtaacagagatggcgtctgctgtccaaggctacgaagagaaggtggcagctgctgaaacgctgaacaccgccgagttctcctattctgagctggaacaagcgacccaaggctttgacgaggggctcaagatcggcgagggtggcttcggaagcgtctacagaggcttcctccgcaacacagccgtcgctgtgaagctgctggatccggaaagcatgcaaggcccgtcagagttcaaccaagaggttgctgttctcggtagagtgcggcatccaaacctcgtgacactgataggggcgtgccgggaggcgctcggcctggtgtacgagtacctccccaacgggagcctggaggaccggctggcgtgcaccaacgacacgccgccgctgacatggcaggtgcgcaccaggatcatctgcgagatgtgctcggcgctcatcttcctccactcgaacaggccgcacccggtagtgcacggcgacctcaagccgggcaacatcctgctggacgccaacctggtgagcaaactaggggacttcggcatctgccgcctgctgatgatgagccagtccaccaccactaccaccatgcccgtcgccaccacgaagctgcacaggacgaccaccccgaaggggaccttcgcgtacatggacccggagttcctgtccaccggcgagctcaccccgcggtccgacgtgtactcgctcggcatcatcatcctgcggctgctcacggggcggccgcccaagagcatcgcggaggtggtggaggacgcgctggagcgggggcagctgcacgccgtcctcgacgccgccgcgggggactggccgttcgtgcaggccaaccagctggcgcacatcggcctgcgctgcgcggagatgagccggcgccgccggcctgacctcgcgggggaggtgtggaaggtggtggcgcccctcacgatggccgccgccgggcggcctctgccgttcgcgccgtcgccgctggatgacgcccgcgcgccgtcctacttcgtctgcccgatcttccaggaggtgatgagcgatccccgcatcgccgcggacgggttcacgtacgaggccgaggcgatcacggggtggttcgacagcggccgcgacacgtcgccgatgaccaatctcaagctcgagcactgcgagctcacgccgaacagggcgctccgctccgcgattctcgagtggcggcagcagcagcagcggagataaccatttacgtaccgaagaaagcat

SEQ ID NO: 119572 - DNA, 1374 bp, Zea Mays
atgccgccactatttttagacgcaaaacacctgacagagtcatgccgacgaacaagttatgagcggtgccgtcgcctgaatcaattcattcggtgatgggttcaaatagattgttgtcatcacaattacttgatgaatcatcatctgatgacgacgaggatttcatactttctgccgcgcaaatcattcatactgtttcacaagttcgtacaaagccaggaggctctgttccaggccgtgcatatatttatcgagatagagaagcgggacacgcgagattgtaccaagattacctggctgacattcctacttatggcccaaacttgtttcggcggaggtttaggatgcatcgatccctgtttattcgcataatgaatgttgttgaacaacatgatgattactttaagcaaaaaagaaacgcagctcaacaacaaggtttaagttgtttgcagaaggttactgcagtatttcgtatgctaacttatggagtggcagcagatgctacagatgaatatgtacgtattggagaagtactgcgctggaaagtctaagaaggttcgttaaagttgtaattgacgtttttggtgaggagtatttaagagcacccaatgaaagcgatatacatcggttacttgcacttggcgatgaaagaggatttcctggtatgctgggttcacttgattgcatgcattggaggtggaagaattgtccatcatctttacaaggtcaattttcgggccatcatcacacgcctactataattttagaagcagttgcttcgcaagatttatggatttggcatgtttttttggattacctggctctctcaatgacatcaatgttcttcatcgatctcccctgttcgcaaaattatcaaatggagaaagtccacaagtgaattatagaataaataaccatgactattcaatgggatattaccttgcagatgacatatacccttcttgggcaacattggttaagaccataccagaaccacggggcaataaaagaatctactatgtgaaggcacaagaagcggcacgaaaggatgtagaacgagcctttggggtccttcaatctcgttttgccattgttcgtggtccagctcgtttatgggacgaggcgacactaagcaacataatgatagcatgtataattatgcacaacatgattattgaagatgaggaaagagtcgatccggatgaacgttttgagcacggaggagaaaatgtggagccctcccatgagatgacaacagattttgatgaatttcttaagaatcacaagaaaattaggaaccaagaaacacattatcaacttcgagaagatctagttgagcacttgtggcaacaccacccagatttatatccttaa

SEQ ID NO: 119573 - DNA, 3751 bp, Zea Mays
agagaagcggcaagcaaatggaggagtgggagccgctgcggagcgcacgatgcagccccgccgccaccccaagctccctgctgcaggacgagctggccgcacacgaggtgttcgtcgcggtgcccgaagaggtcagcgacgggaggagcacccttctgtgggcgctgcgcaatctggtcaaggacggatccaagcttgccatagctcatgtccattattgccctgcgccagcgatcgcccagaacaggagtcataccagcatgaaaccagaagaaatcaaggagtacagaaagcagaagcgagcaaaggccgagaagagtctagatgcgtatgtgcagatggcaaaggctgttacatttcaggttgcctgtgcgaaagtaataatcgagacggatgatgtagctgaaggacttgaggagctcatctctcttaataacgtaactgagtttgtcatgggagcagctgcagaccgacacttctctagagaaatgaacacgccaaagtcgatgacagcgctcaagcttttcaagacagcagctccatcatgcaagatgtggtttacttgtaaaggtcatttgatatgtaccagggaagcaaatgaaagccttcctgccatacttgcatcacctgaaaaaagcaacgcgccgctgtcaccggcgcacaacgtttcaagtcaaatgggatcaatggcaaccgagttagaatacaaagaatcaagccacaaaggatacatttcaagctcatcggctgcagcagaaatgacggaatgggattatctttttggagattggagaatgatagtttacgggtcatcaggaactgacgatgctgtcagcttctctgaaactgctgctctaccttcagttattggcgatacacatgaaacaacacaagtggtgcattttacaactcaggaacctgatagcacctacttgttgctagcatcaacatataatcaggaagacgaacccagtgtacatgaagaaaagtatgagaagcttcaagattcatgcattgaagctaagttgttaaaggatgaagctgatgatgatgaatctaacaaaatccggaaagctgaaatggacctgctttcagcacttcaaagagtccagtgtgaccaaaatagcgaaatctccttgcagattaaagagttggaagattcatatattcacgaggtgagccagcgaaaagaaattgagaagacgcttgctagacaaaggttggagattgatgaaatgaggagacaacggtgcacgctatctgataaattacatgattcggataagcataagcttgtacttgaacaacgtataacacaaattaagtcagctgcaaaagatcacgtggaagagattactgaacattttataagacaatcaagtgaggaatctaaaaaacaccaaaaagtcaaaatgggtctgctttcaacacttcaaagagttaaggaggttgagagtttgctacagaatgagaaggcacagcgggaatatatggaggagaaggtatcaagacagagaacagagatcgaagaaacaaggaggcaacgagataaactgtaccatgacttgcaagatttaaaagagcagaagctcaaactggaacaagttggtatgtctgaagaaactaacagaagaagaaaagctgagagagatcggctctcataccttcaaaggattaaagacctggagcaccagcacatacatcaggtgaaaaagcaggaaacaatggaggagacaatgacaagacagaaggaagaaatccaagcatcgaaaagaaagctacatgagacacatggcaaacatatgtctgagataaagtccgccgtgaaggttcatgaagaaaagctcgccgacagcaagcagcttctccaagagctccaagcgaagcatgacaagctactgcgtgagagagacaccgcagctatggaagccaaagagtcacgccaaaagaacaagcaaagagccttagggacgactgaaactgcgaacaccgagttctcgattgtcgagctgcagaaagcaaccagaggattcgatgcggaactcaagatcagcgaagatggatttgcaagcgtctacagaggtttcgtccgcaacacagacgtagcaataaagttgttccattcgcgaagcttaaaagggcaggcaagattttaccaagaggttgctgtcctcagtagggtgaggcatcctaacattgtcacgctggtaggagtatgtcccgacgacttcgcgctggtgtccgaattcctcccaaacggcagtctcgaggattggctctcgtgcaagaaaagcatgccgcctctgacatggaaggcgcgcacaaggatcgtcggggagatatgctcagccttggccttcatccactcacacaagccatatccgatcgttcacggcgatctgaacctgggaaacatcctccttgacgccaatttcgtcagcaagctgggaggcttgggcatctgctgccttcttctaggtggtggtgaagacgacataacggccaccagcctgcgaagccgcccttcagcagcagaccgtagtaagggaacactccgctacacggagcagggcggtggattcaagtcggcagcggagctcatgctgtggtccgacgtgaactcgttcggcgtcaccatccttcgcctactgacagggcgatcgcagcaagggatcggtgagatggtggaggaagcgatggagaaagggaacttgcactcgatcatcgacgcctccgcgggggagtggcctctcgtgcaggccagccagatggcgcatcttttgggcttaggtgcgtcaccctgggctcggggcgccagccagatctcgccggggaggtgtgggaggaggtcgagcaactgatgaaagccgcttgcttgaccgccggggcatcaagatttgcgtcgtcgtcagaagacgatccgcctccatcgtacttcatctgtccgatttttcaggaggtgatgagtgacccccacgtggcagcagatgggttcacatacgaagccgaagcgatcaggggatggctcgacggcgccagcacgtcgccgatgacaaacctgaggcttgcacaccgcatgctcaccccgaacaaggcgctccgttcagcgattctcgagtggcaacagaaacagcacgggagatgagatgatgctttcactgggtgtggatgtggatgtcagcagctcctccagatgcttcatccgtccatcttgtgtccgggcgcagtgcacagggtttttaaaaaccaaaaggggatgtttcttgtgtccggaacacagcgcgcaaaatcaatttaagatgtgtttgaatgtagtagatctaaaaattttagtaaaattagctagctaactgttaactattttactaaaaataactaatagttatgtttagtgttggggtcgtgcttcggtgcgccgaaggtctcacacgaagaagcagcttcggccgaagtcgtctccaagagatggccgaaggtcccttttcatggagcttcggcgttttaaaccgacatagagatagaatgacctttttatacatataggtctgagtcaatgctgtaaactttcgcaaggggcataattgtaatttgtcacaggctgcgacctgtgcctataaatagatgaacagtacctctgtactgttcacgtgaacctgtcatttgctttcgcatcacgcttgtacttttgccttccgcaggaccgaaggtacatttgtaattcaaagtcatttatattcattaatacaagtag

SEQ ID NO: 119574 - DNA, 1230 bp, Zea Mays
gccgatctctgcttcctgggcctgctgaagcagccagagtccgacgccggcgccccattcgagctcgacgagcgcgacatggtgtggccggcgggcggagggcagcaggatggttgggcagccccgccggcgagcgtgcgcgcacgccgtgccgcacagcttcgggctgccgtcgctgctcgccgaaggctgcggcggtggggtgcccgtgcccgtgccggggagggcgatggcgccgagacagtcggcgccggtgcgcgtgccggcggcgtggccggcgggcgggtggcgcgcaggcggcaggaaggccgacgaggacgaggaggacgacgaggaggtggtgccgccgcacgtggtcgcggcgcggcgccacgcgcggtcgtcatccgtgctggagggcaccgggcgcacggtcaagggccgcgacctccgcagcgtccgcaacgccgtgctccggcagaccgggttcttggacctgtgaacgtccgcaggcagccgacattgttgtgtgtccgtgtgtcgttctgctgcagacgagcctttagttgatgttgctgacctgactacgccaccagagccatatacttctgtccccagcgaagagcctctggttgacatggttgacctgacaaacccttcatggatagatgcttcttcagtgaatgagcctccggctgatgtggttgatctgctacatgcttcaaacgagcctttggtcaatttggatggtctgccaaaccatccagatatgtcttttggtgggagcagtggagaacataccgacagtcttatataaaggataaggccatgcggtactgatagttcagagatgagcggaacatataaggccatgcggctgatgtgaacgacggtctcatataagtgtgttccaagttatgcataagtttttgtacataaataagcctttgtgtctgcatcagtttatactaaatactatgaaagcagagtaactttggtttgggttgctattctcccgtttatgtaaatccattacaactaacactttgccgatataactttttactgttgcacgttctttttcaagttctgagcattgcagataaagctgagatacaatgcatctctcatttttttaatacacgatttttaatacacgattttgcccatctcccgattcagatgataatgacagtgcaaaaggtactcttctttcaatggtccatatcttatgtagtccatgcaagatcc

SEQ ID NO: 119575 - DNA, 1674 bp, Zea Mays
tccatttatttcctcatttcaaagcttctcgctcgaaccaaaaaaaaagataaaatagattggataagcctggaacgactgcatgtgaggtccgttcccgactcccgtgctcgccacctcctcttccgtaataattccattccagaagtaacagtgtccgtgtcttccttagttccttgctccactcagtcactctccagtctcctcacgacctggctgctcccaagctccgtcctctgctctgcctttatataatccccgagccacaccacctccctcacagtcgcagacacacaccgctgcttcaagaaaccaccgagagcccaaccgcacaggcaggagagagagcagggagccagggacagtagcgtggggccggggagcaaagatggaggggaaggaggaggacgtgcgcctgggcgccaacaagttctcggagcggcagcccatcggcacggcggcgcagggcgccggggccggggacgacgacaaggactacaaggagcccccgccggcgccgctgttcgagcccggggagctcaagtcctggtccttctaccgcgcgggcatcgccgagttcgtcgccaccttcctcttcctctacatcaccgtcctcaccgtcatgggcgtctccaagtccacctccaagtgcgccaccgtcggcatccagggcatcgcctggtccttcggagggatgatcttcgcgctcgtctactgcaccgccggcatctccggaggacacatcaacccagctgtgaccttcgggctgttcttggccaggaagctgtccctgactagggccatcttctacattatcatgcaatgcctgggtgccatctgtggagctggagtggtgaagggcttccagcaggggctttacatgggcaacggcggtggcgccaatgttgtcgcccctggatacaccaagggggacggccttggcgcagagatcgttggcaccttcatcctagtctacaccgtcttctcggccaccgatgccaagaggaacgccagggactcccatgtccccatccttgccccactgccaattgggttcgcggtgttcctggtccaccttgccaccatccccatcaccggcaccggcatcaacccggctaggagccttggcgccgccatcatctacaaccgggatcatgcgtggagcgaccattggatcttctgggtcggccccttcatcggcgccgccctggctgccatctaccaccaggtgatcatcagggccatcccgttcaagagcaggtcttaagctgccgcgggtgtgctgagacatgtggggaatgtattgtctgcccacgcctagtttctctgctgaatcttccatctctcttcccttcaagactgctcactgctgcactgctctgttatctgaacccagaacttcgtgtactcctgtaccgagctgtgtgtatgtttttttttcttccatcgtgtttgttgcaagggttcccgtctccttttatgcgttgggatcgtggcaagaaagggcagatatcatgtggaaacgtgggtttataactatcagctggatttttcatccaagtggaatcgattcagaattttcttttgttcttgttttcaacagaattttccaaccagccatccaatgcatcgtgaaccacagacctagtaataaatctgacaccagtggtaaaa

SEQ ID NO: 119576 - DNA, 1394 bp, Zea Mays
caaagcttctcgctcgaaccaaaaaaaaagataaaatagattggataagcctggaacgactgcatgtgaggtccgttcccgactcccgtgctcgccacctcctcttccgtaataattccattccagaagcacctcctcgagtcactcatcagtgtcctgccaatgccatccagaaaaaaaatgctgtaaaataaaaataacagtgtccgtgtcttccttagttccttgctccactcagtcactctccagtctcctcacgacctggctgctcccaagctccgtcctctgctctgcctttatataatccccgagccacaccacctccctcacagtcgcagacacacaccgctgcttcaagaaaccaccgagagcccaaccgcacaggcaggagagagagcagggagccagggacagtagcgtggggccggggagcaaagatggaggggaaggaggaggacgtgcgcctgggcgccaacaagttctcggagcggcagcccatcggcacggcggcgcagggcgccggggccggggacgacgacaaggactacaaggagcccccgccggcgccgctgttcgagcccggggagctcaagtcctggtccttctaccgcgcgggcatcgccgagttcgtcgccaccttcctcttcctctacatcaccgtcctcaccgtcatgggcgtctccaagtccacctccaagtgcgccaccgtcggcatccagggcatcgcctggtccttcggagggatgatcttcgcgctcgtctactgcaccgccggcatctccggaggacacatcaacccagctgtgaccttcgggctgttcttggccaggaagctgtccctgactagggccatcttctacattatcatgcaatgcctgggtgccatctgtggagctggagtggtgaagggcttccagcaggggctttacatgggcaacggcggtggcgccaatgttgtcgcccctggatacaccaagggggacggccttggcgcagagatcgttggcaccttcatcctagtctacaccgtcttctcggccaccgatgccaagaggaacgccagggactcccatgtccccatccttgccccactgccaattgggttcgcggtgttcctggtccaccttgccaccatccccatcaccggcaccggcatcaacccggctaggagccttggcgccgccatcatctacaaccgggatcatgcgtggagcgaccattggatcttctgggtcggccccttcatcggcgccgccctggctgccatctaccaccaggtgatcatcagggccatcccgttcaagagcaggtcttaagctgccgcggactgctcactgctgcactgctctgttatctgaacccagaacttcgtgtactcctgtaccgagctgtgt

SEQ ID NO: 119577 - DNA, 986 bp, Zea Mays
cacgacctggctgctcccaagctccgtcctctgctctgcctttatataatccccgagccacaccacctccctcacagtcgcagacacacaccgctgcttcaagaaaccaccgagagcccaaccgcacaggcaggagagagagcagggagccagggacagtagcgtggggccggggagcaaagatggaggggaaggaggaggacgtgcgcctgggcgccaacaagttctcggagcggcagcccatcggcacggcggcgcagggcgccggggccggggacgacgacaaggactacaaggagcccccgccggcgccgctgttcgagcccggggagctcaagtcctggtccttctaccgcgcgggcatcgccgagttcgtcgccaccttcctcttcctctacatcaccgtcctcaccgtcatgggcgtctccaagtccacctccaagtgcgccaccgtcggcatccagggcatcgcctggtccttcggagggatgatcttcgcgctcgtctactgcaccgccggcatctccggaggacacatcaacccagctgtgaccttcgggctgttcttggccaggaagctgtccctgactagggccatcttctacattatcatgcaatgcctgggtgccatctgtggagctggagtggtgaagggcttccagcaggggctttacatgggcaacggcggtggcgccaatgttgtcgcccctggatacaccaagggggacggccttggcgcagagatcgttggcaccttcatcctagtctacaccgtcttctcggccaccgatgccaagaggaacgccagggactcccatgtccccatccttgccccactgccaattgggttcgcggtgttcctggtccaccttgccaccatccccatcaccggcaccggcatcaacccggctaggagccttggcgccgccatcatctaccaccaggtgatcatcagggccatcccgttcaagagcaggtcttaagct

SEQ ID NO: 119578 - DNA, 247 bp, Zea Mays
caatggcaagtcctagatgatgtaggctttgcttatcctggccaaccacaaagtacgcatctcatgtgcaaagagacgatcttccgtcatagactataataaatagtaaatggaccgatcaccagtttattggctcgttcattcaggtaaggaggctgtgacttacaagatgtcaaagggaaaccattgtggaagttcttcggtaaagggctttaagcgagtaggggtagctgatactacggcaggg

SEQ ID NO: 119579 - DNA, 1274 bp, Zea Mays
aatacgacagccatctggccatgtgcggcggaatcttggcaccggcgctgcttttaccactggatacttttgtttccgttccagcccaaccaaaaggccgcgagagacaagagatgataaaaagtttaaaaactattgctcgacagtgaattgtacatgcacatgtcgagttcaccgtttccactcacgggctcacagcgtcacgtacgcacagaacaccggcaaggaaaaggaattcactgccggaccaaggtagaaaacagaagaaaaaaaaaatcctggcaccggcaggcggcagctaatatgaaccagctcctccacacataacccatcacccatcgttccatcatctacagcttggatgccggtactccagaattatattgagaccatgcggttcatcaatcaccatcagcactttgtatcgtgatccaaggtccagtccagaacacatgtattagtttcctccccttttggtccataatagtaccccccaaaaaaaagtcacagggcaagcaaaatgcagaaactcgcggagaggactatgtcaagcaggcattggaatggaacccatgataacgagggtccagagcaaaaacagcgctgtacacacacacgcatctactactagtagcacttagcagcgaggcagtgatcaaaacgtacccaacccaacccataattagtgaagcagagattactagctagtaaacctcctcggggatgctctgcaggccgggctcccactccccgcccgcctgcatcgtccggcgcgccgcctcggccgccctccgcgcgctgcgccgccgcagcgactgcagcctctgctcggcgcccggccccgctcccgcgcccgcgcccgcgccacgctgccggtggcggcgctcgctgctggccgccgccgccgccgcgccagcgccgtcgtcgtcgccgagcgccgcgaccatctgcttgagctcgcgcctgctgacgacgatcctgacgcgcaccgcgccgcccacgtcctcccgggacaggaggcggccgccgtggcgcagctgctcgagggcctccgccgcggccttcgactgctggtgccggccgtcggcggcggcggacgcgtccctggggaagaagcacctggacgccatggctaggtggtctctgggtgggctggccgggccgccgagcggtgcgccggcctggccgtcgccgacgtcccttgcaagttagtagtagcagcacaaaggctaaagcgaaggcaaagtgaatgcgtgggctgccggtcgagtaat

SEQ ID NO: 119580 - DNA, 499 bp, Zea Mays
atgcactgcagcgccggcgaccagcggccccggcgccttccggcagcagccaccgcgtcggccgcagcagcctgctgcttcctggcgtgctggcggcgcttcagcacgctgacgagctgctccagcgccggcggcagcccggcgaaggcgccgccgctcccggcggcggcgacggccgccgccacctgcttgagctgctgcttgctgagcacgatcttgacgcgcatcgcgccctcggcggcgacgctctcccccgtggaacgctcgatggccgtggccgtctcggtgtccagctgcagccgcgggcacctcaccagcctccgcccgtccctcctgcacgtagccggcgcggcagcagcctccagctccatggatcgcccgtctatccttcgatctggtaacgccagtaggcagtagtagctagagaacaagtgaacaacggaggaatattatgtaacaacactgtcacttgtgcgtgtccaagctagggtttttatgt

SEQ ID NO: 119581 - DNA, 399 bp, Zea Mays
atggcatgccacgtacgcgacctggccacccaatctgtggcctgtggcctgtggctgtgggcaatgttagaataccaaaacgtcgttgggggacggttgaagctgaagggtaaagcgctggacgtgaaagatggtggagtaaagaaaaagaagaagtaccagcatgagaagtcgtctcagactgaatctgataagaatagagatgaagagaacccacatcttgactatgaccatctcacaccagcagagcgccgatacatgaaacagaagcagaagatcgacatgcagaagatagccaaagtcgccaacaagtcacacaaggaccgcatgcaggacttcaaccagtacctagctaagctcagcgaccactacgacgtccctaaagttggtcctggctaa

SEQ ID NO: 119582 - DNA, 723 bp, Zea Mays
gttcttagcctggaatcaactgctggattagaatcagtgagatgcatgtcacgaactgatctcaaacttgatggatcatttgctgatatgattcttattcctgatattggggttcctgataaaagcagaacttctgcactttttatttcgacaaatcctggacaactgaatttttatgatggtggctatctattttttgtgcaaaactcaaaagagggaaatcctcttcctgaatcacacaaatttccagtcgcaattactacctttgatcccaacataacgatcactggtctttattcgctaaccaaaactgaatttccaaatatttcactgaagaaattttgtgctaggaaaaatgttgggcatttcatatcagagaacatgaaatggcctttgactggtggggttccaaatgagatgtcactgaacgaagatcatgctgttgaaagaatatgaattgcaggctaccaagatggttctgtgagaatatgggatgcaacatttcctattctaatgccaatgtttgtcttggatggaaatgttagtctcatttgtatatttgtagtattacttgcattattcctcattggtttatacctaatggattaaccccaatcaagctataactattctttactataggttgctgatgttaatttggatggagctaatgcttctgtatcatctctagccttttgtccattaagcatgactttggctgtt

SEQ ID NO: 119583 - DNA, 131 bp, Zea Mays
taagaaagttattcactattccaagctctacaactttggtataagaacttttaaccaatcctttctagattttaaattccacctttgggcaagtttagggcttatagatactcaaccaccctaagtgcttc

SEQ ID NO: 119584 - DNA, 3571 bp, Zea Mays
ctctacgttgttccggaacattctgcttcgccgtcccgcgaccgcgagcaccaccgctagcataaaccggcgacgcgctattaatccaacccaaaagtcaggcatcactgcgagccaagtatagcaggcgcggaaaggggccaagggggcgagtggagttgctgcggtgcccgtctatcttcggggagcgtctggggttgccggcggggaggccatggaccggggtcgaagcgagagcggcctgcggtcgcacgggtccggcaaggtctcctctcggccggggtcggggtcgcttgcgttcccagaggagcaaccgatactagccgatcgcgacggcggcgaccgccgagaggttgtcgtgaagatcgatgggagcgggaacgggcacgcgccgttctccttccatggagcggacgcaggtgctgacggtggcggggggaaggcggagaatgcgacctccagcacgaactccacagcgaccacgccgcaggccgagagcaggtcgatgtcgagcgagaccaactatcctatgccaccggccaatgtgtgccggcgggaggggagctacgagttctggaacaatgacggcggcagcgccgaggcgttcagcttccagaaccgtccgccgcaggggccgcactcgtcgtccccttcaatatcgccgccgctgccgccagaagggggcggcatggacccacccgcccggctcaacggcagcttccaccggaagcaggtggcgtccgacggcgagatgtcgctcgacctcgacctggagatggacgagctcgggaggacggccgcgcagctgcgctcgcacccatccttttccagctcgctcgaaagggacgaccgcgtctcgttgcaggagccacaaaagcggcactccgcgtcgtcctgctcattcgattccgacaccggcgacggccgaaagcgccgcggcgacgacggcgaggtcgttcggtgcacgtcctcctctagtgctgcgggagcggggccgttgctgcgagtcaacacgcgctcccggctcatggacccgccgccgcagtcgcagcgggcgccggcacctgccgcgtcttctgtcgtcgacgaggagcgaaaatcttcaggcttgcggactcctacaaagtcgggccgcctcttctccaggcttatgtccggcaacaagtccggtcccattgctggcaagtcaggtcccatggacgacgaggaggacgatccattcgtggacgaagacattcccgatgacttcaagcgtgggaagctggacgctttgacggtcttgcagtggctcggcttgttccttatcatcgcggccttggcatgcagtctcagcataaagatcttgtccacgaagaaggtgctgggtttgcacctctggaagtgggagctcctcgtgttcgtgctcatctgcggccgtctcgtctccggatgggtcatcaggattgccgtcttcggtgtcgaacgcaacttcttgctgaggaagcgcgtgctctactttgtgtatggagtgcgcagcgccgtgcagaacgcgctctggctcggcctggtgctcgcctcttggcacttcttgtttgacgagaatgtccagcaggagacgaactctccagtactgccctatgtgacgaaggtactattctgctttcttgttgccacgctcatccgccttgtcaagacattgctgctgaaggtactggcctcctccttccatgtctcgacgtactttgatcggattcaagaggcattgttcaatcaatacgtcatccagacactctctgggccgccactagtagaagaaaaccatgtgcttgaggaggttcatgagctccaacgtgcaggtgcaactataccaaaggagctgcgtgatgcagtaccaaccaaacatgtatctgagcagaggaacattcagttatcaggggtcatgcctgagggacaaggtagcaagcagctgtcgaaagagaaaagggacgggatctctattgatgcacttaacaagctcaaccagcgaaatgtctcagcttggaacatgaagaggctgatgaggattgttcaatttgggacattaacgactatggatgagcagatacaacaggcaagaggtaagggagatgaatcagcaacacagatacgaagtgaatatgaggcaaagatagctgccaagaagatctttagcaatgtagcaaagccaggttccaagtacatatacttgtcggacttgatgagattcatgaggcaggaagaggctgttaaagcaatggatctttttgaaggggcacaggagcacagcagggtcagcaagaggtctctcaagaactgggtggtgaatgcatttagagagcgcaaagctcttgcccttacactcaatgatacgaaaactgcagtaaacaagctgaaccagatggctaacgttattgtggggatcattgtgtttgctctctggcttcttatcctgggaatagcaacagcaaatttctttgtctttctcacttcacagattctcctggcagttttcgtgtttgggaatacgttgaagacgctctttgaggcaattgtcttcttgttcgtgatgcatccctttgatgtcggtgaccgctgtgaaattgaaggtgttcagttggttgttgaggaaatgaatctcatgacaacggtgtttctccgatctgataacctgaagatatattatccgaacagtgtactcgcaacaaaaccaattatgaatttctacagaagtcctgatatgggcgaagcaattgacttctccattcatgttgcaactcctgccgagaaactggccctgatgaaggaacggatactgcgctacattgacaacaagaaggaacattggtacccgggcgcgatggttgtactccgggacgtcgatgataccaacaaactgaaagtgtcaatatggctgcgacacacactcaacttccaggacatgggcacgcgtttcgtgaggcgagagctagtgctccaggagatgatcaaagtcctgaaggacctcgaggttgagtatcggatgcttccacttgatgtgaacgttcgcagtgcgcctccaatccagtccacaaggatgcctacaacatggagttattcgtgaagccagtgaccaggaaccggaccatttggccgtggcattccggatgaggacttgctacgttcctccatggatttggtgggtttaagctgcaagatcttgttggcagcgcaaatggcgtgatggtggtgatcttggtagcaaatcgagctagagattagcatattactatattagcatgtagagagctgttagttgtgcctgcactcgtcacttgtgcagaatggatgggatggaacgcatgccggatgcgacagcggcaacgaagatggtgggcggatggcaataatgtagtgctctgttgatctgttgtatacttgtatctgtgagttgtgacgagaaacctgttgtatacggaggtcctgaacttgcagaattcaaattggcaatgtattacagattctccagcctctgcatattatgcggcctctgcatattatgcgggtaaggcttgacacttaaagatacatttcccca

SEQ ID NO: 119585 - DNA, 959 bp, Zea Mays
gaaagcttataaaacaacagtaagacatgcctttggttgattattctttgcgtttgctgccgaacaaggagaagaagtgttctaggcaaaagtgttccaattggattaattctggactagaaagagcgaaagagccggatgcactaaatccaggcctgaaacagttcctggcttggaactattcctatgctgtctaacggggtcgagctgtttccaaatatatattatctattgctacttccttcacatatcattactttatgtgttcttgctgattacatttggcaccactgttggaagcttgattacattgatggcgtttgtcccaccaatgtcactgtaccgcataatctatgagctctctccatcttcatcatcgggactttttcaaacttctccggtgtacatatgggagactagagtgatcctgaaactttcgactaccttcagcatgctcaagctcgtcaaggaggtcagcaggcagcaacaccctgttcaactacctcatcccaccgatggggatggacaagtgtagcgcgaacaacgtggacagcggcaacgtacacaaggcgggcatggtgatgaacgggttgcatatcattgtgtacgcatccgagacgttggggtgtgcggcgatcatgtccacagacggttgatgagcaagatgctcgagcgcattggggattcatcgttgatcaggttcggcacatacacatgcggtgcgtgcgccgtgtcgtgcacgctcaagtgggacatgtctactatcatgtagtacaagggcctacccctgcatcaggccatcgactactatgtcaagggcacgatgcagaatatccgaagacaactattatcaataattagccaatataaactatttacaaatctttactaatgtttaacaaaatagcatatccctatatcattgtttttgaggaaaaaatggcgtattagtattgaca

SEQ ID NO: 119586 - DNA, 655 bp, Zea Mays
cagaagtagcacctccactagtagatctataggcatggggagagagaaacaggtagatctgcttgaagccatcgtctcatatcgaatccttcagatctcacacacggagaccaagaaaagcacaattcccatccatctgatctgcatgcccatccctcatccctctcccccctccatggaatcccacaaaagccgcaaccctagctccactccctctataaatagcgcgccccgtaaagcagcacatacattacagtgcagcaagagccgcagcagctgtggtctgtgagtggatcgctcggagcaagcaaaggaactagtagtggcggccatgtgcgcttatcaaagggtggcgcttactgagagttccttggcattctgtccacctcccttcttgacgatcttgcagaaagtttgctttttttgtttgtttggaggtgggcatactgccaatggagctgcgtaggcctccctttgtaaagcccgcatgacataagtaagagctacgttagatttgatcatcacctgtgccggaaacgccttcgttttgctgccttttcttgcgtgtgttcatttgatgggcctgtttgtttgattgatgtcgatcgaggcgtgcccggccggccggttctagcttgttttcttaggctcttag

SEQ ID NO: 119587 - DNA, 1713 bp, Zea Mays
cgaccgagctaaagggcgaaagagagagagagagagagagagcagtgtgcttgtggtggccatgggcaactgctttggctccaacgtggcggaggtgggggccgtcaaggcgatggcgcaagcccatcacgcgcacccgcaagtggcgctggcgaagcacgtcgtcatgtccgccgcgccgtccagtgctgcccaatcccatcacgccgcggcgaggcaccagggggtgcccgtgcccgtgcccgggaagttgccgccgccggccacggccacggccacgggaggcgccggcggcagcaggcccccagcagctgcgggcgggggcagcgatcgtcagccggacgggaggatcctggaggctcccaacctccgtgtgttcacgttcgcggagctcaaggcggccacccggagcttcaagccggacaccgtgctcggcgagggagggttcgggcgggtgtacaagggctgggtcgacgagcggaccatgggccccgcgcggaacgacagcggcggcctgcccgtcgccgtcaagaagctcaaccccgagagcttgcagggcgcgcaggaatggcagtccgaggtgaacttcctcgggaggctttcgcatcccaatctggtgaggctgctggggtactgctgggaggacaaggagctcctgctggtgtacgagtacatggccaagggcagtctggagaaccacctcttcggaagcgagccacgcaaaggcggcggaggagccgtgcagccacttccgtggagcctccggctgcgcatcgtgaccggcgccgcccgcgggctggccttcctccactcgtcggagaagcacgtcatctaccgggacttcaaggcctccaacatccttctggacacgcacttcaacgccaagctctccgacctggggctcgccaaggacggccccgccggcggcagtagccacgtcaccacccgcgtcatgggaacctacgggtacgcggccccagagtacgtcgccacaggccacctgtacgtgaagagcgacgtctacggcttcggcgtggtgctgctggaggtcctgaccggcctgcgcgcgctggacacggaccggccgacggcgcagcacagcctggtggactgggccaagccctacctggcggaccgcaggaagctggcgcgcctcatggacccgcggctcgaggggcaatacccgtcgcggggcgcgcagcgcgcggcgcagctcacgctgcgctgcctcgccgccgaccataagaaccggccctccatgcgggaagtcgtggcggtgctcgaggagatcgagtccatgtcgtccagggcggcaacgaggctggatggctcggcgtccccgcgccccacgccgctgcggaacggccacagccagcgccccgggtcgtcgggctctaccttggactgggctggcccggctccggctccgtctgctagagtgacaaggtagacagttatagtacgtttgagcttgagctaagcattttcaatgtgctcttgtatttgcggcgcatagtaccccacatcaagaactggactgcagtaatggagcctattgcagctgatgataatccatacccgttttgaattaaaccaagtgcatctgattgactaattgaatatctatgcgaagtattaatcccttcgttatttcttatttgatgcagtttagtttagaaataaactaacgagccacaaatatttaataacgaa

SEQ ID NO: 119588 - DNA, 282 bp, Zea Mays
atgtacctgagacgacagagggaaggaggtgacgatgctggcgcagtagtcgcctcctctatagacgacaacgacgtcgagacgatgccggagagctcagagccctaccagcacgcttcctccagagacgacgacatcaaggcaatgccggagagctcggatccgtaccaggggcctacacacgcatgccaagagatgggacatcgacccatttttatcccttgctcatcctacgtgtgggatgaaaaaacatttacatgtgacaagaacactgttatgtag

SEQ ID NO: 119589 - DNA, 1187 bp, Zea Mays
aaccacgcgtcccgaatgctgcacccacccggtcccgcgtccctgctttttcccgttcacgcacacacacgcgaccgaaccgcacaaacgcgctcggcgcttccccacccaaaaaggaaaaccaaccaccactcccaccaccctccgcctccgcctgcgccacagctgccgattcgaaagccctcgtcctgacccctcgcaaaaccctagctccaaccaccatgaagggcaaggccaacgcctccaagaaggatgaggccaggccgcgagcggcaagcccaagcgccctccctccgccttcttcgtcttcatgtctgaattcaggcaggagtaccaggcgcagcaccctggcaacaagagcgttgcggccgtgagcaaggcagcaggggaaaagtggcgctctatgtcagagcaagagaagcaaccctatgtggaccaagctgggcagaagaagcaggactatgagaagactaaggcaaatattgagaaggagagcacaagctcaaagaaggctaagactgatgacgacgatggctcgaagtccgaggtcgatgatgaggatggcggtagtgacgaggataacgacgacgacgagtaaatagtatttccgctgttgtgaggtagcaaatcgattgttaggtccccaattagctcactggtttgctatctttaatgttaagttgtttggaacaggtgtttatgaaggggatctattagtttcgtgaggttgttagtttagtgcattagcaaagaaaaagccgaatgctgctagctattatgttgcttttcttttgctaatcacttgtgtcacaactttctgtacctgtttcattgactaatctagtgactagtcagttatgggtttaatgtttggttttggttttatatatttctttgttgcattctgtgcggtctacggaagtcatctgtgctgtatgaatgatgaatatctgcttgtggctcgtttcagtttagtgagtttttgttttgtgactcaggttaatttacatgagtttgtttgtgactgttaatttgtgcgtttattggtgcagttagctttcttatatatatgcatggtggaaattctgttgatgatttctgagataaccaagctcacttgtttcatgataaactgctgcaaatttgttgccgttttctgatataatcaaattcacttgttttttcat

SEQ ID NO: 119590 - DNA, 1230 bp, Zea Mays
aaccacgcgtcccgaatgctgcacccacccggtcccgcgtccctgctttttcccgttcacgcacacacacgcgaccgaaccgcacaaacgcgctcggcgcttccccacccaaaaaggaaaaccaaccaccactcccaccaccctccgcctccgcctgcgccacagctgccgattcgaaagccctcgtcctgacccctcgcaaaaccctagctccaaccaccatgaagggcaaggccaacgcctccaagaaggatgaggccaggctccgggccggcggcggcggcgccggaaagcgcaagaaggccgccgcgagcggcaagcccaagcgccctccctccgccttcttcgtcttcatgtctgaattcaggcaggagtaccaggcgcagcaccctggcaacaagagcgttgcggccgtgagcaaggcagcaggggaaaagtggcgctctatgtcagagcaagagaagcaaccctatgtggaccaagctgggcagaagaagcaggactatgagaagactaaggcaaatattgagaagagcacaagctcaaagaaggctaagactgatgacgacgatggctcgaagtccgaggtcgatgatgaggatggcggtagtgacgaggataacgacgacgacgagtaaatagtatttccgctgttgtgaggtagcaaatcgattgttaggtccccaattagctcactggtttgctatctttaatgttaagttgtttggaacaggtgtttatgaaggggatctattagtttcgtgaggttgttagtttagtgcattagcaaagaaaaagccgaatgctgctagctattatgttgcttttcttttgctaatcacttgtgtcacaactttctgtacctgtttcattgactaatctagtgactagtcagttatgggtttaatgtttggttttggttttatatatttctttgttgcattctgtgcggtctacggaagtcatctgtgctgtatgaatgatgaatatctgcttgtggctcgtttcagtttagtgagtttttgttttgtgactcaggttaatttacatgagtttgtttgtgactgttaatttgtgcgtttattggtgcagttagctttcttatatatatgcatggtggaaattctgttgatgatttctgagataaccaagctcacttgtttcatgataaactgctgcaaatttgttgccgttttctgatataatcaaattcacttgttttttcatgaa

SEQ ID NO: 119591 - DNA, 784 bp, Zea Mays
tcccgaatgctgcacccacccggtcccgcgaaaaccaaccaccactcccaccaccctccgcctccgcctgcgccacagctgccgattcgaaagccctcgtcctgacccctcgcaaaaccctagctccaaccaccatgaagggcaaggccaacgcctccaagaaggatgaggccaggctccgggccggcggcggcggcgccggaaagcgcaagaaggccgccgcgagcggcaagcccaagcgccctccctccgccttcttcgtcttcatgtctgaattcaggcaggagtaccaggcgcagcaccctggcaacaagagcgttgcggccgtgagcaaggcagcaggggaaaagtggcgctctatgtcagagcaagagaagcaaccctatgtggaccaagctgggcagaagaagcaggactatgagaagactaaggcaaatattgagaaggagagcacaagctcaaagaaggctaagactgatgacgacgatggctcgaagtccgaggtcgatgatgaggatggcggtagtgacgaggataacgacgacgacgagtaaatagtatttccgctgttgtgaggtgtttatgaaggggatctattagtttcgtgaggttgttagtttagtgcattagcaaagaaaaagccgaatgctgctagctattatgttgcttttcttttgctaatcacttgtgtcacaactttctgtacctgtttcattgactaatctagtgactagtcagttatgggtttaatgtttggttttggttttatatatttctttgttgc

SEQ ID NO: 119592 - DNA, 1218 bp, Zea Mays
atgctgcacccacccggtcccgcgtccctgctttttcccgttcacgcacacacacgcgaccgaaccgcacaaacgcgctcggcgcttccccacccaaaaaggaaaaccaaccaccactcccaccaccctccgcctccgcctgcgccacagctgccgattcgaaagccctcgtcctgacccctcgcaaaaccctagctccaaccaccatgaagggcaaggccaacgcctccaagaaggatgaggccaggctccgggccggcggcggcggcgccggaaagcgcaagaaggccgccgcgagcggcaagcccaagcgccctccctccgccttcttcgtcttcatgtctgaattcaggcaggagtaccaggcgcagcaccctggcaacaagagcgttgcggccgtgagcaaggcagcaggggaaaagtggcgctctatgtcagagcaagagaagcaaccctatgtggaccaagctgggcagaagaagcaggactatgagaagactaaggcaaatattgagaaggagagcacaagctcaaagaaggctaagactgatgacgacgatggctcgaagtccgaggtcgatgatgaggatggcggtagtgacgaggataacgacgacgacgagtaaatagtatttccgctgttgtgaggtagcaaatcgattgttaggtccccaattagctcactggtttgctatctttaatgttaagttgtttggaacaggtgtttatgaaggggatctattagtttcgtgaggttgttagtttagtgcattagcaaagaaaaagccgaatgctgctagctattatgttgcttttcttttgctaatcacttgtgtcacaactttctgtacctgtttcattgactaatctagtgactagtcagttatgggtttaatgtttggttttggttttatatatttctttgttgcattctgtgcggtctacggaagtcatctgtgctgtatgaatgatgaatatctgcttgtggctcgtttcagtttagtgagtttttgttttgtgactcaggttaatttacatgagtttgtttgtgactgttaatttgtgcgtttattggtgcagttagctttcttatatatatgcatggtggaaattctgttgatgatttctgagataaccaagctcacttgtttcatgataaactgctgcaaatttgttgccgttttctgatataatcaaattcacttgttttttcatgaa

SEQ ID NO: 119593 - DNA, 75 bp, Zea Mays
cgcacggcacggcaccgcaccgctctccacagccacgagagcccgctccctcgccgacggcgcagcgcgcaccac

SEQ ID NO: 119594 - DNA, 75 bp, Zea Mays
cagccacgagagcccgctccctcgccgacggcgcagcgcgcaccacgtctgccgttggaaatcccgaatcgccca

SEQ ID NO: 119595 - DNA, 1412 bp, Zea Mays
ctgggaaaaaacgccccatttcatttcagaattgcaatcaccgatcgttccgcggattgcgatcgccatggccgccacgggctggtccgacctcccctccgagcttctaacggacatcgccggcgggatcaccgagctcgccgacatcgctcgcttccgctccgtctgctcgtcctggcgatcggcggcgcgggacgccgcggccgccccgccgccgcagccgccgtggcttctcctcccgtcgtccccgtcctggctcttcttctgcccccgggaggaccgaatctacccgaacctccgcctgccccgccccgccgcggaggcgcaccaccgccgccgccgccgcctctacgcgtccccgcacgggtgggcgctcgccatcgacccgaccgatctggccgcttccctggtccaccccttcaccggcgcgacccgccagctcccgcggctcccctccttcttcgcggagaccgacgacatggcctgggactggtcgccgcacggcgtcatggcgtcctgcggcgaaggcctgctcttctgcggcgccgatccgacggccgccgcttcctcctgggcccccatccccgccctggccgactgcaacgccagcagcatcaactacgccggcggcgagttcttcgtcttcgaggaggacgtctgccgcaccaccgtcgttgacgcggtcaccctcgccgtcgccgccgtgatcccagcccccgccgtcgagctccccgccgaggcgcgcgtcgcggtcgccggcgacgagctcttcctcctcgtcaagtccaagtggatgtacctcttcggcgacgacgtcgacttctccaaggccttccacgtcaaccaccgcggcgtcaatccgccggcctggcaggagctcgcaggcatcggcgaccgtgcgctgtttgtcgattccctccacgggttcgcagtgccgacggcggggtttggcaatcttgaaaataacacaatctattcagtgagcagcaaggaggtgaacaacaggcgtcccaccacggtgaactacaacgtgtcggcatttagcctggagagccgtagctccaagaaacttgcgtgccggctcaatgatcgggagatggcaatgcgtgccgagacgccatcgtggatcctgccgagcttggatgaaggctgagtctgagcttggtgatcatcattattattgtcatggcatcaatatataagttcgctcctgtaaattcttaattctgtcgctttatatagattgattaatgttcccttgatcaatcacgcagtccaatataggactatcatgtatgtaacgcatatttgttggaaaatttcaatcaaattcagtatcctgtgttaatgttcaacttcaataaaagattgcatgttctgttcattttcaagctcaataaatgtttgtgata

SEQ ID NO: 119596 - DNA, 725 bp, Zea Mays
aaaccgacccatcatatcatcacctgagagatccgtcccaacaatacggaccaagcccaataaaccagggtttttgtaaggaaaatccccgtcgttctcgcgtctggagctcggcggcggagcagggcggcagggggagggcgatggaattctgcccggtgtgtgggattctgctgcagatcgatccgggcaccggaagccaccgcctgcgcctcttctgccccgtctgcccctacgtctgccccatcctgaacaagatcgtgaagaaggcgaggttggtcaaaaaggaggtggagcccatctccagcacggcggatgagatgaaatcggcccctaagaccgcagttacatgccaaagatgcaaccatggagaagcatacttcaagcagatgcagattcgatcagctgatgaaccgatgacaacaatatacaggtgttgcaaagaagaatgccagcatgaatggagagaggactgaccatagcattcgcactttgcttacacttcgctccctgtgcttcttcagttttgagtgttgggatgtcctgttgcacatgtaatgcttctaatcagcgtatacttaagtacaaatttttggaaatgtatgttctatactatggcatcgctttttggctgcaaaagacattgcatgacacatcatctagagttatttgtgatgatgatctcaatcatcagtgagagctcacttaaaaaaattcattgagtt

SEQ ID NO: 119597 - DNA, 332 bp, Zea Mays
gagacagggaagcaacactgctatcatcttgtttatcgccttttaaagcttgtactagtattaccagttgctactgccacagttgagagatgcttctcggcgatgaaagttgtgaaaacttatttgcgcaatcgcatcggagatgagcacctgagtaatatgcttattggctatgtggaaaaagaagagatgatgaaagtgacaaatagagctatggttgatcggttcataacaatgagtgaacgaagatacgatattgattaaaaggccattggattactacttgttcaagtttactagatttcgtcattttggtaactcttcttgtcaca

SEQ ID NO: 119598 - DNA, 206 bp, Zea Mays
tagctagtccaagatctccaatcttaacttccccatggtttccgttaacaaaaatattatcacacttcaagtctctatggataattggaggttggtggctatgcaggtaatccaacccatgaagaatctgccttgcccaattctttattgccttcaagttaacatgtggatgtttctgacggtaaagcctgagacttccagacgtg

SEQ ID NO: 119599 - DNA, 141 bp, Zea Mays
ttaaattttttctatgataaccatgtatataatatagttggtcaaacattattctatagtgttaataccagctacttcgttctacaatctatggtcatgtggggaaatgatagacgaatgaaatttgatagggtgagtgga

SEQ ID NO: 119600 - DNA, 1009 bp, Zea Mays
gaagattccgaggggataatgaagagtggcacagtggccatcgagactcgagagggagtggcagacgcgaggttgcaaggagatggcggacggcaagggaagggggaattcggtcgtggcattgaagacctcgccgtcagtgccgatggctcgcggattgcgcggcggtagtaaccctctagaggagtggagcggccgcgtaaaagcgattgaggccaggttccgtgcatggatggcgaagcagcccatccacatcgaggccgcggtgaccacggtcgttggggcggtgcagggcggggctctgggtggtctcatgggctcactcacagccgacggagggtcgctgttccccatcccgcagccgccgtccaacgccaactcggatgccatggccccttagggcccgacttgtagcctgcggcgtctttcttggtggcgacggcgcgggcgaaggagcctgacatgtcgccgtagatgtccacgacgcgggcgatattagtgttgagctcccagattagcgccacgttgcggctgaggccgtccgcgtcgcgcgtctcctggttctagctgatctcctaaatcaggacgcggttgtgctccagaatcccttgcacctcgccgaaactcttttgcagcacatgcggcagcttcgtgccgccgccaccgcctgcgctggtcctgcacccacaccgcggttcctgccggcgcttgtgcctacaccagcgccagtctccgctcccgcgacgaactccatgctgtcgctgccggagccgccgtcctcctccatcgccctgtccgcccgggccggtgggggagcacgtaatgtaccttggaggcatcgaagatctgccgcggtgggcactgggcactgttgtacgggaggattagggccatagagggggagatttataggcgaagcggtgggagggattcgccgattcgggcgagaatggcaccgtgtcggggcagcggcgagggaacggggggcgcgttcccgacggcgtgtcga

SEQ ID NO: 119601 - DNA, 1278 bp, Zea Mays
acaggccgaaacagagcccggcccacgagagcccagaatcactcgcctccctccatctctgacccagtcctccctgaccgcctgacgacgtcgtgttttcttccttccccggtctcattccacgcgcccgctcctcttcgccctcgtcttcctccatcccacggtcccacctgtccctctcaccgcctcgttattttttcgcccccatctttgaacgccgggactccaactccaccgttcctccctcttcgttccctccgatcccgcccctataaatccagtcgcctcagccgccacagcgggccgcaagcacgtaaccacacagctcactgctgctcccgtcttcccgtgtcctgtcgtgctcccgtcgccgggggcggaagggttcgcgaggccggcgggcggttagggatttctccggagtcccgcgatggcgaagctgtacgtgcaggcgttcccgcccgcggatctgaacaagaacaccgagtggttcatgtatccgggcgtctggacgacctacatcctcattgtcttcttctcctggctcctcgtcctctccgtcttcggctgcacccctggcaccgcgtggaccgtcgtcaacctcttccacttcgcgatcacataccactttttccattggaagaaaggaacaccttttgctgatgaccagggaatgtacaacgcattgacttggtgggagcaaatggataatggcaaacagcttactcgtaataggaagttcctcattgttgttcctgttgtcctgtttatatttgatgcggccccctctggagggcctctttggcgaccgtagaggtgagaggaggaggaggaggctagaaccagggatagatctgagagggtatctgatagctctgcacaccacagactaccaacaacctatgctcttcctcaatacccttgccgtcagtgtgcttgtggtcgcgaaactaccgaatatgcacaaggtccggattttcggaataaatgccgagaactgagcaacgtcatccttcgccagacatttaccctatatgcgcttttcagaacggttttgtgtgttcccccccccttctagtgcctttagttgggctcatcagagcaccagtgttgaaaaagttgttagcaggatgggccttggtcgctgtatagagagatgctcggaggcgtgctgtacatctgatgtgcacggattctgtacactcttaatgttgctatatatacggtttgttgcaagcatctgtcggttgctatatgtacagtgtggttcttgcagag

SEQ ID NO: 119602 - DNA, 1181 bp, Zea Mays
acaggccgaaacagagcccggcccacgagagcccagaatcactcgcctccctccatctctgacccagtcctccctgaccgcctgacgacgtcgtgttttcttccttccccggtctcattccacgcgcccgctcctcttcgccctcgtcttcctccatcccacggtcccacctgtccctctcaccgcctcgttattttttcgcccccatctttgaacgccgggactccaactccaccgttcctccctcttcgttccctccgatcccgcccctataaatccagtcgcctcagccgccacagcgggccgcaagcacgtaaccacacagctcactgctgctcccgtcttcccgtgtcctgtcgtgctcccgtcgccgggggcggaagggttcgcgaggccggcgggcggttagggatttctccggagtcccgcgatggcgaagctgtacgtgcaggcgttcccgcccgcggatctgaacaagaacaccgagtggttcatgtatccgggcgtctggacgacctacatcctcattgtcttcttctcctggctcctcgtcctctccgtcttcggctgcacccctggcaccgcgtggaccgtcgtcaacctcttccacttcgcgatcacataccactttttccattggaagaaaggaacaccttttgctgatgaccagggaatgtacaacgcattgacttggtgggagcaaatggataatggcaaacagcttactcgtaataggaagttcctcattgttgttcctgttgtcctgtatctgatagctctgcacaccacagactaccaacaacctatgctcttcctcaatacccttgccgtcagtgtgcttgtggtcgcgaaactaccgaatatgcacaaggtccggattttcggaataaatgccgagaactgagcaacgtcatccttcgccagacatttaccctatatgcgcttttcagaacggttttgtgtgttcccccccccttctagtgcctttagttgggctcatcagagcaccagtgttgaaaaagttgttagcaggatgggccttggtcgctgtatagagagatgctcggaggcgtgctgtacatctgatgtgcacggattctgtacactcttaatgttgctatatatacggtttgttgcaagcatctgtcggttgctatatgtacagtgtggttcttgcagag

SEQ ID NO: 119603 - DNA, 1178 bp, Zea Mays
tggagctagaagagcttgacggcacgcgcgcatgcacagagaggagatgacggtgtgctcgcgtagatctacacaaagaatataaaaggctcggcatggcggtatcccaagaacacgaaatcatgcccacacactcactcctatatctactactataagaaagcaagctccaggaccaaggcagatcagccagagaggcgaagaaccgctagagtaaccaagaacaagacaccaagatccaagccggcaggcgagagatctgctcgtactcatggctcccggccccgatgcacgctgcagctagcgcgcgccttgtttggttcgatcgagacggccgtgcagatcggcttacctgatgccactgcgccgcatccatgcatgcaaggatcccaatcccgctcctcgccagagcgactctgtctcccgtgccgcgcgcgcgcgcttgccagacgagctcgggacgacggcgcgacgaggggggaggacgacgacgaggagcctactggagccggatggggacgggcggcggcggaggcggagcggaggaatgtcccgtggatggcctgagtagtggaattgctcccggctccttccctagctagtctcttctccttcatatgtcatgtagatagtgcgattctttttcgcaaatatttttttatgcgtctgccacgctagctggaggaacagcaaggaaaattggtgccccctggcaatttttttttttttggaaatgcgtcgaaattcgtccgtgtaggcttcggctacagtcggtgacgacagcagtcgatggacagcgagactgcgagaggggcagctagccgcgaagcagccctggaggaatggaggatgatggtccgcgtggggcctcgcacgtgcgtagggacccgtgccacgtgccagcaaccaagcggtgtgtttttggtttcagagactctctccagcgtccagcgacattatctaaatttcgtttagtctgataactctatttttttctcaatatctacattgtcaaaacaatacacaactaccttatttattcatttttattttaacgttcaacttgtatgcaacgtgtggcattgtaattgaagaattttttttttggtaacaatcatattaatacaatttgaacttatgtatgtaacgcaaaacaaaaaactgtaacatttttctaa

SEQ ID NO: 119604 - DNA, 1149 bp, Zea Mays
atgcaattcgaagcaagaaaaatgcttatcaacattgctgaacttcgcttgacaagtccggtcctgctactggtcttggtcctgggcagtccagtacgtcttgacgaccaggaggatcttctccctgacgagcgggccgtcttcgtggtcgacgatctggctctcccacctcatcccgtccgccaggctcttgaccttcaccagcatgtccacgtcttccctgacgatcaccgtgcccctgggcctcaggatcctgtccatctccaggaggatgcggtccatctcacacctttccttgtacagggtgaacaccgaatccgcatggatgaggtcgtaggtcctcgggtaggtagacatgccctcgcacctgtcctggtagcttccgatgaggccgcgctcgtagatggccccgagcgtggtcgcgttcgccacggtcgggaccatgttcatgacccacagcgggtcgccggccagcgccagcgccgcggcgaacccgcccaggcgcgcgttcatgtccagcacgttgcggtaccgccccttctgctcgagctggctggccaccgacttgtagtgccggaccctcctccgccacagctccgtgtcctgcgcgaacgacctggccgtgacgcccctgacagtgccgcgggagaccctgggcggcacggccgtgagccgctgcggccatctcttcaccgcgccgccggcgacgtcgctggccttggagatctccggcagcggcgttatgcaggcctccatcttgtcgtaccatgccgcgtcagggttcttgcgcgagcagaagggccgggacgacttggaggccttgcagccggcgtggttgtagggcttctgccagacggcgatgtcgccggcctccttgaccttggtccagcagaggctcctggcgacggcctcgatggcctgctgctcggcgttgaggtcctccttggtccgctcccaccccttccagtacttgttccagttgatcggcggcccggacaggatccagtaccctccgggacgcagcacccggtcgacctcgatcaggtacagtccatctgcacgccgcgttcggtgccgagtgctgagctaagcgttttgaacacagagagagagagagagtgccgtgccgtgcgtgcgtgcgtaccgtag

SEQ ID NO: 119605 - DNA, 2707 bp, Zea Mays
cacacgcccacacggggacggaggggacagaaaaggatcaaacgaaggaaaggaaaggacccagtctctttaaaaggccctcgagaaaaatctccgcgtcaccaccaagcacgtccccgttccattacaacaaaagatcgtgctagtaagcaatacgctcaatttgagtttgaggtcgatttctggagcattcgagttcttttccagtaaacttttcaggtttaagcgcggattgatggcagagctgctgtagatttggagcattttggggttggttttttgcgatttgaggatcgaatcgggctggtacaaccgcgctcacgtgcatatataaggcgaattggcggtttgttggctacaattgttcggttcttatcttgaagggtggtgcgaattggaggattcttcccgaatcgagaaggtgtaggccaaattcgcaaggaagctgcagctatccgcgtgagaaggctgcctctcacaaattctcggtcggtgccatcccggcggtggactgcttttgggcttcttcgaaggttcgtatcttttggctcaggagaaagtggttctgaaggcctcgggcttctcatccccaattcgatccgttcccgagacggtgattgggtcatagatggggacggggtcgagcatcctgggcgcggatggagagtggggggagacgtccctcggcgacatgccggagagctgcgtggcggcggtactcctctacctcgacccgccggagatctgccaggtggcccgtctcaacagcgccttccgcggcgccgcctcggcggactgcgtctgggccgccaagcttcccgccaactaccgttaccttgcggccctagccgcggccgccgatgacgagggctgtggcgatggagatgccagcggcaagcgcttgaccaagaaggagatttacgctcgtctgtgccgatccactttctttgatgccggcagaaaggaattctggattctgaagaacaagggagccctttgcatgagtatatcatcaaaggcaatgactattaccgggatagatgatcggaggtactggagccacctcgctacagaggaatcaagattccatactgttgcctatctccagcagatttggtggctcgaggtagatggggagcttgagttctgctttcctgctggtgcctacagccttttttttcatcttcacctgggtcgaccctataggcgcatgggtcgttggctttgtggaactgagcatgttcatggttgggatgtcacgcccacacggttccagctcacgacctctgatgagcagcaggcgacatccgaatattatctgcatctacatgaacaagggggctggaagctttaccatgttggtgattttgtcatatcaaattccgatgagcccatgaaactcaagttctcaatgatgcagatcgattgcacacatatgaaaggcggcttgtgcgttgactccgtgtttatatatcctaaagggtacaagcctgagaaggcgaacatagtctgcacctagttcggcaaagttggccttgtacctctcctgcatgatgaaacaagaggcaattcaaatgtggatggctagcctttttcctggcgatccttacctgaaagcccattgtacattctttttgttttttcccttcattctggtagttttgcatgaatgtaaggtctttcttgtttttttttgggtagtgttagttaaacaggtggagaataggggatttagaaacaggtcaagtgaagtaagtcttgagtcattgaggcggtagattgccatacagcaataataatgttcggcgagctggattgattttttttctctccctgtcctgaggccagaaaacattcagtatctgttatcatcggtgtcttcagaggctaaaagtccattttgtgtagactgacgcgtgtggtctgttttgaatacaatgtgtgattgatatgttacaaggcgattctttcagttcgcaatttgacagttacagctcgtaaaagtttggcgcagtaacagtgattgactttgacagttacagtttgttggcgtagtaacagtgattgactgattggtgctggttttatgggttctcttctcatcccggcgtagtagctgattggtgctggttttatggtttgtcttcctcataccatcaggaggcagcgacacaacattaccactggcctggaagtgaatggattagcagccgagagtttgatcagaaattcaggtgttgttacaggaatggtaaggggatcccttgcctgctgcaacggttgggaacagaatacactatactgttgggggaatgtttcgtagccgaagatcctaaaaaggacaccttcgaaaggtcttctcagaagcaagcgccgaagatattatctataaagcttcggcacaaagacagatctcaagatgaagggtcgaaccgacttaaagatgaattgacttaaagacccatgatgttttgtgtcattattgtagtcgattgtaaagggcataaatgtaattttgcacaggttgcatcctgtgtctataaataggtgaacagtatcccggcactgttcacgcaatcctgtaattgctaacgcattgtactggaatcattttctgtcagagacgaaggtataaatgtacctaaatattatttcaacatttaaatttatattatgagatgtataaataatgtgatttatatttcct

SEQ ID NO: 119606 - DNA, 1311 bp, Zea Mays
gacccagtctctttaaaaggccctcgagaaaaatctccgcgtcaccaccaagcacgtccccgttccattacaacaaaagatcgtgctagtttaagcgcggattgatggcagagctgctgtagatttggagcattttggggttggttttttgcgatttgaggatcgaatcgggctgggtggtgcgaattggaggattcttcccgaatcgagaaggtgtaggccaaattcgcaaggaagctgcagctatccgcgtgagaaggctgcctctcacaaattctcggtcggtgccatcccggcggtggactgcttttgggcttcttcgaaggttcgtatcttttggctcaggagaaagtggttctgaaggcctcgggcttctcatccccaattcgatccgttcccgagacggtgattgggtcatagatggggacggggtcgagcatcctgggcgcggatggagagtggggggagacgtccctcggcgacatgccggagagctgcgtggcggcggtactcctctacctcgacccgccggagatctgccaggtggcccgtctcaacagcgccttccgcggcgccgcctcggcggactgcgtctgggccgccaagcttcccgccaactaccgttaccttgcggccctagccgcggccgccgatgacgagggctgtggcgatggagatgccagcggcaagcgcttgaccaagaaggagatttacgctcgtctgtgccgatccactttctttgatgccggcagaaaggaattctggattctgaagaacaagggagccctttgcatgagtatatcatcaaaggcaatgactattaccgggatagatgatcggaggtactggagccacctcgctacagaggaatcaagattccatactgttgcctatctccagcagatttggtggctcgaggtagatggggagcttgagttctgctttcctgctggtgcctacagccttttttttcatcttcacctgggtcgaccctataggcgcatgggtcgttggctttgtggaactgagcatgttcatggttgggatgtcacgcccacacggttccagctcacgacctctgatgagcagcaggcgacatccgaatattatctgcatctacatgaacaagggggctggaagctttaccatgttggtgattttgtcatatcaaattccgatgagcccatgaaactcaagttctcaatgatgcagatcgattgcacacatatgaaaggcggcttgtgcgttgactccgtgtttatatatcctaaagggtacaagcctgagaaggcgaacatagtctgcacctag

SEQ ID NO: 119607 - DNA, 657 bp, Zea Mays
atgctggggtccgggctgaatctggtgaccacggtgatcggcttcgggatgagcgccaccttcatcgtcttcgtctgcgcgcgcctcatctgcggccgcgctgcgcgggccgacgccgacgcggccgccggcgccgcggcgcgggcgctgccgcagccacccgtgccgttcgacttcgacgtcgagttccgcaacgtcgcggatctcgaccgcacgattgaacgctcccgctgtgggttggatccttttgccgttgctgcaattcctacaatggattatagttctgaggccttccattcaaaagatgatgcccagtgctccatatgtttaggtgaatacagcgataaagagatactgcgtataatgcctacatgccaacacaacttccatctcgaatgcatagatgtatggttgcagaaacagactacctgcccaatatgccgcgtctcattgaaggaccagcctggcgcgaaacctacagcatcccctctccgtaccccactccctcagatactgggacatgccggcagcccagtcaatagatcgccccattggatactcccgatccatcgcgatcgtgctggaggcagacagaacagcccagcctcgcaggaatcgttggaggtgatcatcgagatccagccacagagacaatga

SEQ ID NO: 119608 - DNA, 1458 bp, Zea Mays
agcttgcttcctcttgctgcacctgcgcgagctgagctgcaaacgcacacaaatctagacgcaaaacactggagggatatacctgcggcgtgcgcaccatagacgataggtaggtgcaccactgcagccaaatttggcacatgtcagtagcagtaggtgcccaaatagattatgggcgtgcgcgtgccctaacggttcatggctgagcagcagccgccccattctccttacccggcggtgcaagtgcaacgaccgggaccgccagcaggccacagccgccaggctggttcggcttcagcctcgcctcattctccttctccagtggtgcagggcgactactacgggacggcggcggcggccgcgacgagctcgggggagccgtcgccgcggtcgtccgggaagcacgcattctaccgcggcatacggtgcaggagcggcaagtgggtgtcggagatccgggagccccgcaaggcgcgccgcatatggctcggcacgtacccgacgcccgagatggccgcggccgcctacgacgtggcggcgcgcgcgctgcgcggcgcagacgccgtgctcaacttccccggcgcgatcgcctcgcgcgcggccccggcgtccgcgtcccccgctgacatacgcgccgcggccgccgccgccgcgcaggcgcagctcgagtactcgcagtcgcagggtgccgccagtaatcctcttgccgccgccgctgcacagggccggcatcagcagcagcaccacggggcgagcagtacggcgacagctgacgcggcgggctacaccgcgccgcagcaggagatgggcactgacgagttcatggacgaagaggccatcttcgagatgccgcagctcctgcggaacatggcggccgggatgatgatgagcccgccgaggctcagccccgacacctccgacgagtcgcccgacccgtccgaggccggggagagcctctggagctaccatgacccgtagactgcattgcccgattgcacgcctagctaggccggccatggccagcggcggggccagccgcatggagtgcggtaatagtacagactatagtgaactccccctagtagtaccccggggccggtagcaaaccatggcaacaacaggaggagtggaggaggtacatgttactgccggtacataccggccggtgcagcgcatgcagcgtcctctatctggtaatatatacgagtgtgtatgccataagcatagtgtgacatgctcgctagtaatggtatatagttaccagggcatccgcttcaactttcaaatgctattattactacctttcaaatttaatatccttttttctgctccactcctttccgtaattttttttcttatttttaatttgatgtgattcggcatgattgagcaagtacagttgacgcaactaggtagcttatttatagttttggcctaagagcaagcacatgttttttt

SEQ ID NO: 119609 - DNA, 1122 bp, Zea Mays
cggcctcgagaaagtgatgacgaagaaaacaaacaggggcaacagcaacatcgaaacgataaggtcatgaccagcgaagggaatttctacctcacgcttcagagcagcatcggctgctgcttttcaccgccgctgcagtgtcacggtgcgccgtgcacgcactcccaatggcacccggcggcggcggcggcatcagagccccttcgccagacctcccagtcccagcccggcaaaagttcgcaaactcgacgagaagaccacgggcttattccgctgccagtgcgctaccgagactcccacggcctcagtcgatcagacgcggagccgtggtggtagtggtagcatgcgcccgcggaagcgagcagcaatcctctccggccgtcgcggcaaaggtgcggcccgagcccggcacgctcagcgtcgagttccggacgcgggacggctgccggctcggcatcgccaggtacccggacttcgcgtacaacgcgcagggcggccgcggcgtgggcgccgggcgcgggtcgaagagcggggaggatgatggcattggcacggtactcgtcgacttcgacgtggcgaccctgtacatcccgcccatgtccggcgcgacgaccaggttcctcggcctgccgctaccgccgtacctcaagatcgatatcttgcccgaggcactgggcggaaccatcgatcgagccactggtcaggttgatctcaagtttagatcgaggttctgcttctcggttgggagcgtctacaaagcgccgccactgttcgtcgagacaacactgacctccgaggagtcgaggggagccataagatccggcaccggagaaagaatggacgaagaaggcagatgcaggctggttggggtggccgtcgtcgacccaattgatgacctcttcatgaacacatttctcagcctgcccaccgagtgcattgcttacttgagcgccaccatttccatagccgctgcgagatgaacgtctttattgctggcttacattgaaaatataatgcgcgcgccgatttctttttcttgtaaagattagccaaggctcggccatatcgcttcagttcatattggaaacctgaagtacactactatcgatcatcgcttggcca

SEQ ID NO: 119610 - DNA, 97 bp, Zea Mays
atcgaaagtgcagaaaagctgcccgtcattatattaagaagaaaatagaaatagtccaaaatggactcagttacaaggaaaccctcctaaggaggcc

SEQ ID NO: 119611 - DNA, 1774 bp, Zea Mays
atgtcaataaacgaggtatcagtatcactaacccctgaaattctaaataatagggaaatttttgggaacagcatcagtggaccaatcccatcagagttcggtagcctggcgaacctgatcagcctggacctgtccagcaacagcatctcaggagctatacccgcagccctcgggaacgccaagtccctgaagttcctgcgtttggatcacaatcgccagacggggccgatcccaagggagcttgctgggctgcccaatcttggaattgtaagtcggagtgatgttgatgagacatttgagatagattggggattcttaaatgctcaatggactgatggcatgtgtgcgaatcttcaaattgtgcagacgattgcaaatggaaccagcgaaacagataaaggtcatgaaaggattctagaaacgatcaacacagttggacatgacgtacttgaaatccacgatttctattatgaaaaaatacaaccaaatttgagggatagttacacatcgaggctttttgaacgctacacttctggctccctcctgcttcctaggtcgaagatcaaggtagaggatatggatgcgtatgcccctaaagatcttttggttgtcactacaggttcacaaggagagccacgtgcagctctgaatcttgcatcttatgggggaagtcacgctcttaaactatcaaaagaggatgtccttctttattcagctaaggttattcctggaaatgagacacgggtaatgaagatgatgaatcgtctcactgatcttggcccaaaaattatcatgggtaaagattttggcctgcatacctctgggcatgcctaccgagaggagctggaggaagttcttcggattgttaaaccacaacatttcttgcatgttcatggagaactcctatttctcaaagaacatgaatcacttggaagatcaactggcatacggcacacaactgtaataaaaaatggagaaatgcttggtgtatcgcatctaagaaatagaagagttttgtccagtggtgatagtgataaggcttttggtacatccattgatctctgcattgatgagagactaagaatcgcatctgatggcattatttttgtcagcatggagatcttccgacctcagaaggaacatggtttagcgcagactggtttgaaaggaaaatttaagattactacaagatgtctatggcttgataatggaagattgttggacgcactctacaaagcagctcatgctgcattgtcaagttgtcctgtgaattgtccacttagtcacatggagaggatggtagctgaaatcttgaggaaaatggtacggaagtatactactagccatctgagcaggagtccagctatgagtcttgaaggcagttataaaacacacccagacaacccagaggtggatgcggaagaaacagagacctgtttatggaggttgggaacaacaccttggattggagcatacagccactaccccaaaaaggtcctacttaggcaacaaccagatgaacaggatatgaaggcagccttgttccaaaagcagtcttttggtgatgtacatggagcttttgcatagagtagtttatgtggcagttatctcaagaattttcatctggtggatgtacagggttcgtatagcaacatttccttgtagaaagttgaagttgtatatcgagggtggatttacctatgtttatcttttcgaccccaagcctctgggaagctgtgaaccatagcctcatgaaatatgcctgctattgatt

SEQ ID NO: 119612 - DNA, 702 bp, Zea Mays
aatggcaaatattcgactaaagccgcttatgaggggctcttcattggatctgtggagtttgaaccttttgagcggatttgaaaaacttgggctccgcccaaatgtcgattcttcttgtggctggtggctcacaagaaatgttggacaacagatagacttgagaagcgggggctggatcatccggaaaaatgtcctttatgtgagcaggagagggagacaattgaccatctgcttgtgaattgcgttttctcaagagaatgttggtttcctcctttctaaggcaattcgggctgcagggtttggccccccaaccaacgaatattaattttatggagtggtggcatcaagcaaatgaagctattcaggggtccttcagagatggcctaaactccctcattatgctgggcgcttggattttgtggaatcaccggaacagatgcatctttgatggcctttcccctaatgttgctaatttcctaatccatgtgggggatgagcgccgtctgtgggagactaccggggccaaggggttgacatcccttgttgcctccctctctcatgtagtctagagttttatagatgagtcagtctatgctagttttgttcaggccgccgtaaggcgtcagttgtaccccggtctattttagatcttgtttatttcttcttttaatataatgatacgcagctctcctgcgtgttcga

SEQ ID NO: 119613 - DNA, 1102 bp, Zea Mays
gcctcttcttccctcctctcgagaagctgcctgctacccgcgcgctgcctctcccttccactccataccataccgccacgacaacgtcgacaagcgcaataccggagccctccgaaatggccgaggacaaggagaccgactcgccgcagccgccggccaagctgccccgcctctcccgcgccgacacgagcgccggagaggtgaccatggcggcctcgtcgccgctggttcttgggctggggctgggcctcggcgggcgcggcggcggcggcgagcgagacgcggatgtgtcccccgcgacggtgactcccaagaggccgtcggcgctgacgttcatgcagcagcaggagctggagcaccaggtgctcatctaccgctacttcgccgcgggcgcgccggtgccggtgcacctggtgctccccatctggaagagcgtcgccgcgtcctccttcggcccgcagcgctttccctcgctgatgggcctgggcagcctgtgcttcgactaccgcagcagcatggagccggagcccgggcggtgccggcgcacggacggcaagaagtggcggtgctcccgcgacgtggtgccgggccacaagtactgcgagcggcacgtccaccgcggccgcggccgttcaagaaagcctgtggaagccgccgcggcaccggcggcggcggccggcggcagcagccccgtcctccgggtcgccgcgccccagcacgtgctcggcctctcctcgcccaccagcgtcctcctcgcccacggcgccgcgcgtgccacgtgagtagcgcgccgccgcgggccgaccgatggtgccgtggtctactggtcttgggcctcggaatcacgaggggcaaacggaatccgcaggggttattactgtgtcgtgcgtgctgtaatcttttttttcttctctccctcgcagaagtcgagaaaacaacccggtttagcatgcatcggtacggtagctcgctgcgttgattctgctgtttacgtgtgcctgagacaccagtacacggggggaatcatttttcttctgttgtgtttggggagggcggcctcgctggtgtgggggcgatccggctcctgggcgggggcgcgggg

SEQ ID NO: 119614 - DNA, 2156 bp, Zea Mays
atgcccgacaacacccaacccatgcagtacggtatcgaagaagaagaagtcccatacactgatgaacgcatcacgtcgttatgctcttcagttcagctacttttggagcaaggtggtaattttgtggtgtctgcgcccaacatggcccatttatgccaccgtttcactgtgggctgcttcgtagccacggcacaaatggtcacgcaggcccaacccgaattcatcgatctgggccacggcccagcgccatcaggattcgtgaatcaccgaatcaggagttcaggacaggaatcgtgctgcggatgctccgtccgtgcagtggaggccgcggcatgtcagtttggcttcactaccaagcctctggcctcaagcctgcctcggccttcagcccagccgtgcccagcaccttcggacgccaattcacaacttcgttgttccttccgcagctccgagctccggaatcgagcaaagcacccgagcctgcgccgcgtcaagccgtcaaagctcccccgcttcataccattccctcccccgatccctcgcctcagccctcagctccgcccctcggtttccgaagcgccaccgccgacgtggcctccctcggctccaatggcgttgccctacctggaggccgtgctttgctttatgattttcatgtacatatttgagacatatcttgacatccgtcagcatagagccctcaagctgccaactttgccaaaacccctgctgggagtaattagtgacgaaaagtttgaacgctctagagcttatagcctcgacaaaagctatttccattttgttcatgaggctgtgactattttaatggatactacaatactatactatagagttcttccctggttttggaagaaatctggagagttagttaccagtgttgggctgagtgctgagaatgagataatacacacccttgctttcttagctggttccatggtttggtcgcagattacagacttgccgttctctctctattcaacttttgttatagaggctcgacatggttttaacaagcaaactatatggctcttcattagggatatgatcaaaggaattttactatccatgatattggggccaccaatcgtggctgctatcatctacatagtacagattggaggaccttacctggctatatatctctggggttttatgtttgtattagctctactgatgatgacaatataccccattgtgatagctcctctgttcaacaagttcactcctcttcctgaaggagtcctcagggaaaaaatagagaagctggcagcttccctcaagtttcctttgaaaaagcttttcgtggtagatgggtctaccagatcaagccacagtaatgcctacatgtatggttttttcaagaacaagcgcatagtactctatgacacattgattcagcagtgtagcaatgaggatgagatagtttctgttatagcacatgaacttggacactggaaactcaatcatactgtctattcctttgtagctgtccagctgcttatgtttcttcaatttggaggatatactctagtaaggagctccaaagatctatttggaagttttggcttcaaggaccagccagtaataattggattgatcattttccagcacaccataatacccatccaacaccttctgagcttttgcctgaaccttgtcagcagagcatttgaatttcaggctgatgcctttgccaagaaccttggatatgcccctcagctccgagcagcccttgttaaactacaggaggagaacttgtctgcgatgaacaccgatccttggtattcggcatatcactactcccacccaccactcgtcgagaggctgcaagctcttgaagattcagacagcaaaaaagaagattagtcgatccttgtatgaggtttacatatggatttttccctgccacatgcacaccgattcagtgcttggatggtgagggttttgacataggagtgttgtcaaagctttagagtgcatctttcggtcaggtgtaacagcctttcggtcattgagacatataagcgaattagctattaaaaaaaacagaactgttgcatctttctgagttgtgcaattgttcacgtgtcacgtcacgtttcgagcagcagagagacgcctctgagcagcactca

SEQ ID NO: 119615 - DNA, 1295 bp, Zea Mays
ctctccactgatattccgctcctgtccctgtcctccccggacggagctaatagagccggctctgctcatcattatatcgtcgcgcacaaatgcgaagcctagcagcacttgtgtccggcggccttgtgttcgtgggggatgtgtggcatattagctagctgataagcggccggccgaagagcaagcgcagtgagaagaagaagctcggatcggaggaggtcggcatggggaggggacgcgtcgagctgaagcggatcgagaacaagatcaaccgccaggtcaccttctccaagcgccgcaacggcctgctcaagaaggcctacgagctctccgtgctctgcgacgccgaggtcgcgctcatcatcttctccggccgcggcaagctctacgagttcggcagcgccggcgtaactaaaactttagaaaggtatcaacattgctgctacaatgctcaagattccaacaatggtgcactctctgaatctcagagctggtaccaggaaatatcaaaactgagggcaaaattcgaggccttgcagcgcactcagagacacttgcttggggaggaccttggcccactgagtgtgaaggaattgcagcagctagagaaacagctagaatgtgctttgtcacaggcaagacagagaaagacgcaacttatgatggagcaagtggaagagcttcgcagaacggagcgtcacctgggagaaatgaacaggcaactcaaacacaagctcgaagctgaaggctgtagcaactacacaaccttgcagcatgccgcctgctggccagctcccggcggcaccatcgtggagcatgacggcgccacctatcaagtgcatccgcctgcccactcagttgctatggactgtgaacccactctgcaaatcgggtaccctcatcaccagtttccgccccctgaggcagccaataatatcccaaggagcgctgccacaggcgagaacaacttcatgctgggatgggttctttgagttcttctgttaatccatccatcagatggatccatgttgaaaccaataaaaggcattcagtgctatatatatcatatgcatatccgtgctcaagtgcttgatttgccacgacgttggattgtatcgttctgtgtgtaatagctaatttagaacggcacatctattctatgtggttgtggtgtggcacttatactgtttattcatttggaccatgaatcggggtagtttgtaaaaacacatctatatatgctgccggtgcatagaattcaaagttatctgcaccgtaattattatatgctccat

SEQ ID NO: 119616 - DNA, 824 bp, Zea Mays
ggttcaagttgttcctaacattctgacaactgccaaatcagatgccactgcacaaatggacgttgtagtgatcacactgtcacgagagctaagcaaactacagcctgcaagagctacacgtggtagcctatactcctgccttgctataattttattatttttcttttgttaatgagtgcagtttctctggctaatggtaaaaataatctgttctacaggcatacttgaccacatcatggtggagaatgcaagtgttaaagttgcattgaatcgcattacccgttgtttctgtcatggtggagatagcctctgagtcatgtttctaattatctacactatgattcttcttctgttgataaaatattgttttattgtcctgtgagctaatgataacagtgatgatggctgaaaaactccagtgctgctacgctaccagagtcttcatgtgcatacttacttcaaaaactcaagactacgttcagtctctgcattctctcaactcatttgactacccttttatagttgaccctaaagatattccattggagaaggttcaagttaaatcctcaggacatgttctgccatatgttggcgttgcttgtttgggggctattctgtttggttaccatcttggtgttgcaaggcttggttattcaggaactgctgttatatcacgggtacaaccaatctcagttcaatatgggcttgacataacagagcgtgatcaggaaggcaggcttattaccttggagtttgatgatttttacttggtcaatgcttatgtcccaaattctggccgtggtttacgtagacggattttttaa

SEQ ID NO: 119617 - DNA, 721 bp, Zea Mays
cgcgcagattgcgcggccgaccgttggcccggccgaccgttggcccggccgaccgttggctcaccggacagtccggtgcacaccggacagtccggtgaattttagccgtacgtcgccggtgaattcccgagagcggccagttcgctcgaaccagcctgacgcaccggacactatccggtgcaccaccggacactgtccggtgcaccaccggacagtccggtgctcccagactcagcagattcttggctgctcgagccaagacatttccaattggatttttcctgtttccagcacttagacacaatacattagtccataaatcaatgtactaagtctgagaaacatacctttattcttgatttgtactttgtccaccttttaacacttaggcatttgtgttggacactaaatcaccaaaacacttagaaatggcccaagggcacatttccctttcaggaggacagatgcgaatagcaaccgactcgtcctcttcttctcaattctctacgtcgttgcttctctgccttgtcgtcccttcgtcatatcaaaggagagcggtgtatcttaaccaccgtcggcgttttgacgacagtagattgggggcagtgcgtccgtccgtggtatgcacgcgcagcctggcaaagagaaggaagatgagtcacggaatttggggcacgacatggagcgctgagcagagcagtgagcaatggcgactggcggt

SEQ ID NO: 119618 - DNA, 729 bp, Zea Mays
atgtcgaggcccttcccggccaacagatatcttttcccggagaacaatatttgctcgtggcgcatatatccccgtccctggcctcgcgtattgggagacgccgtgctgctttggaatgggcgaactgcgatcggtgtcgctctcgtgcaacttaccgtgaacgtcggcctcctatcgctcgcggcagtatttatacgcttcgtcccagctgcactcctccaccgccgcccatcgatccaagccggcggtcggcttggacggtggctggaaaatgcttcgcttttggaggacgcagaggagcaccacctcgtcgaacgcgttgtcgcctcatggctttgcatttctgtggctatgctaggtcgtggagatgaacgtgcacatggactgcgacggctgcgagaagcgagagtgagctcggtggagatcgacatggatcggcagaaggtgacagtgacagggtacgtggaccggcgggaggcgctgcgcgcggcgcggcggaccggcagggcggcggagttctggccgtggccgtacgacggcgagtactacccgttcgcgatccagtacctggaggacaacacgtacatggccaccaacaagtactaccgccacggctacaacgaccccacgatcggatcctacccctgccacgccttcacgcatgtcctcgacgacgacgcgctcgccgtcttccacgacgacaatgtccacgcctgcgccgtgatgtga

SEQ ID NO: 119619 - DNA, 2080 bp, Zea Mays
gtccggggaacgttaggaaaaaaactcgagagattcaaacctcccaaagcccccgcccccatcgccgtcatggactgtgccccgccgcgcggggcgtcattcgacgccgtcggccagcggtggctcgccgtattcgccttccaggccgcgttctcggccgccgcttcggcgctccacctcacggtgtccccgcgcggccgccgccacccgctcctcggcgtcccaaccggcctcctccttgggttccatccgttcctcgcttgcgccgccacggggatgctcgcgctcgcgctcctcctctccgtgtccccacacccgcggcctaccccgctgccgcggcgcgcgctcgcaaccgccctcttcgccgcggccggcgcgctttgcgtgggagccgcggcggccatgctacccgaggacgccgggtgggcggccgtcgctgggcttgggttccgaggcgccgtgcttggggccatcttcgccgcgcgctattttggccgtcggaggtggttgctccaatttcccgtcgtgcagcgacctttattctatggattgaagatgggtgtcctaccatctggagaaagagctctaaagttatcaatgcaggccttctttctttcccttttcatgattttctttcttccttggcaattcagaacgggaggttctattggaagccaaatacttactgagatcagcatttttatagtgaccactggtgtttctctctgtttggaaataaatcatcattttgttcaggttgtacatacaaggaggtgcagttttgctccgcctcagagcactgctgctgcagacactaatcccactgaatttatcctagaatctttggaacaaagtgatccacgatcattgatacaatatcttgcataccaagatttgtgtgtggcatctgagtgtaatttggaaccatggcgcagagctgctttctttgaggaatctggtgaaacttataaaagaatcgtgacaacttgtttgaagccacttgaggagtttacttcaaaaattgctgaatcccttgaagatttttctagtgataagccagaattgatgctacaacagtccaaactctttagtgcatttgatgatttccagatatgcgcatggtgtgctcggacattgactgggttaactgcgtgctcacgccaggaggatcggtatggtgttgctcaactcactggctgcaatgctgctgtgatgacaacgttgctgtctgccctagtagcaattgagacatgcttaggaaagaaaacaaacccacagcctgtgcactcattgggtcctgaaaacattaggtgggttaacttctccacaggacgaaaaggcactggagttgcaattgcatgcacacaaaaaggcggcctacacaagaaagcttataccatggcagatgttcttcggacttctgtatatcagatagtttcagcattcatcgatgacctacgagctaatgcaaaaccatccagcttggagaagaactggatcagtgaagggagaaaacctgtatatggttcacaagccgtgttggttcagaagttgattctgtttattgagtaccgtgcagtatgaacttggttcatgtctctcagatccttacctccatatcagatcatacttggtagtcatgggtttttgaacttggttcaagaaccattgatttccaccagagcctatgaagatggatcctaaaattacttctgtattcctttgggctgctgcactgctgaaggcagtgacgctctcggattggataaccattatgcacccaggccttgtttctattctggtttatccactcaggcctttgtttctattctgatttgtagtctggaagttgaatagagttacctgtatgttgtatcatggagagggaatctgaaatacttatgatttttttatatccacttatcagatttatgacaaactgttagtactgcttagctgcacctatttggtggaatttcgtggtgaaaaggttcggggtgatgatctcctggaataggttccagttgttctttcccagtttacccaatagcaatatcagcctagtcttgaaacttcttcc

SEQ ID NO: 119620 - DNA, 555 bp, Zea Mays
atgtcgagctcaggcaggctgatccgtggctcaattaacgatgagaaccttggcggccacgtcctcaggcctcgcaccggcggcggcattctcggcgcgacggccgtgagcaccgacaacccgccgctcctcgcggccgtcttcctggcgccggacgcggcggcgggcttggtccagtgcctgcgcggcgagaggaggcgtccgcggtgcgcgtcgagggcgccgccgcagctccgcgacggcttgaggcgcttccgggccggcttggccaggtcctccagggaccccacggcggcgaccgaggcgaaggactgcgacttgccgtcgaagaacctggacaggcccctcttgagggggagctgcgtcatgagggcggacatctcgaagcggtccgagccggaggagctggcgtcgtcatcgagctccgacgaggagcccgcggactccctcgacgtggacgtggacggggactcggaatccgacggcgagccgatgtcctcctcctgctccgcgcacgcgacctcgtgcgccctcccgctgtggaaaaacaagtag

SEQ ID NO: 119621 - DNA, 621 bp, Zea Mays
ctgctcgcttccattctttccttgcagttgcagcgctctttccgtcacacttcactgccatcttttgctccatcgatccatcccactgctgatcaaaggaggcctggactcggacttcgctcaagcctcacggtgatgccgcctttccgtccgcttgatcttttctagctgcctgcctacgcctacgcctacccgcaatggccgggggcttcgagtggagcagctctgcaagcacaaccagaggagtcgagctccagcagtccattgtcgctctcaagaaaggcgcacatctcctgaaatgtgggaagagagggaagcccaaattctgcactgtcaggctgtcttatgatgagagagcactaatatggtactccaaagagaggggaaaacgtttgagcttgaattcagtgtccagtgtagttctcggacagaagactacaaaacttttgcgtctacattggccagaaaaggaatctcactccttgtcaattatatacaagaacggtgaatcctcacttgacttggtctgcaaagatagggatcaagctgaatgctggtacttaggccttacagccgtaatatcagcaccatgcacccctttacttctgattgattcaacaa

SEQ ID NO: 119622 - DNA, 1893 bp, Zea Mays
gaatcgctcgttgattgtgattttactcaggtgtcatgtggtatttcattaacagctgtgctaaccataacgggtgttgtatttaccattggaagcaaggaccatgggcaattagggaatcctcgatctgacactgacagcgcatgtatttgtatggttgaagggccacttaagactgagtttgtcaaagatatatcctgcggaagttcccatgtcgcagtcttggcaatgaatggaaaagtgtttacctggggcaaaggcacagaagggcaacttggtttaggggattacgttgacaggagctccccaactctagtggaggccctggaagataaacaagtggacagtatagtttgttcttccaattccactgctgcaatttgcgtgcacggggaaatctcaagcaaggatcaatctgtgtgcagcagttgcaggttggcatttcggtttacaaggaagaagcacaactgctacaactgtggttccatggtctgcaattcttgcagcagcaacaaggttcatagggctgcccttgcaccagacaagagcaaaagatgccgcgtctgtgatgcttgtttcaacgagctgaataaaacagccgagcacggtaaaatgagctgtggatcaaagatccaaaaagaaccgtcttatttagcagaaacaaggacatacacaccaaagttatcacggatgctgaaggaagcaaatttcatcatggagaaaatgggttcctccgcacaaagtcccggccagagaaatcaggaacccgccactccgaatcaaatgcaaaaggaaaggtggggacaggtagaatgccccgatcgattcaaatgcgcaagagacaacattccacatcgtttgacaccaaagaagcagacaattgatgattatcctatgaggagaatggctgatccagtctcacaaaagactgctgcccctttaacacaaactactagtgataggaggaaagaacaagatttgatagaaaagatactgctggaggaggtgaaacagcttcaagcacaggtaaccacgctagcagaagaatgccggcacaggagcctgaaagttcggttgtacaaacggaaacttgaggaaacctggttgatagtgagggacgaggccacgaagtgcgaagctgcagaagagattataaaggttttaacgaatcagaggaacgctttgtcaaacaaacttttagatggtctggaactagatggttccagtatcgtgcctaacccacccgacaaagctcttgccacctgcaaaaccccaccgctaaacagcatcagggatcaacacaacgcagaggcagaggaagttttggatacgcgatccacagcgtcttccaacaccgtcgcggtggatgactcagctgcgcatcagaacggcagatctagagcctccagtagcagcagaggctactacgacgatgggggaacagatagcacagctgctcctactgactccaacggggtcatcgagcaaattgagcgtggtgtgtacattacagtcgttacgtcccccagcggtaagaagggaatcaagcgcatccggttcagccggaagcatttcggggaggccgaggcacagaaatggtgggagcggaatgagagcagggtattcgcgaagtacgacagcgtggaatacctggcagcgtaatctcgataaggaagatgtacaggagtagccagtagttcttttgtctcagtgtctgcctgcatattgttcagtaaagtcgtaggatagatgagatagaagggaccatgatagcttccttttcctagcgaggagataaactgcataataccatgtcctcgttgtggattaacttagggccatagttgactcgataacgattcaattctacacgactgggggtttgtgttcgat

SEQ ID NO: 119623 - DNA, 1481 bp, Zea Mays
gagagcgttgcagaagcgagcgtgcgaagtgggtgcgcgactgcggcgatttggatggactcgtctattaaagccacgagtgattagtgaagttttcttctccgtgacctcccgcccactgcgccaagccgccaacccaccaccacggcaccacccaggccatccgtttctcgttctcctgcctagtgcctcccctccctccttaacaatggcagtgcaggcgcagtacccgtccgatctcctcttccacgccagaggtgagccagagaggaggaaggagatggacatgccaacgccgccgcagctcgctggagtctcgccggcggcagtctacttctccggcggtggagcgagtgggaagagtcggcggaagcggcccagggaggagtgcgtcagtctgttcacagtccagccgcagcagtcgacggcgttcgccagcgtggccctcttccagacccagaacatggtctcgtcgtcgccgtcgcccgccgcgacggcgctcgtgtccactggccttcgcctggcatttgacgagcagcagcaacagcaggagagcaagcagacggatgcctttggctatccgtcgtcgccctctcaatcgggctccgtctccgacgagctcgccgcgcaggtgaagcggcacgacgaggagatcgaccggttcgtacgcgagcagggcgagcagctgaggcgggcggtggccgaccggctacggcgccacagccgggcgatcctggccaaggccgagcggtccgcggccgccaggctccgcgagaaggcctcggaagcggagcgcgaggcgcggcgcggcgccgagctggaggagcggctcgcgcgcctccgcggcgaggcgggcgcgtggcaggccaaggcgctctcggagcaggccgccgcggccaccctgcacgcgcagctccagcagcaggccgccgcgcgggcgtcggccgaggagcagctcgccgccggtggcggcgacgccggcgcggcgcagtcctcgtcgtcggcgtacgtggaccctcggcgctcggaccgcgcgtgcctgggctgccgcctcaggccggcctccgtcgtgctcatcccctgcaggcacctcccgctctgcggcgagtgcttcgccgccggcgacgcggacgccgccatggcgtgccccgtgtgcctgtgcgtgcggacgggcagcgtggaggccatcctctgctgagcgttgcccgcctggccgtccacctcgggagccggtgagtgcaggaatccagcaaatgtgagggaaaaaaaacccgtaggaaagctagaactttctcctttctctctctttttttttgtcgtcaagtttttggttcatattgatttcgacccctcttcgtctatcttggagcatcccttccctcagtctccttctatactaggggttttaggggaattcaattgataagttcactgttaatagtaagcagcagatgaacggggtggcacgggcgcacggcaca

SEQ ID NO: 119624 - DNA, 532 bp, Zea Mays
ctccacaagaccacaaccacgttcttcttcctcccatcccagcaagtgaaaaggaacccaccggtgggaacgagccagccaaagaaaccaatggaggactactactactacttcacctcctgggggaccgtgggctccgtcgagcccaccggcttcccggcccacacgttgcctcgcaaccctagctcggcgtcgccgaagacccgccgtgcgtcccgcggcgacgctgacgccggagagcggctccaccactactacctcgacgcctgcttccggtgcgggcgacatcttggcgggaacaaggacatcttcatgtacaggggcgacaccccgttctgcagcgacgagtgccggcagcagcagattgaggacgacgaggcgagggagaagaagaggtccaggcagcatgctgctgcgactgcgactgcgactgcgacgaagcgggagcgggagcggcggagctagcagcagcccgcagaggattccgctctgggcgcggtgatcgatcggtcgatgcagcggcatccgaaaa

SEQ ID NO: 119625 - DNA, 1036 bp, Zea Mays
ccgccataccgttgccttctcgagtgtggatgtggtttaaaaccgagagcccctccgcctctcctctctccaagccccagctgccatcctgcgcctccatttgcggtgtgacagctcctggaccggcccgccgcgcgcgcgtgccgtacgttgccagggacgacgccggccggccggccgatggagttcacgtcgtcgtcctacttccacgcctccggcaaccccgacttcgcggcggtgttctccgacggcggcggcagcgcgcaggcccaccggccacggcgctccaccgacgacggcacgaaggcggaggacggcaggagccccaccacggcgaggcggccgccgtccgcgttctgcgtccccgacacggaggcggaggagcccaacagcttcctggacgagtgcaccctctgccgcaaggcgctctgcggcgacatcttcatgtacagaggggacacgccgttctgcagcgacgactgcaggagggagcagatcgagatggaccgcataaggcaccgcaggaagaagcagcacgccctgatacagcagcagctgcagctgcagcagcagcagcaggcggcggccgcggcgatggcgcagaaggaccagcgtgcccagcgccggcagcttcagccacagcactagacggagctcacggaagcttcacacacacaaaccggtcccaacgtacccaaggatggcgaatgaattgttgcacgttcgtagtagagacaaggattctcctcgtaaggaaggaccaagtagccaccacgacccttgtttgcgtctgtatccgacgcgaaacaacgaagtgcgcgcggaggcttttccgtgtcctgcaactatattagcaatccaagacttgctcggtttttgtttggctcctgattaaaaacggagccctcttggaggcttggagccactaattgaggtcttttctctatcaatcgagtccttgctccttgtacttttatttaaggttatttaaatgtttgcatgcattttttgtcctcaaaaaattggcaaaagatat

SEQ ID NO: 119626 - DNA, 953 bp, Zea Mays
ccccaccaagcatcaccacgcatttgacgcggacgcgcgaggaagcaagcaccgccagagtcggagggaaaaagaaaaaagagcacggacgattcgcagctgcagcctgcacaggcggaggcgaggaggaagagagagccccccacgatcggctcgccgggacggccgagggtgcggtggtagtgcgggcgcgtggccccgcgcgtggagtcgggatccgtattgctctctagcagccggccggtggcggcgctcggcgtccgaggccagagcccagagggtgactgacagagagagaatcgtccatccatgggaggatccgggcgcggcgcgcatttcttggacgcgtgcttcctctgccggaagccgctcgccggcaaccgcgacatcttcatgtacaggtaaaaaataacgcggcacccgctgtctcccctgtccctcttccttcccctgatcgctgtattcgaaacggcgccctcaccagccgtgagccatgatgcatgggggcgaacaggggcgacacggcgttctgcagcgacgagtgcaggagcgcgcagatggcggcggacgaggcggcggcggcgaaggccaaggccaaggccaaggccagggcggtgtcacgtggggccctgctgaccgccagggaagcggaaggcccgcagaggcgcggcaaggtccgggccggctccgtcctggccctgtgaccccgaggggggtctctcactcagggacagcctgtgtctgccgcgcatggcatttttctttttttcttttttcctctgcgtttacgagacgcgccaccggagggcatcaatttcgtgtacacggccgggtttgcgttttttttaagagaaaaccttgggaccgtccggtggtgctgctggttgcgttgattgctggtccatgtaaaccgcacgtacatggaacaataaaaataataataatcaagatga

SEQ ID NO: 119627 - DNA, 851 bp, Zea Mays
ccccaccaagcatcaccacgcatttgacgcggacgcgcgaggaagcaagcaccgccagagtcggagggaaaaagaaaaaagagcacggacgattcgcagctgcagcctgcacaggcggaggcgaggaggaagagagagccccccacgatcggctcgccgggacggccgagggtgcggtggtagtgcgggcgcgtggccccgcgcgtggagtcgggatccgtattgctctctagcagccggccggtggcggcgctcggcgtccgaggccagagcccagagggtgactgacagagagagaatcgtccatccatgggaggatccgggcgcggcgcgcatttcttggacgcgtgcttcctctgccggaagccgctcgccggcaaccgcgacatcttcatgtacaggggcgacacggcgttctgcagcgacgagtgcaggagcgcgcagatggcggcggacgaggcggcggcggcgaaggccaaggccaaggccaaggccagggcggtgtcacgtggggccctgctgaccgccagggaagcggaaggcccgcagaggcgcggcaaggtccgggccggctccgtcctggccctgtgaccccgaggggggtctctcactcagggacagcctgtgtctgccgcgcatggcatttttctttttttcttttttcctctgcgtttacgagacgcgccaccggagggcatcaatttcgtgtacacggccgggtttgcgttttttttaagagaaaaccttgggaccgtccggtggtgctgctggttgcgttgattgctggtccatgtaaaccgcacgtacatggaacaataaaaataataataatcaagatgactagtgcagta

SEQ ID NO: 119628 - DNA, 1486 bp, Zea Mays
cggacagtagcaaaagccccccacaaaaccctaccacatcccagcgctggcatctcacggggaggactagtagtatgctcgccgccgcctggaggctgtcgcagcgagccgtcacgtctcctctcctaggcatcgggcgatcccaaatccgaaaccctttctccaccatggcgtctctctcgccggcagccgcctcgccgaagaggctgagggtctactcgtctgccgcggccgacggtgacggcgcggggagcggcaagcgcgtggggacccacaacggaagcttccactgcgatgaggcgctcggctgcttcctcatccgcctcacctcccagttcgccggcgccgacgtcgtccgcacccgcgattcccagatccttgatacattggatgctgttcttgatgttgggggtgtctatgatcccagtcggcatcgctatgatcatcaccagaagggcttcagtgaggtttttggacatggattcaacacaaaacttagcagtgctggacttgtgtacaagcacttcggcaaggagataattgctaaggagcttggggttaatgaggatcatgaagatgttcactgtttgtatctcgcgatatataaaagctttgttgaggcacttgatgcgattgacaatggaatcaatcaatatgacacagatcaaccgccaaagtatgtgaacaatacacacttgtcttcacgcgttggacgctttaatctggactggactgatccagaccagtcacttgagaaggagaatgcggcatttgaacaggcaatggtactagctggaagtgaatttatggagagcgttcgcttccatgttaaatcatggttaccggcaaggtctattgtcctggagtgtttgttatcaaaaggaaacattgatccaagtggagaaatcatggttttggatagattctgcccgtggaaacttcatttatttgagcttgaagaggagctgaagactgatcctctgaccaagtatgtgctgtatcagcaggatgagaggagcaagagttggcgagtccaagcagtcgcagttgctcctgacaggttcgagagccgaaaggctctgccagagaagtggaggggcatgagagacgacgaactttcagcagaaaccggcatccctggctgtgtgtttgtccacatgagtggcttcattgggggcaacaagacctacgagggagcattggaaatggcgagagctgctctgaaattctgattcaaccaaagcatattacccgtgttaccattatatcagtaaacacatcagtaacacatgatgcagttgcgctttctccaatgttatcgttgactcgagccgtggttaactgcgactgattcttgcactgatcttctgttatcctcgtcttacagaagaggtcgattgacccttttcattctttcgtgggatctggtattgtttagaatgtgacggtttatctgaaaaaaaatgatggaactttttgtcctcaa

SEQ ID NO: 119629 - DNA, 1483 bp, Zea Mays
cggacagtagcaaaagccccccacaaaaccctaccacatcccagcgctggcatctcacggggaggactagtagtatgctcgccgccgcctggaggctgtcgcagcgagccgtcacgtctcctctcctaggcatcgggcgatcccaaatccgaaaccctttctccaccatggcgtctctctcgccggcagccgcctcgccgaagaggctgagggtctactcgtctgccgcggccgacggtgacggcgcggggagcggcaagcgcgtggggacccacaacggaagcttccactgcgatgaggcgctcggctgcttcctcatccgcctcacctcccagttcgccggcgccgacgtcgtccgcacccgcgattcccagatccttgatacattggatgctgttcttgatgttgggggtgtctatgatcccagtcggcatcgctatgatcatcaccagaagggcttcagtgaggtttttggacatggattcaacacaaaacttagcagtgctggacttgtgtacaagcacttcggcaaggagataattgctaaggagcttggggttaatgaggatcatgaagatgttcactgtttgtatctcgcgatatataaaagctttgttgaggcacttgatgcgattgacaatggaatcaatcaatatgacacagatcaaccgccaaagtatgtgaacaatacacacttgtcttcacgcgttggacgctttaatctggactggactgatccagaccagtcacttgagaaggagaatgcggcatttgaacaggcaatggtactagctggaagtgaatttatggagagcgttcgcttccatgttaaatcatggttaccggcaaggtctattgtcctggagtgtttgttatcaaaaggaaacattgatccaagtggagaaatcatggttttggatagattctgcccgtggaaacttcatttatttgagcttgaagaggagctgaagactgatcctctgaccaagtatgtgctgtatcaggatgagaggagcaagagttggcgagtccaagcagtcgcagttgctcctgacaggttcgagagccgaaaggctctgccagagaagtggaggggcatgagagacgacgaactttcagcagaaaccggcatccctggctgtgtgtttgtccacatgagtggcttcattgggggcaacaagacctacgagggagcattggaaatggcgagagctgctctgaaattctgattcaaccaaagcatattacccgtgttaccattatatcagtaaacacatcagtaacacatgatgcagttgcgctttctccaatgttatcgttgactcgagccgtggttaactgcgactgattcttgcactgatcttctgttatcctcgtcttacagaagaggtcgattgacccttttcattctttcgtgggatctggtattgtttagaatgtgacggtttatctgaaaaaaaatgatggaactttttgtcctcaa

SEQ ID NO: 119630 - DNA, 1430 bp, Zea Mays
cggacagtagcaaaagccccccacaaaaccctaccacatcccagcgctggcatctcacggggaggactagtagtatgctcgccgccgcctggaggctgtcgcagcgagccgtcacgtctcctctcctaggcatcgggcgatcccaaatccgaaaccctttctccaccatggcgtctctctcgccggcagccgcctcgccgaagaggctgagggtctactcgtctgccgcggccgacggtgacggcgcggggagcggcaagcgcgtggggacccacaacggaagcttccactgcgatgaggcgctcggctgcttcctcatccgcctcacctcccagttcgccggcgccgacgtcgtccgcacccgcgattcccagtcggcatcgctatgatcatcaccagaagggcttcagtgaggtttttggacatggattcaacacaaaacttagcagtgctggacttgtgtacaagcacttcggcaaggagataattgctaaggagcttggggttaatgaggatcatgaagatgttcactgtttgtatctcgcgatatataaaagctttgttgaggcacttgatgcgattgacaatggaatcaatcaatatgacacagatcaaccgccaaagtatgtgaacaatacacacttgtcttcacgcgttggacgctttaatctggactggactgatccagaccagtcacttgagaaggagaatgcggcatttgaacaggcaatggtactagctggaagtgaatttatggagagcgttcgcttccatgttaaatcatggttaccggcaaggtctattgtcctggagtgtttgttatcaaaaggaaacattgatccaagtggagaaatcatggttttggatagattctgcccgtggaaacttcatttatttgagcttgaagaggagctgaagactgatcctctgaccaagtatgtgctgtatcaggatgagaggagcaagagttggcgagtccaagcagtcgcagttgctcctgacaggttcgagagccgaaaggctctgccagagaagtggaggggcatgagagacgacgaactttcagcagaaaccggcatccctggctgtgtgtttgtccacatgagtggcttcattgggggcaacaagacctacgagggagcattggaaatggcgagagctgctctgaaattctgattcaaccaaagcatattacccgtgttaccattatatcagtaaacacatcagtaacacatgatgcagttgcgctttctccaatgttatcgttgactcgagccgtggttaactgcgactgattcttgcactgatcttctgttatcctcgtcttacagaagaggtcgattgacccttttcattctttcgtgggatctggtattgtttagaatgtgacggtttatctgaaaaaaaatgatggaactttttgtcctcaa

SEQ ID NO: 119631 - DNA, 873 bp, Zea Mays
cttgagcacacttctcacgccgcctgcccagagcctctgcactgcactgcatcggccaacaacagcggcacgcaccccacagcactcgctcgcgccatctcagccagcgtgcaaaccatggcgcggatactcctcgaagcggcggccggctcgggcccgccgacggactccatcaactcggacatgatcctgatcctcgccggcctgctctgcgcgctcgtctgcgtcctcgggctgggtctcgtggcccggtgcgcgtgctcgtggcgctgggccgccgcgtcccggtcgcagccggcggcggacgccaccaaggccgccaacaggggcgtgaagaaggaggtgctgcgctcgctcccgacggtcacgtacgtccccgacagcggcaaggccaaggcggcggcgggggccgacgagtgcgccatctgcctcgccgagttcgaggaggggcaggccatgcgcgtgctgccgcagtgcggccacgcgttccacgccgcctgcgtcgacacgtggctgcgcgcgcactcctcctgcccgtcctgccgccgggtgctggccgcgcccgccgacctgccgcccggcgagccgtgccgccgctgcggcgcgcgccccggcttccgcgcgctctggaaggcgcccgcgccctgcagcgccgaggggccgacgttcttggcgtagtagttagttagtgccttgcgcacccggcacacaggaactgaaccaatgcccgagctccgagctcagtggtgaacttgtttttttcttcttcttcttagccttattaggtctcattctggacagaaattgtccctgtaatttatctgtacatatctgcaagtgcaatgataaaaaaaaagcttgaagttagttgca

SEQ ID NO: 119632 - DNA, 1049 bp, Zea Mays
atccaactctcaacgcattgcccccacgagccatctacacaagctaactagctaagcaaaagaatcaccggcgccaccatgaagccgatgtcctccgtgttgttcgtcctgctcatcttgccgatgtgcagcaggtcgtcctccccgctgcaagacacatgcaggtccttcgccgccggccacccgtccatcggttacgagtactgcattagggtcttccaggccgacaaggacagcgccgaggccacggacgcgcgtggcctcgccgccatcgcggccaggatcgccgaggcgaaggccaatgcgacggcggcgcgcatcgcggccatgggcgcgctcgagagggacgcgaggaggcgggaccgcctgtccgtgtgcgccgaggcatactcggacgccgtggaccagctcgggcaggcagaagaggagctcgcccgcggcgcggagggcggggcggccggcatcgacgacgcggtcacgcagctcagcgcggcgctggacgcgcccgagacgtgcgaggacgcgttcggcgaggccgccgacacgtcgccgctggccggcgaggacgccgagttcaagaagctggcgaccgtcgctctcgccgtcgcggcgtcattggtgccgccaccgtcaacgccaaggccaagggttagtgattaaggcgccctgtactatatacaccgtgcttggtatagtagtaagcaccggacactgccggcagatgtttttgcgttcttatatgtatttttgtttcccttgttcgatggttcggggttttgttgcgtgtagtgccgtgcatgcttcgcatgcatgcgcgtgatatggtgtagtgggcgagtagcacatctgcaaactgtgtcgcgccctttttgatctttgaacatggattgttagctgtgcgggacgcttgagccttgagtagttgagtggaagctacgcgtgctgccgggtgcagtgcacttttgcctttgggcctctcttactttttcttgggtggacactggacctatgttgtggcaaatccatgagcccagatggacaaaaaaaaa

SEQ ID NO: 119633 - DNA, 1566 bp, Zea Mays
gccaggcaggtgcgcagcttttccaaccttccaccccccccgtgcggcgctcccacgctgagtcgctgaccgctcgcgcctctcttcgcctcctcctcactcgccgcgtcctccgcagcacagcccactcgcatcggatcgcgcgcggggagcggcatggccggcgacgacggcagcggcgggagcggaggcggcaacagggaggacgaggtccacgtgcagatcgcaggatcatccaaacctgaaacctcatctaccaacgaaacagctcctcaaaactctcataccaagcattggcattggtggctgatggtaactctgaacattttcttcctcgttgctggtcagacagcatcgacactccttggcaggttctactacaaccaaggtggaaatagcaagtggatgtccacatttgtccaaaccgctggctttccagtgctgttcgtcgccctatatctgttccgttcaaaatcgccttctacacaaacaaccaccagtaaccctgagacttctgtcaccaaaattactcttatatatgttgtcttgggcctcatcattgctgccgatgacttgatgtattcctatggcctgttgtaccttcctgtatcaacatattcgctcatttgcgctagtcagctggccttcaatgctgtcttctcatatgtcctaaatgctcaaaagttcaccccattcattttcaactcagtaattctccttaccttttccgctgcgcttcttggagttgacgaagattctcagggtaccaatggtttatcgcgtgggaagtacatattgggtttcgcattgaccctaggagcctcggccacatactcactaattctctctctaatgcaagtcgcattcgagaaggttattaagaaggaaactttctcagtcgtgttgaatatgcagatatatacagcactagtggcaacagtagcttctcttatcggtttatttgcaagcggcgagtggaagactttagagggagagatgcatgccttcagctcagggagggtgtcctatgtgatgacacttctatggactgctgtatcttggcagatagcttccgtaggagtggtgggtttgatctttgttgtgtcatcactcttttcaaatgtgataagcacactggctctacccatcattccgatttttgctgtgattttcttccacgacaagatggatggagtgaagattattgctatgttgatggccatctggggattcgtttcatatggatatcaattatatgtcagtgacaagaaggctaggaagacttcagtcagtgtggaggagaattcctaagcgcttgttggcctgttacattggtctttgtggctcctataccactttaagttgctggtattgaggaggtactagttattgacttattgtatccaaaaggagctcagttgagaatctcaggtttacacaattcataggtatatacttctgttagtattgtcatatcatcatatgtaccgatgtacggttgtgttgtcctttaaaataaaaagattagcatttccagaggcatgctctctagatttctaattgcct

SEQ ID NO: 119634 - DNA, 516 bp, Zea Mays
acacaggtgggacccagtactaagtgatttatcctttgatttgctaattgcacttcacaccgatggtgccttaaaaaaaagttctgatctccttgtcgctgctactgccttcttggttctcatctctctttacttgttgcgtgatgcctacctgtctcggtgtctcgttgacatatatgtatgtgattctagtctacaaacgaacctgcacaagtggcctccgttcaatacagcataataaaaaccttaggcacattaggtctatttatttttctggctgtcctttctggtgagggaatacacttgcaggctcggcgagggccttcggataagagcataagacaagttcgttattcttctcttctcagtttacagaggtacagcttgactcaatgcttcaggtttaacttgctctgaaattatctatgcctttttttacataagaagttaatatgattcgttgtctgtgcaacagattaactagctgcattgttaacttttagtgccatgtatatt

SEQ ID NO: 119635 - DNA, 105 bp, Zea Mays
tagtagttggtgtcccagctcttaatttagactcagcagcagtaacctcttccatccacgaaatttcttttgtagagcctcatgacagtagaatttgcggtttcg

SEQ ID NO: 119636 - DNA, 488 bp, Zea Mays
aatgtcaacggggtggtttggacttggtttgggtgcgccaatcttttacagactcttttcctcacgggatagacaaaatgcaacaaatccaaaagaaaaaagagattgtaacctggattaggatggtgttattaaccatggaacgaaaagccgtggggaagatcaccggaagcggccaccgtcggcgagcttcctggagcgacagcgcgtgacggaggcggacgagaggctgctgtggagcggcggggcctacctgcggcgtccggaagaagagcaggctcgggtggtgcctgagcgcgccgcccgacgtgtccgacttcctgcgggacacgtacggcgataccgacctcgggaacgccggcgggggctcgggcgcctgcgcctgcgcgggccccggcggggacgcgtcgccgctctgcgcggcctcgagcgcgagcaggcggtcgcggaggcacgtggcgcacacgccgccgccggcctggttcggg

SEQ ID NO: 119637 - DNA, 1618 bp, Zea Mays
cgcccgccgtcctcctctccctcttcttcgcattgcctttcccttcagttgcaccgacctccagacgaaaccacccaagacgcgtgcttccattcctagcccaacagaagcgaagcacgccaccgaccaccggcctcgaagggatcatcttctctacaactcgtcctcgtggccttgttcctcctcttgtataggggactgcggcggagtggagatccgtgccgacatagtccgacttcttcgctcgctggcactcacggaaaagagaaggcaaattatgctgaggtgttgttgcccaagtgctgaggccgtctcacattggttaatgcggtcctaacctcgcaggtcatctatccgctcctagccctcaaaccgcctaaagaggtgatggacctgattgactcaaaacgtaaacattttttgtgggctggctcagagaggttgactggtggaaagtgcaaagtcagctggaatcgtgcaacaagaccaaagaagcatggtgggttagtcatcctccaacttggcaacttctcatgggccttgcgtcttagatggttgtggcaggaagccaaaatgttgactagccaaaggatggtaaaagacctaccttgcactacaatagacaagcgactgtttacagcagcaacctcagtcacggtgggggatggaaagtcttctttgttctgggaaagcgcctggcttaagggtatgacactgagagacgcctatcctctgctattctctatttccaggggaaaaatagatccattcaagaggctctctcaaataactcatggatacatgacctaaattttcatcatgatgatttttcatctacgcacctccatgaatactgtcacttatgggtagaggtgaatcgggttcgcttattggaaaatacccctgatcttacccaatggaagcttaccccgagtggccagtacacagctcggtctgcctaccaggcgcaattcgttggctccacactcactaactttaacaacataatttggagagtctgggcacctccaaagtgcaaattctttagttggcttgctgttcaaaacagactctggacagcagacaggttggcaaggaggggatggcctcacaattcgtgttgcgtgttgtgctacctaaacgaggaatctggatttcatctctttgttgaatgttgcttcaccaaacacatttgggctgagttgagcctgtgggcttcaagtactgagatccaccattccgcctggcaacctgtagactctgtgcaccagtggtggtcgaatctcgtggtatctgcagtgagagacaagaagggcttgcgtaccctcatcattctcgtatgttggaggatttggtgtgagagaaactcgcgaatttttgaacaaaaagggacatacctacaatagactctggcaaagatcaaaaaggaggcccgttggtggattcaaggaggggcaaaacatttagctaatctgctataactttgtgtttttgatgcatggcgaccatgcctcagtttttagtgccttttccgctttttgttgggatttactatttgtagcccctctgagcgcccatccccctttttaatatgaaaggcaactctcttgccaatttc

SEQ ID NO: 119638 - DNA, 803 bp, Zea Mays
cgcccgccgtcctcctctccctcttcttcgcattgcctttcccttcagttgcaccgacctccagacgaaaccacccaagacgcgtgcttccattcctagcccaacagaagcgaagcacgccaccgaccaccggcctcgaagggatcatcttctctacaactcgtcctcgtggccttgttcctcctcttgtataggggactgcggcggagtggagatccgtgccgacatagtccgacttcttcgctcgctgcctacgattgatggcctcaccttcaccaaccgaagagttcagcagggaagcagctcgtcagtctctgatcgcgatctccgagtccactccggagacaccttcaccgcagacggtgaggacaccgccgatctccagcgcagagaacgggaagccgggcgatggggcggacaagttcagatcgaagctgatgtccatcacagacctgtcttctgatgcccaacctgcgcagtgccctcccgaggatgtcgctgcttaatcaatcgtgtgattctctgctcgacttgcggacacgatgtatcagtgcttgccgatcctctgaactggacatttggctgtcgtgctttaaactggacgtccttatggcttatgttattactggtcgtttttatttgataaataaatattcaggggaacgggtggaaatatactgtacaagtttcctgacttgttgatgaggaaccggtttgtctgaacatgctgtcatgcactcatgctcggacaacctctttgttcccgtgtcaagtttgtgatagaccttgtgttgagaggatcg

SEQ ID NO: 119639 - DNA, 1604 bp, Zea Mays
tccacgttctttacccgtagaggggaagaaacttttacatcaacatttttaatggaagaattctctgggagtaatcgtggatcagatccgttaccatctctagcctacaccactagctagggagagagaaacatacgcgtgccccaacgcagaaacctcagatacgcatcagttgccagcagcagccgacgcagcgcggggaagagccataagtagtagacggcgggcggcgcggcggagtcaccccgcaagcaaacgatacccagagtgtcgcaaagagcttacgagttaccacacgagaagaagacacgcacgcgccgtcatgccggctctagtgggcgcgccgcccggcgacgccaccgtgctcgtctacgacaccttcaacgccgccagcttcctcttggacactgccgcgttctgcgacggcgccggcattattgccgtcgccccggcgtccgcgaaccagcagcagcatgcgccgccggagcgggaggcgccgactagggccaggaagcggcggcggcgggcgcggaactgcaagtccagggaggaggccgagacccagcggatgacgcacatcgccgtcgagcgcaaccgccgccgccagatgaacgagtacctcgccgcgctccgctccaccatgccggaggcctacgtccagaggggggaccaagcttccatcgtgggaggggcaatcgtgttcgtgagggagctggagcagcagctgcagtgcctcgaggcgcagaagcggaagctgctgcacgttccggcggcggcgaagcctgacgcgacgccagcgcacgccagcagcagcagcaccaagatccgcgtggattccgcggcggcgtcgacgagcaactgcagcagcagcagcagcgtgacggaggacgcggcgggccacgcgcggccggccccgttcgcgcggttcttcacgtacccgcagtacctgtggtgccactcggcgcgcggtgctgctgcggcggcggcagcggaggaggaggaggacggccggcggttgggggtggccgacgtcgaggtggccttggtggaggcgcacggtagcatccgcgtgatgacggcgcggaggcccgggcagctcgtctgcctggtcaccgcgctccaggcgctccgcctcgccgtgctccacctcagcgtcaccacgctggacgcccttgtcctctactccatcagcgtcaaggtggaggaagggtgcggcctggcgacggcggacgacgtcgcggccgctgtgcaccacgtgctttgcatcgtcgacgccgaggccaccgaccagcagctgctcgcggcagcgcggccgcaatagggccgaccgacgtcgtccccgggtccatcgaggaggcgagcgtagatgcgacgtggctgaaaaggccatgtacaggcataggcgtcttcaaggctccgttcaaacgcttcggtgtaattttgtagtttcatctctgtctttttggctgttttttttcttttcgtagtacttgttactagtacatgcatgtgtaagcgtcttttcggcaagcaactctacagatttttgttcaaggacgtgtaggcggccgccaccaaaaaaaatatttaacgttaggtatgta

SEQ ID NO: 119640 - DNA, 219 bp, Zea Mays
actcctccactgctatgtgattttgagcagtggattgacacagaaatatcagggaaaggcaagaagtggttggagaatcttaaaaagtgggatgcagaggacaaagagaggatggagaaaagacgataggagcttcctgccgagcaacaacgtgaagacgagcaggaaatgaggcgtgttgctgaatgcatggaagagaaggagaagaagcttgagcgt

SEQ ID NO: 119641 - DNA, 2360 bp, Zea Mays
tttgcttgcctgcctgccgcccaaaccaaccttcctctcccccggaatcccagaaatttccgcccacaccaaccggcacctattccgtgggcgcgaaaccctaatcggcgcccgcctccatctccatggcggagcaggacgacgccgcggggcagagcccgctcgactccgttccgatcgacgaaacttgtgatgctgaagatatgcattctcctttgtccttttcttacagaagtcagcctaaatctgtgggagctggtcttagcaatatggggaacacatgcttcctgaacgcaactcttcagtgcatcactcacactgtaccgctttttctcaagcttcgctcaactgatcattccaccccatgctcatataataaggatgggttttgttctttctgtgcccttaaagaacatgttgatgaatcaattcaaaggtctggatctgttatagcaccagcaaagttcagagataatttaagaaagttatcttcggatttttggccaggacagcaagaagatgcacatgaatttctacgttgcttgcttgataacttgcacaagtgtactcttgatcccatgtcaaagggcaagggctcatcctttgacgaagaaagtatagtcaacgagatttttggaggacaactgaaaagccatttatcttgctgcgagtgtggtcacagctcagagacgtttgagcccttcctggatctaagcttggagattgatcaggttgatcatctggtagatgctttgcaatcttttaccaaggtagaacagattggggactctgaaaacaagctcacctgcgaaagttgcaatgctcaagtttctaagaacaagcagcttacacttcatagagcaccagatgttattgcatttcatctcaagcgttttacaacccttgacaattctgttgaaaagattgacaaacatgtggtgtaccctctggaggttgatttgaagccatttcatagcaatccagacacagtggggggactgaaatatgatctttatggtgttgttgagcattctggattacccaactatggccattatacctgcaccattcgttcttcaccaagcacatggtacttcatgaatgactccaaagttgattcttgtactgattcaagtgcattaaaccaggaagcatatattttgttctatgttaggcagggcaaatttccatggttctcgagtttgctagaaggcaaggatgccctgcaagctgaaaatacctgtggctcatctcctgtgtcagttttggaaaatatagatgcaaactgttcaacgtcttttgcaggaggcagtggcagtagttctggtgataagttagagaaaaatgaagccagccaattagaggagacggagaaagatgaaatgggtcggtacaaaccatcattccttcctgaggagccatctacgagaagttcccttggcgcttccaacagcaataatacaatcgatgaaaacaatccacccagggcttctctccaaaatgatgtggctacatgtctccgctgtgtagaaactaccaatctggataagccctctaccccaccgcgctccaaacgacttgcctttgataacgagtttagtgtgtttgagtttgaggactttggtgaggaagatgaaactttatttccaaatttgaaacttacaccgaaggccaagaaagctaaggctgcatctgcatctaaagctgagaagggtccttgcattgatcagaacgcagtacgtttgatgaggggcatgacatcgacacgaagaaaaggtttaatggactgcatagcacagcaaactgcaaagcacgagtctagcagataccctgcaagtgaccctctggacaaaaagaaaagaaagccggttcttcaatactatgtaaacgtgaaaaattgataaaatggtctagaaaaaaaaacccggtgagcgtgggtggtgaatacgccgtggaggtggctcacgctgatgagggtaagccggcatggattaagggcacagcaagcatgtgggtcataggcggagctacgttagggccgtcctcggcccttggcctttgctctgcgtaaccactagaagtctgcatggctgaatgctgcaattaacttgctctccacagtctgcgaccgagaatattttaggtaattttatatttgtgtccctagtttagcaccactcagttttgttcctagtttagcaccactgctccgttttgtttttcgctagcagtagaaatgtctcatccattactatttgagagtaaaattgtgtagtggtgcggaactaaagcctaaaggtacatatttaaaaacccaaatattttagcgctcatgttaaactgtttgtttttcccattcc

SEQ ID NO: 119642 - DNA, 408 bp, Zea Mays
atgtgcccgtcgaccaccggcagcgtgcggcccgtcctggagctcgccgtgttcacggtgctcctctcgatcatctggaagatggggtacgccgccgtcctcgcccgcaggaacgtcgaaatgttcggcgccgcctggccgagcgacaggccagcgatgacgacgttgagcatggtggtgaaggactcgccgccattggatatccgcttgtggacgacgacgctggtgaaccagatgagcagcgcccacgagaggaaaagcacagagtgcatggagccgaggccgaggcccttggcgaggccgcccctcttgccgtacttgtacgtcctcagaagcgcctcccggtacgacctcacggccttctcctcgccgacgaacgcctgcaccgtccgcacgttgccgatcacc

SEQ ID NO: 119643 - DNA, 1945 bp, Zea Mays
cctcgctctcgacgcctcagctcctcccccttctctctcaactcctgctagctctctctcacacacactagccggcggcgctcctcaattttcacacttcctaaccacatcaggcgcacacctacgcggccataccctcctccaccgatcacttctcggcagccggcttctcgtcctgcatcccaggagagatcgagagaatggagctgttcccagcgcacccggacttgcagctgcatatcagccctcccccagccacgaaaccaacggagctagggttctggaaaagggctctagacaccaccccgacagcaactacaacggccgcggcggccaccacggccccctccctcgccttcgcgtcctcggcgccgacagccgtggggcaccacgcggcggccggcgcgcaccacaacgaccaccaccatcaggtgccgacgacgagctcccactcccacctggtgggcctcccgttcttgcaccacacccagcccatcctcctcccggagggccgcggcggcggcctccgccgggacctggcagccgcgaggcccatccggggcatccccgtgtacaacgcctcgcagccgctcctccacttcctgcagagccacacgcattgccacgacgcgatcgtcggcgcggccgggccgaggttgtcccccaaggccgcgctccggctcgcggcgaagcggggcgcgcgcgcgccccggatgcggtggacgacgtcgctgcacgcgcggttcgtccacgccgtcgagctgctcgggggccacgagagagctacgcccaagtcagttcttgagctaatggacgtgaaggatctgaccttggcccatgtcaagtcgcacttgcagatgtatcgcaccatcaagaccaccgaccacaagccagctaattctgcttcatcctacgggcaagcagcagccgcgaaaccggtcatcgacatccccgaccccgacgacgacagcctgttcgacctcatcaccaccagcgccgggtctgatcagtcgtcgtcgtcggctcagcactctaaccctgacggcggcggcggcaacgagcatggctccagcatgtgcgctctgtggtgcagctcctcgacaagcatcagcagggggggctggttccatgacagaccaagagacgatgatgccgccactcccggtcccggcgacgacatcaaatccttcgaggacgtgcaatcacacagccttcttgacgatgtcgccgacctcaactcgtcgccgttccaggtagtagctgggatgtttggcagcgacaagaaaccgaacctcgacttcaccctaggacggatataatccgcactgtctatctacacctcgaccatcagctgagccaaccgagatcgatcgatcggccggccatggatacgaagctagatacaggctagagctagctgcactgcatacataggttgatctgcttctaagctgccatgtttatgatctgatggagcatgtgcgtgcggtatgcatgcatggtcgtagcgagggaacaatgaagaagaaccaaaacgcttgaagaaatgaaaaaagaaggcgcgctaggagtaaagaataggagatatggcaaccgtggattggatccaggaacaaattaaagctagcgcgcgcaaaattaaaggaggcgggggagacattggtgcgtgcgtgttagtagatatagacagctcgataggctttatccaaggcatgtggtgtacacatgcatgagggatcggatagagagatcgatcagaggtgcatgacgcatgaggcacctagttgtagctaggggccggttggctggccaagatttgacaaaaaaggtttgcttcatatatatcctttattatgttatatgcttatgccacacaaagtgtactgcaaagagagctaggtagctagcgcatattatatatatatatgtcatatatatgcctgca

SEQ ID NO: 119644 - DNA, 1430 bp, Zea Mays
gctgctgaggacactaggcccgaccgcccgaggaaggaagagaaacccgcagagggcgatagaggtcagcgcgattcggagatgggcatgggcgacgaactgtgggacgactcggcgctggtcgtcgccttcgaccgcgccatttccacgttcaatgaaatgcattgcaagagcaggcgagcaacgccaagtaaggatgcgaagaaggaacacgctgctgctcctgcagcagaagaagagcccattactgctggagcagtggatgagtgcagagaggaagatgacaactgtgacaacgcacagacagttgagcaacagcagccctctgacgacaggcagacagttgagcaagcttctcttcaggaaactgatccaggcaaagagacacatgtttcagaggctaaaacgctcacagcagatgctgatggaaatttgagttcaagccagcaaactggggagtacaatgaattgctgagacaatactatgagcttgaggagaagagtcggaacattcttgagcaacttcaacaaacaaactcttggaattatcaggcaccaggatatgcttctacaacccaacagcagcaagttcctgtctatagtgccacagcaccagaccttcactcttccaccactcaatcatcatgctgcaattggaatgttcccctggtatctgtctactgctgttcaactggccaaccaagtggaggttctgcttatatgccacctactgctggctgcagcgcaacattgacttgtgatcaatgcccagatgcaaacagtgcataccctagcgtttcaaacttcatgcaggtcccaacaaatgtatctatcaatgatgatcaagttgctaaggctgcaatgaagactgctgaaggtgccttcaattttatgagaagtacgatatctggacagcctggcgcccaaagaaatgaatctgatactgggaaggaggaaagcactgatatgggcacaaacctgaatcttgatagtgatcttgctgctctcttaaattcatggtatgctgctgggttctacacttgcaggtacctcacgctgcaatctacgagaaattccagaccgtagagtgctttggccgtcttgagttttagatgtctggggaaaaaaaaagcaaatcactgggtgcgcgtgtgtgccttcaagtacgaatattctgctggagtttgtctactgtctgcttgctgcttgtcactgctattttaagctacactagactttcggtattgctcgaatgtgaatctgttgatgccaggcagaaaaattgcgtataaatgtgtaaactgtcgcactgacctatcagatattcgtcgtatatagagcgctgccatgttcaacctattttagcaggctgttttcggcaggatgacatttgtgctaccacgagtagctttgccggttggcagcttcca

SEQ ID NO: 119645 - DNA, 77 bp, Zea Mays
accgtggtggcagaaaagaagtcccaactgcaaggccaccagcccaccacaggagaactcaccaggaagcaactgct

SEQ ID NO: 119646 - DNA, 2374 bp, Zea Mays
ttttaacagctcacaacctacaacagctttttccacagctcacaaccaacaacaacttttttcacagccatagcacaaccaagcagactcaaaagaatagaagcaacaagctaaaagaactcaagtccttcaacaaagttgttcgtcttctgttaacacacgaggttaccctcaactaatgccaagacgagcttaagcatcctggtcaaggccccatgcacccgagtcagtggaccatgggatctttcttctccctaacaacatgaacacgtcagtctcaggtcctaaatagtttagctactctaccactatgtttcacattcaaacagagagattgtaagtataaagaaaggaggatagagaaatctgatggaggatggtttgcttcaggcactggcagggaggacaccaggcacctccaaggatcactccatggcatcacgccaaaccattgtaccctaacacaagatcagaaaccgttctgttgtgttttccccattgccgagtgtgaaggccgacatccatgccaacaatatattctgctgcctctgtaacaatacttgacttattaccttggtccaaagtgtttaaattgttgcgattggtagacagatcaaagcatctggtgcctgtgggaatcctttcttcactcatacattctagttaacagttaacaaatcccatgccctgtgacaagaaaacagcacacattggtaccattttcacttgcagacagtttgtcaaccttattgcacccgcgagaacaaggccacgggcaaatgttttcgatcacataatgggaagagggtaatgctcaaaccccaaccagcagctatgcaccgatgatgttcaccttcctctgaatatcaacacagcccaatcagcagcagctatgcactgatgatgttcaccttcaatatcaacacagcaaaactgggaattaccgattgccatcaccaaacaacaccttataaaaccgcctcctctcctctcttttctctgcactatccaagcgcgccgcttcctcatcctccacctctttctctttctttacctcaacctcccctctcctcctcttcttctcaatattcatccctcgccgccgttggttatactcatgcagcccctcctgcatcagctccccgagccgatccttggccaagaccaccggatccttctccctcagctctgacccctcgtaaccttcgcggagcaccactgtatgtatcttgtaccgattcgacacgtaaaagaggcaggggtgccggagcagcatcctcgccgtgtcctccggtagcccaaactccctcctaaaatgctccagcttcaaaatcgacatctttctccacagggtgagagagaggagctcgtgcaccaaggccaccgatcgcttctcggcttcggcatccgtgcccggcaaggcccactccgagtagggcgagatgtaaggcgtggaggcgttgaaatcctccatcttggcgtgtgacttgacccatgaggccggcagcgagcagctgaaccgtggggtcgagtcgctcgcggcctcgacggcggagacggcgagagagggagcccatctgacgagctctagctcagcggcgttgcggcggtgcgggtaggggtttgtgaggcggaagagatcggtgttggcggggacgaggcggaggaggtagtcatcggggaggccgagagggccccgcagcgcggcgagcttggaaacctgtaggcggcggccgcgggcgagcatgagcacgcgcgcgaggcggtccgccatggccggctcggaagccgcgacggcagcctcctccgcgtggacgagcgccgccatccgcttggtgaagccgaaatggggttcctgctcaccgccaccatcgtccgcggagaagacctcgaagcaggaagggtacttgctgagccagttggcggcgcgacccatgagatcgagtgtcttgaagcgggattggaggaaacgcacgggcgccgtgcgggacgggaagcggagtaggaggcgcttgatctggttgttgacgacccagcggcggttgcgccggagcgccgcctccagggcagggtccttaggggacgaccaccgtgccatgctcgccgacgacgcacgccagcggacgccgccgggatggggcgtcgaaacgccgccgaaagggttaacgcgagcggggctcgtgggcttcagccgttgtctgcaaatgggctttctgtagcacttgggtgactttctctggtatcctggctgggccttttggagttttggtgtgaccaactgaccatcgggtctttcgtcgtcatcgtcaatcaaaggacaacatagtgtatcattctctgaatagaaatgcaattataaatttatctcctaaaa

SEQ ID NO: 119647 - DNA, 2523 bp, Zea Mays
gatagagagttcggtacggacgtgcagccaactttaaaccctacccgcccaaacccacacgactcacaagtcacagccatggccgccgccgctaaggcagcggccgtagccgtctccgcgggggcagccttcgtgctctcttccgagcgggcccacgctgacggtggcagctcgaccttccgcttccccggattctactcctccgccccggccccggccccgccccccgccgcgccgccgcatcagcagcccccaccgccgtcaggcggccagcgcgaggaagccccggaggaggctccgaaggtttctactcagcaccctcgcacgagtgccgcgggcttcgaccccgcgccgctggagcgtggggtggaggcgattgacaagctcaaacagtcgtcggaccctaaaaagctgttcgagtttatgaagaagcaggaggagacgcaccagcaggaaatagctgcgaagaaactcgagttgcagaaggcagtggccgagatcgagcttgagcaaaaacgagtggattttgaagagagaaaaaaacttgatcaacaacgagcgaaatttaagtcgcagacagctcagtatgaggatgagctaaagaggaagcgactgcaggctgaacatgaggcgcaaaggttaagaaaccaagagctcgtgaagatgcaagaggaatctgggattaggctagagcagatcaggcgggcgactgaggagcaaatccaggaacaacggaggcagacagagaggcaaagggctgatctagagcaggcgaccctttcaaagaaagccatggcagaggcggaggggagaatactagtaacaaagcaaactgaagatgtgaagaggcgattgcttttggaggagataaatgctgacagggagaagtggatccaagtgataaatacaacctttgagcatatcggaggtggtttgcgaacgatactaactgatcaaaataagctagtggtagcagtgggaggtgtaacagcacttgctgcagggatatacaccacaagggagggtgcaagagtagtctggggctatgttgatcgtattcttggtcagccatcactgataagggagtcatcacgggggaaatatccctggtctggttccctatcacgtgctacaagtaccctgactagcaaattgaagagtggaagcaacctagggaaggacgggaatgggtttggtgatgttattctaaatccttctctccagaagagagtgaagcagcttgctaatgccacagccaatacgaaacttcatcaagctcctttcaggaacatgcttttctatgggcctcctggcacagggaaaaccatggcagcacgagaactagctcgcaattctggattagattatgcactaatgactggtggagatgttgcaccattaggatcacaagcagtcaccaagatccatcagttgtttgactgggcgaagaaatctaacaggggtttgctcctcttcatagatgaagcagatgctttcttgtgcgaacgaaacaaaacttacatgagcgaagctcaaaggagtgccctgaacgctctcctcttccgcacaggcgaccagtccaaggacatcgtccttgcgcttgccaccaacaggcctggcgatctcgactcggccgtcgccgaccgtatcgacgaggtcctggaattccccctgcccggggaagacgagcggttcaagctcctgaagctatacctggacaagtacgtcatcagagccggcgacaagcgcgagaagagctggctccgtttcttccgccgccagccccagaagatcgtggtgaagggcgtcaccgacgacctgatccgcgaggcggcggccaagacccagggcttctccggacgagagatagccaagatgatggccagcgtccaggcggctgtctacgggagcaaggactgcgagctaacccctggcctgttccgtgaggtcgtggactacaaggtcgctgagcaccagcaacggagaagattagccggtgaggagccaaagcaggatgcctaggttgaccctttttttttattcattcacccccgttttgccttcccgggatagatagcttcatcagacaacacagcctagctacacaatgtgcaggcgacgcccaactaaaagctcaatcagacaacagagccacggctcccagagacgtcggcacgtcgcaccagtcaagcagcgctaggatgttgtgcttaggcagttaggcgcactcgcggaggggactgcaggccgtgacctagcaccgctgctgtcaggctcgagccgcagccctggcaagtccgtcctcaccctcgtgctctgctgactgaagacatacagcaaaaccaataagggaacagtagtctgctgttaaggaagggaatgtcgaacttcaggcatacagcaagactaggctgttagtcggcaaggtttgttgtttgcacaacattagattcttctattcaaggcagattgctaatatgatcaaacacttagcctgcaacgcaagaaagattgcaagtatgg

SEQ ID NO: 119648 - DNA, 740 bp, Zea Mays
atactatttgtgcatatcaacaccggaaagaaggaatggacattgaagtgtcccatgtaaaaagaaaagaaatccctttgtttgtttttcctggtggagtgtgtccttctcgtacttctagaacaacgcacaagaacagctgtgccattccaacacgtgatgtttcagctgatgatcaagtgggaaacctattgggcgttgccagttgtagtgatgctcaacatgtaccatgtaaaggcagttatatgaaacaactagaaccagattttgctggaggctttcagttgtcaggaagtatttctctgttgccccctagcttacccaataaagtagttttgaatgggtctgctaattttcatgcagaatctattgagagtgaacatccagaacactatcaggaaagtaagtttgcggctgtgcagaataccatgtgccttgtagtcaagcaacctaacagtttgctcccaaattcaaacaacgattcacaattgtatggatctgattcctctcttaacagttcaaaaagggaatgtgcaggcagtgctgcaaacaacttgctgaagttatccccagctattccagccacacctgatgaacttgatgagctggtatcctatcaaactaatcagaaagatgtaaatgctgaaaataacttggagatcggttctaaaaataacttggaacaaatatgcagtctgaggccccaagaatctaataataatctgaagcgtaaagtcaat

SEQ ID NO: 119649 - DNA, 351 bp, Zea Mays
atggcaccatatgttggttgtgatgtgctccctagaggccttgaaggtgtctattacccagtagatattcaggagatggtcttgttcatactatttgctgtcagcatttctttcattcactctactcttcatcagagtaaaggacttaaggttagcttgaatggccttaaagagctggttcagacttcagactggacccaagttgacctcaacttagatcagagtttgagccaagtcgagggttatttttgtttgctaactagaagtgttgtagaatatcgttttaaatttaagattgttgttgctctgttgatctacaagagaacaccgaattcacacagggccatttga

SEQ ID NO: 119650 - DNA, 2975 bp, Zea Mays
gaattcatactcatttgtccaggcaaccagaggccaaactactaagtcattctacacgttgccagagtatgaagaatggagaaataatttaggagcaagtgcaagttcatggactataaaatactacaaggggttaggaacaagcacagccaaagaaggccgaaagtacttcgaagatattactgaacataaaaaagattttctctgggtagatgaccaagatggcaatcatattgaattagcattcagcaagaaacggattgctgataggaaacagtggcttacaaattttcagcctgggacatacattgaccaacgtgacaaacatgtcaagtatagcgatttcatcaacaaagagctgatactcttctcaatggcagacctgcagcgatcaataccttcaatggttgacggccttaaaccaggccagaggaaaattctgttttgctcattcaagaggaattttgttaaggaagctaaggtggctcagttctctggttatgtgtcagaacactcagcataccatcatggtgagcagagtttagcaggtacaattattggaatggctcagaactttgttggcagcaataacatcaaccttatgtaccctagtggtcagtttggcaccagagctcaggggggcaaggatgctgcgagtcctaggtacatcttcaccaagctgtctcatatcacacgttcaatttttccgaaggatgatgatattcttcttaattatctgaatgaggatgggcagtcaattgaacccacctggtatatgccaatccttcctatggtcttggtcaatggtagtgaaggaattggaactggatggagcacatatattccaaactacaatccaagagacattcttgctaacctcaggcgattgctgaatggagagtctactgtaccaatgcacccatggtacaggggatttaagggctctatagagaagacagtcaatacaaaggtagctggttccacatatactgtcactggaatcattgaggttcttgacaacactacactgaggatcactgaattgccaatccgccgttggactcaggattacaaagattatcttgagagtttggctccagatactaagaacaaggacaaagtaccattcatagaggatgtcacatgtcaaggtgataatgaagatgtttacattcagttcacattaagtgagaaaaatatgaatatagctatggaagaaggactagtgaagaagtttaagctgacaacaacaattgggacatcaaatatgcacttgtttgattcagatggtaaaattcggaagtatgacactcccgagcaaatacttgaggagttctgtcatttaaggcttgaattctattgtaagagaaaggaagcattgttgaaaagcatcaagttggacttaaagaagcttgaaaacaaagttaggtttatccgctgtgttgttgataatgaaattatagttaacaaccggaaaagggcagatctatttttggagcttcggcagaagaattttgatcctttcccaaagaaaaaaaagagggctgaaccagctgctgtaggtgctttagaagaggaggaaaatgaagagagtcctgaagctgctggagcggaacctagtgactatgagtatctcctctcaatgtcaattggtacgttgactttggaaaagatacaggagcttaatgctgagaaacaaaaattagtggatgatgttgaggaattggagaatatgtcaccaaaatcactatggttgaaagatcttgatgcttttgagaaagaactggatgtgcttgatcaaatggatctagcagaggaactgcaaagggaaaagaggataaatgctggcaaaaaaggaggatcaaaagctgcacccaagaaaccacgtaaaaaggctgcatctaaaaagctggatagcgatacagaagatgatgattttgaaccagcggttgcaaagcgtggagctcaaccgaagaaaacatccagcaaggcaaatgattctgcgtctgaagatggagattatgtggctgctgaaaatcaaaagaaacaatccaagaaagcaagtgcccatgtggacgaagaagttgacatgccttcgttaaaagaccgtctggctgcttttaatatcagcgactcctctccggatcattctgccatggaaactgaagtaacagaattgacagaacagcagaatgaaaacaaagcgacagagggagcaagcaaaagaggcggacgaaagaaggcgtcatcatccttggcgacgataccatctgatgttgatgaggaagtcctagaggtccaagctcagaagaaaggtagaggaaggaagcctgctgccgttgtgaagcccaaggctcctgccgccgccaggaaaagggcgccggctcagggcaaggtaacacagaagaaaatagatgagatgctcaaggccactgaggataacaacaccagtgcatcttcccctgagaagaaggtccggaagatgaggtcctctcccttcaacaagaagagcggctcaatcttacagagaggctcgaccgcttctgcaagctctggaacaactgttgaagcttcaccaccctctggcagctctgcagagccagttggtgctgcacaacctagaaggacagccagggctaccaagaagcctatctatattagcgatagcgaccctgaggatgaagtggagttgattgatgattcggactttgatgcggacggtgactctgacgagtgaagattgtagtcatccgtactttggctgcaacaatatccagtttgtgtcgttgcatgtgacaatttgataatgcatttcttgtgcgttgtatgtgttcgttgcgttgttcagaactgttgccaagagctcaagacaacctggttaactggttaactgaattgtatgtctaattttggcatacaagtgtgcctgtggtatgttttatgctctgatgctggcatgctgctctcagagcgcc

SEQ ID NO: 119651 - DNA, 3061 bp, Zea Mays
gaattcatactcatttgtccaggcaaccagaggccaaactactaagtcattctacacgttgccagagtatgaagaatggagaaataatttaggagcaagtgcaagttcatggactataaaatactacaaggggttaggaacaagcacagccaaagaaggccgaaagtacttcgaagatattactgaacataaaaaagattttctctgggtagatgaccaagatggcaatcatattgaattagcattcagcaagaaacggattgctgataggaaacagtggcttacaaattttcagcctgggacatacattgaccaacgtgacaaacatgtcaagtatagcgatttcatcaacaaagagctgatactcttctcaatggcagacctgcagcgatcaataccttcaatggttgacggccttaaaccaggccagaggaaaattctgttttgctcattcaagaggaattttgttaaggaagctaaggtggctcagttctctggttatgtgtcagaacactcagcataccatcatggtgagcagagtttagcaggtacaattattggaatggctcagaactttgttggcagcaataacatcaaccttatgtaccctagtggtcagtttggcaccagagctcaggggggcaaggatgctgcgagtcctaggtacatcttcaccaagctgtctcatatcacacgttcaatttttccgaaggatgatgatattcttcttaattatctgaatgaggatgggcagtcaattgaacccacctggtatatgccaatccttcctatggtcttggtcaatggtagtgaaggaattggaactggatggagcacatatattccaaactacaatccaagagacattcttgctaacctcaggcgattgctgaatggagagtctactgtaccaatgcacccatggtacaggggatttaagggctctatagagaagacagtcaatacaaaggtagctggttccacatatactgtcactggaatcattgaggttcttgacaacactacactgaggatcactgaattgccaatccgccgttggactcaggattacaaagattatcttgagagtttggctccagatactaagaacaaggacaaagtaccattcatagaggtcgttgaaaacaaaaacgcttccaattgtgttcataaattttccaccgtcataaatgctattcctcaattgcaactattttacaggatgtcacatgtcaaggtgataatgaagatgtttacattcagttcacattaagtgagaaaaatatgaatatagctatggaagaaggactagtgaagaagtttaagctgacaacaacaattgggacatcaaatatgcacttgtttgattcagatggtaaaattcggaagtatgacactcccgagcaaatacttgaggagttctgtcatttaaggcttgaattctattgtaagagaaaggaagcattgttgaaaagcatcaagttggacttaaagaagcttgaaaacaaagttaggtttatccgctgtgttgttgataatgaaattatagttaacaaccggaaaagggcagatctatttttggagcttcggcagaagaattttgatcctttcccaaagaaaaaaaagagggctgaaccagctgctgtaggtgctttagaagaggaggaaaatgaagagagtcctgaagctgctggagcggaacctagtgactatgagtatctcctctcaatgtcaattggtacgttgactttggaaaagatacaggagcttaatgctgagaaacaaaaattagtggatgatgttgaggaattggagaatatgtcaccaaaatcactatggttgaaagatcttgatgcttttgagaaagaactggatgtgcttgatcaaatggatctagcagaggaactgcaaagggaaaagaggataaatgctggcaaaaaaggaggatcaaaagctgcacccaagaaaccacgtaaaaaggctgcatctaaaaagctggatagcgatacagaagatgatgattttgaaccagcggttgcaaagcgtggagctcaaccgaagaaaacatccagcaaggcaaatgattctgcgtctgaagatggagattatgtggctgctgaaaatcaaaagaaacaatccaagaaagcaagtgcccatgtggacgaagaagttgacatgccttcgttaaaagaccgtctggctgcttttaatatcagcgactcctctccggatcattctgccatggaaactgaagtaacagaattgacagaacagcagaatgaaaacaaagcgacagagggagcaagcaaaagaggcggacgaaagaaggcgtcatcatccttggcgacgataccatctgatgttgatgaggaagtcctagaggtccaagctcagaagaaaggtagaggaaggaagcctgctgccgttgtgaagcccaaggctcctgccgccgccaggaaaagggcgccggctcagggcaaggtaacacagaagaaaatagatgagatgctcaaggccactgaggataacaacaccagtgcatcttcccctgagaagaaggtccggaagatgaggtcctctcccttcaacaagaagagcggctcaatcttacagagaggctcgaccgcttctgcaagctctggaacaactgttgaagcttcaccaccctctggcagctctgcagagccagttggtgctgcacaacctagaaggacagccagggctaccaagaagcctatctatattagcgatagcgaccctgaggatgaagtggagttgattgatgattcggactttgatgcggacggtgactctgacgagtgaagattgtagtcatccgtactttggctgcaacaatatccagtttgtgtcgttgcatgtgacaatttgataatgcatttcttgtgcgttgtatgtgttcgttgcgttgttcagaactgttgccaagagctcaagacaacctggttaactggttaactgaattgtatgtctaattttggcatacaagtgtgcctgtggtatgttttatgctctgatgctggcatgctgctctcagagcgcc

SEQ ID NO: 119652 - DNA, 875 bp, Zea Mays
gttgaaggtcctagaggtctcactccccactaaaatatccaatttggactgcatggggggcagtgggcagtagaaatcttatctattttgtctactacctacagatttggacaaagtgatatttatgtgtgggagctgagccaacgaggtgtagtgcttgtatgccacgtttttgaacctttggtgtgctggcactctaggaatcctccttcatcaagcgtggctgagctccactgcacctgcccctatattcagtaccttgggctgccgtattgagtgaagatttcttccttgccctcaaattctagccaaagttcactgcttgagtgtgcagtccttatgtactgctggtataaccccctccctagcccaggtttgcccccttctccccatggactggatgcgctcagtgacccctccccctgcctatttattcagtgtgttccacggctgagttcagaaaagcttttctcccttgttctcgagctgtagtcccagtccactacaaaggtgttggagtcctggtattcttgctggtgtgcatcctctctttcagccaccaagtttgttttactctagagctgaatgccaacctcttgcctgtggtgaccaaacccaaccgtttttcacctccccgtggacaaggtttcccacaagtattcttggtcgtgtactacttgttccatgctcggcaaagaactcctaccagaaggagtgaagattcaagctgaagtggtgactgaagaggaatctactccagtggctgctgatcaagtggaggagccatctaactggggtttaatagagggatcgagtacctcttcactgcaataaggatccgtgggaatgattgacatatgcaagggttaagtgct

SEQ ID NO: 119653 - DNA, 90 bp, Zea Mays
gatctgctgaagatagccttaggacgacaatgggggcttggctagagctcctcgtggtcatcaattcttgtgctctgaccatagttatta

SEQ ID NO: 119654 - DNA, 264 bp, Zea Mays
acggacaggatggacatgtccatggcgctaccctgctggatgaaggtggtggtcatctgcgcgtacgccgaggacacgatgacgctagtcacccatatgggcagcaggcgcatcaggatcttgagctcctccacctgggtgacggtgcagagcttccacgacgacgaacaggcctcctccgacgacatctcctccatgtccgattcggagacgatagctgccttgtcaaggaacgagaactcgtcggtatgcgcgatcttaggc

SEQ ID NO: 119655 - DNA, 471 bp, Zea Mays
atggaggatgatcgtcgatggatgtatgaaggttggaaggaaagaggtgctctatcaagtgagtgggttgctaagactgacgcgtttctcgaccgtgcttttgctcggtcagagactggaaccgatgttaggtgcccttgtaccaagtgtcggaacatttatttccttgacaggaggactatgtcgatagatctttgcaagaacggttatatgccaggctatgaggtgtgggtgcaccacggtgaggacccacctcctcgtattgtatcggaagtacagtcacatgaagaggaggactacgataggatggaagagatgcttgacgatgtacgccatgagcttctaaccgtcgattcggagaaccccggtcaacccaccgagtttgaggatccagctacacctgaggttcaaaagttcttcgagctccttaaagctgccaaagagccgttgcatagagatggcaatgggtaa

SEQ ID NO: 119656 - DNA, 1557 bp, Zea Mays
aacatagcataaaaccctcgattcgaaggatccaaccgctagggttttaggcctttcctcaccgtcggcggctcggcgccatgtatgggaactccggcgaagcacccccgtgccgtcccacgccacttacaggccgcaatctccaccgtctccaccgcgcagatactccgctcttccggctactccgccgctgaacctgccgcgctccgcgccctctccgacatcgctggccgctacatcgcgtccctgggccacgccgccgcagctttcgccgaggcccgcggccgcacggagcccaacgtcaccgacgccgtcctcgcgctcgaggatcacgcgctcggcggcttccccggcgcggccgaccccacgcggccgttgctctgttccggcgcgctcgcggagctcgcccagttcgtcgctgcggtgagggaggtcccgttcccgaagcccctgccgaggagggatccgggttgcggctccgtcgacgggtgggagagcttcgcggcggcggggaggcagccgccgctgaaccacgttccacattggcttccctgcttcccggaggggtgggaggaacggttgcgcgttcgctgccaggtggcagcggatgacgagaaggacacagggcaagtggtaacggtgatggacggtaatggcaagagaggcgtgccggagaatagggagaagctgtcgttcagcttgggacaaaagcggcagcgtgtgaaaccatcccacaagcacggtggtgcctttgagcggttcacagaacaaggagaaaattctctatccatagaatgcattcacaagacaaaaccagcacaatttgtttcccgtggatggctaaatctatcagaagttcttgacatggatcaataagtgatgccactaacaacacttattgttgttgcagaatgactccaatttgctcctattccagtaatttagcttagattcgttcccaacaaattgcgtggcaagggaacaaatggggtctcagatcacaattatggattcaattctgctgctggagttctaaaaggtgttgggaccttctgtatggactatcagactgcagtatttgagaagatctagagcatcgtctattggtgcaacatcacattctatcagaagtgaaccttacaggtgataggtgtactgcagttcataatgttgtgctgtctccatgatcgccgcttgatttggagttcccaaaaacaaatcacatgtacaagggagtatttgcaaggccttctggacaccctcgtattggcaagtaattgaatggctcttgctttgctggcagttacttggaactctgtacctattgcagagcttcagggagagatcacaaagactgccttgtttggctgtctggtcaaggcagtgctgcctgaccagacagcaacccagcccgtcgattttctgcccctggtctgggggacgctgccgggctgacaaacatgttgcagtagaggaagaagataccaagatgtgctttgtcattgaaagcataatgtcgcaagttcaaagataaaatgcaaacacgcgattcagttc

SEQ ID NO: 119657 - DNA, 1711 bp, Zea Mays
aacatagcataaaaccctcgattcgaaggatccaaccgctagggttttaggcctttcctcaccgtcggcggctcggcgccatgtatgggaactccggcgaagcacccccgtgccgtcccacgccacttacaggccgcaatctccaccgtctccaccgcgcagatactccgctcttccggctactccgccgctgaacctgccgcgctccgcgccctctccgacatcgctggccgctacatcgcgtccctgggccacgccgccgcagctttcgccgaggcccgcggccgcacggagcccaacgtcaccgacgccgtcctcgcgctcgaggatcacgcgctcggcggcttccccggcgcggccgaccccacgcggccgttgctctgttccggcgcgctcgcggagctcgcccagttcgtcgctgcggtgagggaggtcccgttcccgaagcccctgccgaggagggatccgggttgcggctccgtcgacgggtgggagagcttcgcggcggcggggaggcagccgccgctgaaccacgttccacattggcttccctgcttcccggaggggtgggaggaacggttgcgcgttcgctgccaggtggcagcggatgacgagaaggacacagggcaagtggtaacggtgatggacggtaatggcaagagaggcgtgccggagaatagggagaagctgtcgttcagcttgggacaaaagcggcagcgtgtgaaaccatcccacaagcacggtggtgcctttgagcggttcacagaacaaggagaaaattctctatccatagaatgtatctcttcagcttcaaatttagtcattggtccatagaatgcaccctcttcagcttaaaattaagttagtggccccttggcatggaaaaactctgaagcactagagcaataagctatactccttctgtagttctgtgttggcctttaggcattcacaagacaaaaccagcacaatttgtttcccgtggatggctaaatctatcagaagttcttgacatggatcaataagtgatgccactaacaacacttattgttgttgcagaatgactccaatttgctcctattccagtaatttagcttagattcgttcccaacaaattgcgtggcaagggaacaaatggggtctcagatcacaattatggattcaattctgctgctggagttctaaaaggtgttgggaccttctgtatggactatcagactgcagtatttgagaagatctagagcatcgtctattggtgcaacatcacattctatcagaagtgaaccttacaggtgataggtgtactgcagttcataatgttgtgctgtctccatgatcgccgcttgatttggagttcccaaaaacaaatcacatgtacaagggagtatttgcaaggccttctggacaccctcgtattggcaagtaattgaatggctcttgctttgctggcagttacttggaactctgtacctattgcagagcttcagggagagatcacaaagactgccttgtttggctgtctggtcaaggcagtgctgcctgaccagacagcaacccagcccgtcgattttctgcccctggtctgggggacgctgccgggctgacaaacatgttgcagtagaggaagaagataccaagatgtgctttgtcattgaaagcataatgtcgcaagttcaaagataaaatgcaaacacgcgattcagttctgtta

SEQ ID NO: 119658 - DNA, 1962 bp, Zea Mays
aacatagcataaaaccctcgattcgaaggatccaaccgctagggttttaggcctttcctcaccgtcggcggctcggcgccatgtatgggaactccggcgaagcacccccgtgccgtcccacgccacttacaggccgcaatctccaccgtctccaccgcgcagatactccgctcttccggctactccgccgctgaacctgccgcgctccgcgccctctccgacatcgctggccgctacatcgcgtccctgggccacgccgccgcagctttcgccgaggcccgcggccgcacggagcccaacgtcaccgacgccgtcctcgcgctcgaggatcacgcgctcggcggcttccccggcgcggccgaccccacgcggccgttgctctgttccggcgcgctcgcggagctcgcccagttcgtcgctgcggtgagggaggtcccgttcccgaagcccctgccgaggagggatccgggttgcggctccgtcgacgggtgggagagcttcgcggcggcggggaggcagccgccgctgaaccacgttccacattggcttccctgcttcccggaggggtgggaggaacggttgcgcgttcgctgccaggtggcagcggatgacgagaaggacacagggcaagtggtaacggtgatggacggtaatggcaagagaggcgtgccggagaatagggagaagctgtcgttcagcttgggacaaaagcggcagcgtgtgaaaccatcccacaagcacggtggtgcctttgagcggttcacagaacaaggagaaaattctctatccatagaatgtatctcttcagcttcaaatttagtcattggtccatagaatgcaccctcttcagcttaaaattaagttagtggccccttggcatggaaaaactctgaagcactagagcaataagctatactccttctgtagttctgtgttggcctttaggtctgaaactgttacacacatgcatatttaattgaagctttcaagttaatctcttcaaatcgtgccttatttttgttaattaacttctgttcaaatttcaggcattcacaagacaaaaccagcacaatttgtttcccgtggatggctaaatctatcagaagttcttgacatggatcaataagtgatgccactaacaacacttattgttgttgcagaatgactccaatttgctcctattccagtaatttagcttagattcgttcccaacaaattgcgtggcaagggaacaaatggggtctcagatcacaattatggattcaattctgctgctggagttctaaaaggtgttgggaccttctgtatggactatcagactgcagtatttgagaagatctagagcatcgtctattggtgcaacatcacattctatcagaagtgaaccttacaggtgataggtgtactgcagttcataatgttgtgctgtctccatgatcgccgcttgatttggagttcccaaaaacaaatcacatgtacaagggagtatttgcaaggccttctggacaccctcgtattggcaagtaattgaatggctcttgctttgctggcagttacttggaactctgtacctattgcagagcttcagggagagatcacaaagactgccttgtttggctgtctggtcaaggcagtgctgcctgaccagacagcaacccagcccgtcgattttctgcccctggtctgggggacgctgccgggctgacaaacatgttgcagtagaggaagaagataccaagatgtgctttgtcattgaaagcataatgtcgcaagttcaaagataaaatgcaaacacgcgattcagttctgttacctctctaccttagtattcgaaagccttctcccactgttcaaatttgtaatgttataccccagtagggaaaacctggcaaaacagctaacataagttaaaactgtaaataatacttcatgctaaaaaacgggcagaaggtattgcacaga

SEQ ID NO: 119659 - DNA, 555 bp, Zea Mays
atgggggcgtcggctgccggccgtcagggccaacaggataagcaaggggtagaagggcaaggtcagtctgacgtgctacatgaggagcaagcgatcgaggctgcgacgcgtccggtgacatccaggtggacaggaaccgctctttcatctacgtcagcaggatatatagaaagggagtggaggaccaggccgtacgcatgctaccacgaccccgtggccatggcccatgtccacgagtacaccctcaagccgctctcggagccggcggtggcgcctgtatgcaccaggagtcaggacgcaccagttctgggggcgggtgcagctcttgctcagcgggatgaaggtgtgctgggtgggcaagctccactcttttcttccagcgacatggacaatgaccaagaggtgcactgcttccagcagatcgtggtcggcgccaccttacacagggacatgggcgtggacccacgccgctcgccgagccacctgaactcttcgtcacatgctacatatttgtggaagcttcaacttatgctacagcttatattcaatcactag

SEQ ID NO: 119660 - DNA, 861 bp, Zea Mays
tctaagaaagaaagtagcaatgagcttgactacaagcaaagaagatatagtatgtcctggtacagcccccattctctcaggcaccgtaacttccataaaagaaagagccaagtatcccgcatagatcacaaataacaataacatgtaatcttggatgaaaaacagcacaaggctcgggtagaaaaactagaacaaaacaagggacttgtgatcgtacacgcttgcgtcttcccggccgaggagcttgaccggcgtaccggacctcggcgacatgatctgcgatggtgggagctcctgggggcccaggatcctgccgggccaccaggacccattcctccgccgcacccacacgatggtcccgggcgaggtgtccccgacgccgcagcagcctccatctccgtccgctcctccctccaccgagctccccaccatcccgcttccaccaaaccctaaccgcagggcggccggcccgcgcgcctcacccagcttcgagaagctcccctccccctcgagatctggctaccattcaaatcccggagggtgccggcacccagaggcgcatcccccacggcgccggccccgcgcggcttattccaccgagatcactctggcaacggcgcgctcgccctcgcctcaggcagcttctagaagcttcttcccagaggctccaagagccccccgttatccttcttctgctggctgccgctgccgctgctcccctccctccgcccacgccggcgcggggacaggggctccacggagtctccggctcgctgccggtgaagtggtcggttccggcgcgggcggccctgcaatattgtttccctctcttttttgtgaggaaaaaatgtgaaatgaaaa

SEQ ID NO: 119661 - DNA, 1124 bp, Zea Mays
actagccgttggtcctgcggtgcggcgggcgttccggcttcgctcttgcctcttgctacaaataaccattcacggccgatccctaaaccccacaaagcaaagcagcctctctctctctgtctctctctctcgcctccctctcgcctccctctcgacgacgatctcaggcgctcgcggggagtcgagtcgagaccagcttcgttccttcataaaaagctcacttagttgttgtccccgcctctttttttcgctgttcttgtttgattacatcatcttattttgtgcttgaatctaacctgccattaagtttttatcgcttcgttatttctctgttgtgcttgtcttgttcttttgttgctctaaccatggacgcaggctcccgctcgatctcctcggcgaagaaccgcgccgccgccgtcgccgccgcgccccggccaccgctgcaggaggcgggctcccgcccctacatgccatcgctgagctcgggaccccgcaacccgtcggccaagtgctacggcgacaggttcatcccggacaggtcggcgatggacatggacttggcgcactacttgcttactgagcccaggagggacaaggagaacgcgtcgggcatggcggcgtccccgtccaaggaggcgtaccggaggctgctcgcggagaagctgctcaacaaccggacacggatcctcgctttcaggagcaagccgccggagcccgagaacgtttcttttgcggacacgacttcctccaacctgcaggccaagccggccaaacagcggcgccacattccccagtctgccgagaggaccctagacgcaccagagctagttgacgactactacctcaacttgcttgactggggaagcaacaacgtgctatccattgctttgggagacacggtgtacctgtgggatgcatcgagcggatccacatccgagcttgtgaccgtcggcgaggacagtggtcctgttacaagcgttagctgggctcctgatggtcggcacatggccgtcgggctcaactcgtctgacgtccagctctgggacaccagctccaaccgactggtacgcacattgtgatgtttcatctaaaaattccagtgcaggttatctgttgctgaatta

SEQ ID NO: 119662 - DNA, 2071 bp, Zea Mays
actagccgttggtcctgcggtgcggcgggcgttccggcttcgctcttgcctcttgctacaaataaccattcacggccgatccctaaaccccacaaagcaaagcagcctctctctctctgtctctctctctcgcctccctctcgcctccctctcgacgacgatctcaggcgctcgcggggagtcgagtcgagaccagcttcgttccttcataaaaagctcacttagttgttgtccccgcctctttttttcgctgttcttgtttgattacatcatcttattttgtgcttgaatctaacctgccattaagtttttatcgcttcgttatttctctgttgtgcttgtcttgttcttttgttgctctaaccatggacgcaggctcccgctcgatctcctcggcgaagaaccgcgccgccgccgtcgccgccgcgccccggccaccgctgcaggaggcgggctcccgcccctacatgccatcgctgagctcgggaccccgcaacccgtcggccaagtgctacggcgacaggttcatcccggacaggtcggcgatggacatggacttggcgcactacttgcttactgagcccaggagggacaaggagaacgcgtcgggcatggcggcgtccccgtccaaggaggcgtaccggaggctgctcgcggagaagctgctcaacaaccggacacggatcctcgctttcaggagcaagccgccggagcccgagaacgtttcttttgcggacacgacttcctccaacctgcaggccaagccggccaaacagcggcgccacattccccagtctgccgagaggaccctagacgcaccagagctagttgacgactactacctcaacttgcttgactggggaagcaacaacgtgctatccattgctttgggagacacggtgtacctgtgggatgcatcgagcggatccacatccgagcttgtgaccgtcggcgaggacagtggtcctgttacaagcgttagctgggctcctgatggtcggcacatggccgtcgggctcaactcgtctgacgtccagctctgggacaccagctccaaccgactgttgagaacactcagaggtgcgcatgaggcaagggtaggctcgctggcatggaacaacagcgtcttgaccaccggttgcatggacggcaagatcgtgaacaatgacgtaaggattagagaccacgtcgtgcagaggtacgaggggcacagccaggaggtctgcgggctcaagtggtccggatcagggcagcagctggccagcggaggcaacgacaaccttctgcacatttgggatgtgtcgatggcatcatccatgccatctgctggccgcaaccagtggctgcataggctcgaggaccacatggccgccgtgaaggcactcgcgtggtgcccgttccagagcaacttgctggccaccggcggcggtggcagcgaccgctgcatcaagttctggaacacgcacaccggtgtgtgcctgaactcggttgataccggatcacaggtgtgcgctctgctgtggaacaagaacgagagggagctgctgagctcacatggattcacacagaaccaactcaccttgtggaagtacccatcgatggtgaagatggctgaacttaatggccatacctctcgcgtcctcttcatggctcagagtcctgatggatgcacagtagcgtcggctgctgctgacgagaccctccggttctggaacgtttttggaacccctgaaacgcccaagcctgcagccaaagcttcccacactgggatgttcaacagcttcaaacatatccgataggatgagtcaagactattattggatattgtctatacttgacttgatgatggcctgtcgttttcggaaggtcagaaatcaatgacacagggtttgcttcagaaatcagatgtaatgttttttcctcatttttggttggaacatcaagggcgcttgtttgatgtaccaattattgtaaatcaagacagcaatatatataaattgatattttgtcggttggatttggaaattgttgtaaatcggcaaccgtttgtttcaacatcaagagcacttgt

SEQ ID NO: 119663 - DNA, 96 bp, Zea Mays
ttcgtggcgagcgctgggttgccgaccctgactccccacctcggtctcggtgcacagcacaagacgcccgcgagaagagcatcttggcatgcgcgc

SEQ ID NO: 119664 - DNA, 2620 bp, Zea Mays
gcagacagacaggcagaggcaggcaggcaaggccaagagcccaagacggtcggggcggagcgcgagaggcaggcgacgcgaggagaggaggcggtgctgtggtggcctcacctgccctgccatgattataaaaaataacggagcgcgacgcgggtagaaaccggaaggcccgccgctgcccgccccttcttccttcccgtcccacacacgccgccgccgccgccgccgccgctcgcttcctccaccccccggtccgcgcggcgcgggctgcctgcgcgaccagggaggcagggcacgcggcaaccacgtggggaggcgacgacaccacaccaccctatgctctctgtcctcgcccgcagggtaagattgcagcagcagtgaatttgggagcttgaagcgttcatccgagacatggaaaaagtgatctgccgggcatatctccttcaatgcaagcgattcttttcgaaagaaactcttgattggtgtgtcttagcccgtgggaacacccatctctcctctctggtgaactacacatagtggttatatgctcctctatgctccacaacaagcaggctgatgcgatattttcctgaagttattatattccagtctatgccagacatctacatggttaatatatttgccatcttcagcctacatctgttgctgccctaattagttgatttgtcttctgtgtactatctgaggcaagatattgatcagctagaacttggcaaacccttgcctttcgtgtctgttcatatttctcgtggcttggttattctgaagggtaaaacttgcacaaggcagctttgatattacaacaatggatagattcaagttgattaaggaagttggcgatgggacttttgggagtgtatggcgtgctatgaataaacagaatggcgaagttgttgctgttaagaaaatgaagaaaaaatattattcttttgaggaatgtatgagtctacgtgaagtaaagtctttgcggcgcatgaatcatcctaacattgtgaagctcaaagaggttatcagggaaaatgatatattatacttcataatggaatacatggagtgtaatctctatcaacttatgaaagaaagggtcaagcctttctccgagtctgaagtccgcaactggtgttttcagatatttcaggctcttgcatacatgcaccagaggggctactttcatcgtgacctcaaacctgagaatctgttggttagcaaaggtgtcataaagctagcagactttggtcttgcaagggaagtctcatcattgccaccatatacagaatatgtctcaactcgctggtatcgggcaccagaagtcttgctccagtcatctgcttatgattctgcagttgatatgtgggcaatgggtgccataatggctgagctgttgacactccatcctctctttcctggaaccagtgaaccagatgagattcacaagatatgcaatgtcatcggtagtccagatgagcaatcttggcctcaaggattgtctcttgcagaagcaatgaagtatcagttcccacagaccaaaggcagtcaattgtctgaggtgatgacaacagctagtagcgaggcaattgacctcatctcatcactatgctcatgggatcctagcaagagaccaaaggccacagaagtcctccagcataccttcttccagggttgtacatgtgttccgcttcctgtccgtcggaaagcttcatcgcttcctaaaacacctccatgtgttggatcaaagagaatttccgagaacagtgttgctagaagattctcgaccgggactctatctacgatgaaatctcatagcaatgcacctgcaaaatcaaacggtttatctaggactggtgtacaaagaaaacttcacttggatcgtcagccaccgcagaagagtacaaaaccgaccgagaacagcaataagctagctacaaatcgggtcccagcccggaacagcccagggaatcctgtacttaggcattcacgcagcttgcctgaaactggtcgacgagcagtacagaaggtctcatcaatcacagagaaactgtcgcaaatgtcggtgacctccagaacacgaagcgccgtgaagcctgccgccccgacgatgaaggccggacatggcaagtcagacttcctggggaagtctgacgatatccctccggcaaagaggctgacgagaaaattggtcagctaaacaagggtacgtagagtgaaaatccgatcatctgcaggagggtggagggatatggtgtatagtgtgcaggaaccagtgtgccgaagagaggctagctcatcctgagcgtttgcctgtcgatggtcgcgcggatttgccatcgccacagttttgctgcatcgagtcatcttaggaatggctttgcaaactcctttgtggagtgctagagcctgcttcgagccttaaccctcttcctggccttcgatctgccttttgcctgcgtcaactttgcccccatgttttaataaacatgatgtgtgctattaattttgtcttgttcatatcttgctgggatggacgtttcatgtttggtttgaatgtacaggtacagtgcacaggtgagaacaccgtaaaatgccaatttcacgtactgta

SEQ ID NO: 119665 - DNA, 2615 bp, Zea Mays
gcagacagacaggcagaggcaggcaggcaaggccaagagcccaagacggtcggggcggagcgcgagaggcaggcgacgcgaggagaggaggcggtgctgtggtggcctcacctgccctgccatgattataaaaaataacggagcgcgacgcgggtagaaaccggaaggcccgccgctgcccgccccttcttccttcccgtcccacacacgccgccgccgccgccgccgccgctcgcttcctccaccccccggtccgcgcggcgcgggctgcctgcgcgaccagggaggcagggcacgcggcaaccacgtggggaggcgacgacaccacaccaccctatgctctctgtcctcgcccgcaggattgcagcagcagtgaatttgggagcttgaagcgttcatccgagacatggaaaaagtgatctgccgggcatatctccttcaatgcaagcgattcttttcgaaagaaactcttgattggtgtgtcttagcccgtgggaacacccatctctcctctctggtgaactacacatagtggttatatgctcctctatgctccacaacaagcaggctgatgcgatattttcctgaagttattatattccagtctatgccagacatctacatggttaatatatttgccatcttcagcctacatctgttgctgccctaattagttgatttgtcttctgtgtactatctgaggcaagatattgatcagctagaacttggcaaacccttgcctttcgtgtctgttcatatttctcgtggcttggttattctgaagggtaaaacttgcacaaggcagctttgatattacaacaatggatagattcaagttgattaaggaagttggcgatgggacttttgggagtgtatggcgtgctatgaataaacagaatggcgaagttgttgctgttaagaaaatgaagaaaaaatattattcttttgaggaatgtatgagtctacgtgaagtaaagtctttgcggcgcatgaatcatcctaacattgtgaagctcaaagaggttatcagggaaaatgatatattatacttcataatggaatacatggagtgtaatctctatcaacttatgaaagaaagggtcaagcctttctccgagtctgaagtccgcaactggtgttttcagatatttcaggctcttgcatacatgcaccagaggggctactttcatcgtgacctcaaacctgagaatctgttggttagcaaaggtgtcataaagctagcagactttggtcttgcaagggaagtctcatcattgccaccatatacagaatatgtctcaactcgctggtatcgggcaccagaagtcttgctccagtcatctgcttatgattctgcagttgatatgtgggcaatgggtgccataatggctgagctgttgacactccatcctctctttcctggaaccagtgaaccagatgagattcacaagatatgcaatgtcatcggtagtccagatgagcaatcttggcctcaaggattgtctcttgcagaagcaatgaagtatcagttcccacagaccaaaggcagtcaattgtctgaggtgatgacaacagctagtagcgaggcaattgacctcatctcatcactatgctcatgggatcctagcaagagaccaaaggccacagaagtcctccagcataccttcttccagggttgtacatgtgttccgcttcctgtccgtcggaaagcttcatcgcttcctaaaacacctccatgtgttggatcaaagagaatttccgagaacagtgttgctagaagattctcgaccgggactctatctacgatgaaatctcatagcaatgcacctgcaaaatcaaacggtttatctaggactggtgtacaaagaaaacttcacttggatcgtcagccaccgcagaagagtacaaaaccgaccgagaacagcaataagctagctacaaatcgggtcccagcccggaacagcccagggaatcctgtacttaggcattcacgcagcttgcctgaaactggtcgacgagcagtacagaaggtctcatcaatcacagagaaactgtcgcaaatgtcggtgacctccagaacacgaagcgccgtgaagcctgccgccccgacgatgaaggccggacatggcaagtcagacttcctggggaagtctgacgatatccctccggcaaagaggctgacgagaaaattggtcagctaaacaagggtacgtagagtgaaaatccgatcatctgcaggagggtggagggatatggtgtatagtgtgcaggaaccagtgtgccgaagagaggctagctcatcctgagcgtttgcctgtcgatggtcgcgcggatttgccatcgccacagttttgctgcatcgagtcatcttaggaatggctttgcaaactcctttgtggagtgctagagcctgcttcgagccttaaccctcttcctggccttcgatctgccttttgcctgcgtcaactttgcccccatgttttaataaacatgatgtgtgctattaattttgtcttgttcatatcttgctgggatggacgtttcatgtttggtttgaatgtacaggtacagtgcacaggtgagaacaccgtaaaatgccaatttcacgtactgta

SEQ ID NO: 119666 - DNA, 2638 bp, Zea Mays
gcagacagacaggcagaggcaggcaggcaaggccaagagcccaagacggtcggggcggagcgcgagaggcaggcgacgcgaggagaggaggcggtgctgtggtggcctcacctgccctgccatgattataaaaaataacggagcgcgacgcgggtagaaaccggaaggcccgccgctgcccgccccttcttccttcccgtcccacacacgccgccgccgccgccgccgccgctcgcttcctccaccccccggtccgcgcggcgcgggctgcctgcgcgaccagggaggcagggcacgcggcaaccacgtggggaggcgacgacaccacaccaccctatgctctctgtcctcgcccgcagggtaagcagcagtgaatttgggagcttgaagcgttcatccgagacatggaaaaagtgatctgccgggcatatctccttcaatgcaagcgattcttttcgaaagaaactcttgattggtgtgtcttagcccgtgggaacacccatctctcctctctggtgaactacacatagtggttatatgctcctctatgctccacaacaagcaggctgatgcgatattttcctgaagttattatattccagtctatgccagacatctacatgtagatgatgctcatataagggggggttaatatatttgccatcttcagcctacatctgttgctgccctaattagttgatttgtcttctgtgtactatctgaggcaagatattgatcagctagaacttggcaaacccttgcctttcgtgtctgttcatatttctcgtggcttggttattctgaagggtaaaacttgcacaaggcagctttgatattacaacaatggatagattcaagttgattaaggaagttggcgatgggacttttgggagtgtatggcgtgctatgaataaacagaatggcgaagttgttgctgttaagaaaatgaagaaaaaatattattcttttgaggaatgtatgagtctacgtgaagtaaagtctttgcggcgcatgaatcatcctaacattgtgaagctcaaagaggttatcagggaaaatgatatattatacttcataatggaatacatggagtgtaatctctatcaacttatgaaagaaagggtcaagcctttctccgagtctgaagtccgcaactggtgttttcagatatttcaggctcttgcatacatgcaccagaggggctactttcatcgtgacctcaaacctgagaatctgttggttagcaaaggtgtcataaagctagcagactttggtcttgcaagggaagtctcatcattgccaccatatacagaatatgtctcaactcgctggtatcgggcaccagaagtcttgctccagtcatctgcttatgattctgcagttgatatgtgggcaatgggtgccataatggctgagctgttgacactccatcctctctttcctggaaccagtgaaccagatgagattcacaagatatgcaatgtcatcggtagtccagatgagcaatcttggcctcaaggattgtctcttgcagaagcaatgaagtatcagttcccacagaccaaaggcagtcaattgtctgaggtgatgacaacagctagtagcgaggcaattgacctcatctcatcactatgctcatgggatcctagcaagagaccaaaggccacagaagtcctccagcataccttcttccagggttgtacatgtgttccgcttcctgtccgtcggaaagcttcatcgcttcctaaaacacctccatgtgttggatcaaagagaatttccgagaacagtgttgctagaagattctcgaccgggactctatctacgatgaaatctcatagcaatgcacctgcaaaatcaaacggtttatctaggactggtgtacaaagaaaacttcacttggatcgtcagccaccgcagaagagtacaaaaccgaccgagaacagcaataagctagctacaaatcgggtcccagcccggaacagcccagggaatcctgtacttaggcattcacgcagcttgcctgaaactggtcgacgagcagtacagaaggtctcatcaatcacagagaaactgtcgcaaatgtcggtgacctccagaacacgaagcgccgtgaagcctgccgccccgacgatgaaggccggacatggcaagtcagacttcctggggaagtctgacgatatccctccggcaaagaggctgacgagaaaattggtcagctaaacaagggtacgtagagtgaaaatccgatcatctgcaggagggtggagggatatggtgtatagtgtgcaggaaccagtgtgccgaagagaggctagctcatcctgagcgtttgcctgtcgatggtcgcgcggatttgccatcgccacagttttgctgcatcgagtcatcttaggaatggctttgcaaactcctttgtggagtgctagagcctgcttcgagccttaaccctcttcctggccttcgatctgccttttgcctgcgtcaactttgcccccatgttttaataaacatgatgtgtgctattaattttgtcttgttcatatcttgctgggatggacgtttcatgtttggtttgaatgtacaggtacagtgcacaggtgagaacaccgtaaaatgccaatttcacgtactgtat

SEQ ID NO: 119667 - DNA, 329 bp, Zea Mays
ccaggggtgttacaggggcgcgaacgccctaacgtgggtcggggcgggcggcgagcagaggcgccggttgctagcttggattctgacttagaggcgttcagtcataatccggcacacggtagcttcgcgccactggcttttcatccaagcgcgatgaccaattgtgtgaatcaacggttcctctcgtactaggttgaattactatcgcggcgcggtcatcagtagggtaaaactaacctgtctcacgacggtctaaacccagctcacgttccctatggtgggtgaacaatccaacactggtgaaacgaatcaagctgattcatgagaag

SEQ ID NO: 119668 - DNA, 1365 bp, Zea Mays
gtttcggccatcggccgttgcttgccacgcctgccagccggcaagtccacacatgacacaacccctctcgtacgcgtagcgcgaccccggtccactccgacggcccgcaccacccttctttaaccccgccacccagatccagccgcgccgcactccaccacggcccccacaactccaccgctagcagcagccaacagactcccgtcgggatggccgtggcgctcctcctcctgctggtgacgcccgtcgggctgctcgccgcgctcgcgctcctcacgcggccccgggccgcgcgggtcccgctcaaaggccgccacgtcttcatcacgggcgggtccagcggcatcgggctcgccatggccacggccgcggcgcgggagggcgcgcgggtctccatcctggcccgcaacctcgcccgcctcgaggacgcgcgcgccgccatccagcgcgactcgggcagggacgacgtcggcgtccacgcggccgacgtgcgggacgccggcgccgtcgcgcgcgcgctccaggaggccggccccgtcgacgtcctcgtctgcaaccacggcgtgttcgtgccgcaggagctcgaggggcaggacgtggatgagatcaagtggatggtggacatcaacctcatgggcagcttccacctcatcaaggccgcgcttccggccatgaaggcgcgcacccgcgagacgcgcctccctggctccatcgccatcatgtcctcccaggccggccagcgagcaagttcgctcttcgcggattgggtgaggcgttgcagcatgaggtcatcgcggacaacattcatgtctcgttgatattccctcctgacaccgagactccaggattggaagaggagcataagaggaggccggaattgacaaacatcatagcagggtcatccggtggaatgaaggccgacgatgttgccaagaaggctctggacggcatcaaatccgcaaaattcattgtcccctgtaatttcgagggcgcaatgttagccgtagccaccgctggtttatccccgcagagctccccgttaatggcattcctagaagtggttggcgctggactcatgcggtttgcggcaatttgtttccagtggaattggttctccaccatcgagagctattatgccaagaaaaagaagagcgagtgatagcacaaaccacagctggacattattttcctagatcccgtgagagtcaaaagaaacaaataagtcacgtctgacctaatgtaaatgtagcgtggtagtattagagaagttgaagctatcttctttttaatggtttttttcatcagatcatgtctacaatatcagattctgttaaaaacaatggttcgtgagattttgatgacata

SEQ ID NO: 119669 - DNA, 1590 bp, Zea Mays
gtttcggccatcggccgttgcttgccacgcctgccagccggcaagtccacacatgacacaacccctctcgtacgcgtagcgcgaccgcgaacgccctaggatacgagcgcatcgatcacgaccagacagaccttcggctgccctgaaagagccggtccactccgacggcccgcaccacccttctttaaccccgccacccagatccagccgcgccgcactccaccacggcccccacaactccaccgctagcagcagccaacagactcccgtcgggatggccgtggcgctcctcctcctgctggtgacgcccgtcgggctgctcgccgcgctcgcgctcctcacgcggccccgggccgcgcgggtcccgctcaaaggccgccacgtcttcatcacgggcgggtccagcggcatcgggctcgccatggccacggccgcggcgcgggagggcgcgcgggtctccatcctggcccgcaacctcgcccgcctcgaggacgcgcgcgccgccatccagcgcgactcgggcagggacgacgtcggcgtccacgcggccgacgtgcgggacgccggcgccgtcgcgcgcgcgctccaggaggccggccccgtcgacgtcctcgtctgcaaccacggcgtgttcgtgccgcaggagctcgaggggcaggacgtggatgagatcaagtggatggtggacatcaacctcatgggcagcttccacctcatcaaggccgcgcttccggccatgaaggcgcgcacccgcgagacgcgcctccctggctccatcgccatcatgtcctcccaggccggccaggtagacacccggcgtccgtcgcctgccatgcagcgaaggtgttcgatgtaatgctgctcgctgggggggggggggggggggggattgatctttttgttggtgatgtctctgctgcaggttggtatttatggttacactgcctactcagcgagcaagttcgctcttcgcggattgggtgaggcgttgcagcatgaggtcatcgcggacaacattcatgtctcgttgatattccctcctgacaccgagactccaggattggaagaggagcataagaggaggccggaattgacaaacatcatagcagggtcatccggtggaatgaaggccgacgatgttgccaagaaggctctggacggcatcaaatccgcaaaattcattgtcccctgtaatttcgagggcgcaatgttagccgtagccaccgctggtttatccccgcagagctccccgttaatggcattcctagaagtggttggcgctggactcatgcggtttgcggcaatttgtttccagtggaattggttctccaccatcgagagctattatgccaagaaaaagaagagcgagtgatagcacaaaccacagctggacattattttcctagatcccgtgagagtcaaaagaaacaaataagtcacgtctgacctaatgtaaatgtagcgtggtagtattagagaagttgaagctatcttctttttaatggtttttttcatcagatcatgtctacaatatcagattctgttaaaaacaatggttcgtgagattttgatgacatatgtgtggagctc

SEQ ID NO: 119670 - DNA, 1369 bp, Zea Mays
gcgcatcgatcacgaccagacagaccttcggctgccctgaaagagccggtccactccgacggcccgcaccacccttctttaaccccgccacccagatccagccgcgccgcactccaccacggcccccacaactccaccgctagcagcagccaacagactcccgtcgggatggccgtggcgctcctcctcctgctggtgacgcccgtcgggctgctcgccgcgctcgcgctcctcacgcggccccgggccgcgcgggtcccgctcaaaggccgccacgtcttcatcacgggcgggtccagcggcatcgggctcgccatggccacggccgcggcgcgggagggcgcgcgggtctccatcctggcccgcaacctcgcccgcctcgaggacgcgcgcgccgccatccagcgcgactcgggcagggacgacgtcggcgtccacgcggccgacgtgcgggacgccggcgccgtcgcgcgcgcgctccaggaggccggccccgtcgacgtcctcgtctgcaaccacggcgtgttcgtgccgcaggagctcgaggggcaggacgtggatgagatcaagtggatggtggacatcaacctcatgggcagcttccacctcatcaaggccgcgcttccggccatgaaggcgcgcacccgcgagacgcgcctccctggctccatcgccatcatgtcctcccaggccggccaggttggtatttatggttacactgcctactcagcgagcaagttcgctcttcgcggattgggtgaggcgttgcagcatgaggtcatcgcggacaacattcatgtctcgttgatattccctcctgacaccgagactccaggattggaagaggagcataagaggaggccggaattgacaaacatcatagcagggtcatccggtggaatgaaggccgacgatgttgccaagaaggctctggacggcatcaaatccgcaaaattcattgtcccctgtaatttcgagggcgcaatgttagccgtagccaccgctggtttatccccgcagagctccccgttaatggcattcctagaagtggttggcgctggactcatgcggtttgcggcaatttgtttccagtggaattggttctccaccatcgagagctattatgccaagaaaaagaagagcgagtgatagcacaaaccacagctggacattattttcctagatcccgtgagagtcaaaagaaacaaataagtcacgtctgacctaatgtaaatgtagcgtggtagtattagagaagttgaagctatcttctttttaatggtttttttcatcagatcatgtctacaatatcagattctgttaaaaacaatggttcgtgagattttgatgacatatgtgtggagctctc

SEQ ID NO: 119671 - DNA, 195 bp, Zea Mays
atgctgatctgatccataagggacctccggacgtgtcccggcggcgtctctgttatgccggccaagtacacgtcggaggagaggtcgaacttcagtgaggccatgggggtgttgggcctcttgaccaggtcatcctccagcagtatctccgccacgcgcgacagtatgctgaatgctaccccgacaagaacccta

SEQ ID NO: 119672 - DNA, 239 bp, Zea Mays
gggagagagagagagagagagagagagagagagagagagagagagagagagagagagagagagagagagagagagagagagagagagagagagagagagagagagagagagcacgctgctcgctgctcgccgctcgccgcaggggggagcagtagcgcaggcaagggaaagggatggaagctggaactggaaggggaaggaccgaaggagtggatgggactcgggagtgcgtgtggtcg

SEQ ID NO: 119673 - DNA, 2029 bp, Zea Mays
caccccagtccccacctcttctcttcctcctcgtccgccgttgctgtctgtctgcctcctcctccgccgcctagctgcttacctgcttccaccgcaacaagcagagtgcgagcaaagacagaaaaccatgggcgccctgttgctcttcgccgtctgcctgctggcgccgatcgtgctggcctgcgccgtccgtggcaggaagcggcgggccgccgcgccggcgccggcgccggcgtgcggcaagaaggcgctgccgctaccgccggggtcgatggggtggccgtacgtgggcgagacgctgcagctctactcgtccaagaaccccaacgtgttcttcgcccggaagcagaaccggtacgggccgatcttcaggacccacatcctgggctgcccctgcgtgatggtgtccagccccgaggcggcgcgcttcgtgctcgtcacgcaggctcacctcttcaagcccaccttcccggcgagcaaggagcgcatgctgggcccgcaggccatcttcttccagcagggcgactaccacgcccgcctccgccgcctcgtctcccgggctttctccccccaggccatccgcgcctccgtgccggctgtcgaggccgtcgcgctgcgctcgctccgctcctgggacggccgcctcgtcaacaccttccaagagatgaagctgtacgcgctgaatgtggcattgctgtccatcttcggcgaggaggagatgcggtacatcgaggagctgaagcagtgctacctgacgctggagaaggggtacaactcgatgccggtgaacctgccgggcaccctgttccacaaggccatgaaggcccgcaagcggctgagcgccatcgtggcccacatcatcgaggcccggcgcgagcggccgcggccgcgcgggagcgacctcctggcctccttcctggacggccgcgaggcgctcaccgacgcccagatctccgacaacgtgatcggcgtcatgttcgccgcccgcgacaccaccgccagcgtgctcacctggatggtcaagttcctcggcgaccacccggcggtcctcaaggcggtcatcgaggagcagcaggagatcgctcggtccaagggctcctccggcgacgaacccctgacgtgggcggacaccaggcggatgcgcgtgacgagccgtgcgatccaggagacgatgcgggtggcgtccatcctgtccttcaccttccgggaggccgtggaggacgtggagtaccaagggtacctgatccccaagggctggaaggtgttgcccctgttccggaacatccaccacagccccgaccacttcccctgcccggacaagttcgacccctcccgattcgaggtcagtctctctctgcccctgcttcgccacgttctcatgtggaaaggggggaactgactgactgactgactgatcgaatgggctgccggcctcgcctctgaatctctctgatgcaggttgctcccaagcccaacacgttcatgccgttcggcaacgggacccactcgtgcccggggaacgagctcgccaagctggagatgctcgtgctcttccaccacctcgtcaccaaatacaggtggtccacctccaagtccgagagcggcgtgcagttcggccccttcgcgctgccgctcaacggcctgcccatgaccttcgctcgcaaggactgatcgaggagccactgcacggccatggatggtggtatatgctagcactacactactagtaatacccaggaacgcgaaaaaccgcttcccggcagcgttgcggcggcggccatcggacgggacagggaaggtgacggtgacgggcatcaggcgagcgggcatgggccatgggatcgatgatcagagaaagaaagattacgcagctccttgtacagattcttcctcagctagtagggccggatcccaagaagccggaagaggagaccaaacacaaaattaggcatagccgcttaggtgctactcactctaagctactagtactccagtaggcaagcatcagatcacccagctgcgctacaaa

SEQ ID NO: 119674 - DNA, 2251 bp, Zea Mays
caccccagtccccacctcttctcttcctcctcgtccgccgttgctgtctgtctgcctcctcctccgccgcctagctgcttacctgcttccaccgcaacaagcagagtgcgagcaaagacagaaaaccatgggcgccctgttgctcttcgccgtctgcctgctggcgccgatcgtgctggcctgcgccgtccgtggcaggaagcggcgggccgccgcgccggcgccggcgccggcgtgcggcaagaaggcgctgccgctaccgccggggtcgatggggtggccgtacgtgggcgagacgctgcagctctactcgtccaagaaccccaacgtgttcttcgcccggaagcagaaccggtacgggccgatcttcaggacccacatcctgggctgcccctgcgtgatggtgtccagccccgaggcggcgcgcttcgtgctcgtcacgcaggctcacctcttcaagcccaccttcccggcgagcaaggagcgcatgctgggcccgcaggccatcttcttccagcagggcgactaccacgcccgcctccgccgcctcgtctcccgggctttctccccccaggccatccgcgcctccgtgccggctgtcgaggccgtcgcgctgcgctcgctccgctcctgggacggccgcctcgtcaacaccttccaagagatgaagctgtacgcgctgaatgtggcattgctgtccatcttcggcgaggaggagatgcggtacatcgaggagctgaagcagtgctacctgacgctggagaaggggtacaactcgatgccggtgaacctgccgggcaccctgttccacaaggccatgaaggcccgcaagcggctgagcgccatcgtggcccacatcatcgaggcccggcgcgagcggccgcggccgcgcgggagcgacctcctggcctccttcctggacggccgcgaggcgctcaccgacgcccagatctccgacaacgtgatcggcgtcatgttcgccgcccgcgacaccaccgccagcgtgctcacctggatggtcaagttcctcggcgaccacccggcggtcctcaaggcggtcatcgaggagcagcaggagatcgctcggtccaagggctcctccggcgacgaacccctgacgtgggcggacaccaggcggatgcgcgtgacgagccgtgcgatccaggagacgatgcgggtggcgtccatcctgtccttcaccttccgggaggccgtggaggacgtggagtaccaagggtacctgatccccaagggctggaaggtgttgcccctgttccggaacatccaccacagccccgaccacttcccctgcccggacaagttcgacccctcccgattcgaggttgctcccaagcccaacacgttcatgccgttcggcaacgggacccactcgtgcccggggaacgagctcgccaagctggagatgctcgtgctcttccaccacctcgtcaccaaatacaggtggtccacctccaagtccgagagcggcgtgcagttcggccccttcgcgctgccgctcaacggcctgcccatgaccttcgctcgcaaggactgatcgaggagccactgcacggccatggatggtggtatatgctagcactacactactagtaatacccaggaacgcgaaaaaccgcttcccggcagcgttgcggcggcggccatcggacgggacagggaaggtgacggtgacgggcatcaggcgagcgggcatgggccatgggatcgatgatcagagaaagaaagattacgcagctccttgtacagattcttcctcagctagtagggccggatcccaagaagccggaagaggagaccaaacacaaaattaggcatagccgcttaggtgctactcactctaagctactagtactccagtaggcaagcatcagatcacccagctgcgctacaaacaagtggcgtttaattgtaaaaccaaaccattttttttctctatcttcttcttcttctttttccctcccctttagattttttttataagccagccagatagtggcacccataggagagaagaacacaaggaaaccataaaagaaagagagggaggccctgattgggattctaattgtaagctagctaggttgcccacctgaaagcaggctggcagctaggtcgagtaacccacggatggatggattggaatggaatggatgtatcgccggagtcaaacgggaaccacgtcgtcgtcttcccgcagctcttgcgtttgtttcgtccaacgcaaaagaca

SEQ ID NO: 119675 - DNA, 1044 bp, Zea Mays
atggaagttgtggagtccaaggacagaaggatctcagttgccttagcatttgctggtcatcaagaaggtgatgttgttgtctcctcactcactaaactctctacttgtctcatcaccatttcactgcatggcatggcattcaactttcaaataatacaatttatgcattcaagtatatggaacaatctgaaatcaccaaatgtgaacagagatagatataatgatggtagcaccaaacattcactcttgaagcagtcatcattggatctattgacgattgagactcctggtttgaagaaaaatgacagcttttcaagatggatgaataaagaacttgaagaggttgttgatttgggtattaaatccacttctgatgctttctggagtaacattgagacagtgaaggtgcctgatggttctaatgttctgactaatgaacagctggatgcttatgtagtgaacccttcactttctcaagaccaactattcagcattctcgatgtttcaccaagttgtgcatatattggtacaaatacaaaggtgtgtgcaaagtttagtcaaggaaacctgtgtaaacgatttgtaacaggtgcaggaatagctgaagcagactcttgcgcctcagcaagtacaggtgctcatataccaacctttgagtctgttcctgagtcaagtgtcttgacagtggacgacagaactcctgaggacaaagaaaggtggtggaggaggggcttgagagccatttcagaggggaagttggctattgttttattggctggtggccagctactatgttcactgcacagtcaattcagctgggtatcaatgatattgtccaatgccccaaagtactttgtcgaagctaggacagctgcccgcgccccaacccggccccgcgcgacggcgctgctggcgctcgacgccgtgcgagatctcccgccgtccccagtctctgctggttcaaacccttctaggagcaatgaacatcatgattgttgcatgattgctagggtgggcttaattgatactctggatcttcaatga

SEQ ID NO: 119676 - DNA, 119 bp, Zea Mays
accgtcgcgcctccgccgccgcgcccgcaggcgccctccctcaacgcgccctcctcgctcctgcagatgtggccctcgcctccctacgcacccccgcatcgacgcccaccccttcgacc

SEQ ID NO: 119677 - DNA, 1478 bp, Zea Mays
cgactcaggcctcgaccaccaccaccaccagtccacaagaccaccaaacacccttttttgcttgtcgtgccctcctccttcctcccagcttctccggtcatcccagagtacggccattctctatcccgtcaaccacatcagggcaacctgccaaacaccgcacttgcgcaatccatccaaacccccccggcaactccccaattccctctcccggagtcatcgacatgctttcctcctccaacagctcagctcccgccgcgctgtctcgcgggatacctctacaagaaccatgccctgcctattgtttcttctagctccaccgcctcgcccctgtctagctgactcggtgagtcggtcaccgctccccaacaaatatcggttcttcctgccccagacccgtaggcggccaagtccgcggcttggcgacggcgtgcgaatggcggagatgaccagggtttggagcggcggggaaccgctcgaggttggggtttccatggagagtgacccgattgtcggaggggaggcgccttctcgctcgaggtgggaagcgagccggtgggcgcccgtggaggctgcgctgaatcggatgagtaaatggctggtggctggttgttttgcttttgcagctatttggaagcgtgatgctgaaatcatgtgggttttgctgggtgcggttggcaactctctgctttcgttggttctcaagaagatgctaaaccatgaaagacctgcaccagctttgcggtctgatcctgggatgccatcgtcccatgcacaatccatattctatgctgcgaccgtcctagctctttcattgtactactggcttgggacaaattatctgaccatgattcttgggcctgcaactctgtcgttggctgcctatctgtcttggctacgtgtgtctcggggccttcatacactaaaccaggtcatggtgggagctgttgtaggatctgccgtcggtgctctttggtttgtgctctggcattggcttgtgcaggaggcctttgcttcttctgtgcttgtcagagttgctgtcatccttggatcatcagcattttgtgttagctttgtcgtctacatgattcgtcactggctcaaggatgagtaatgtacttcggagctgcaatgggagatggacagataggcatggtgattttggaaaagtgaatccgttccgattcttatcagaatcgcttgaaaaaatggtgacaaatgggttttggcggagcgattcacgagtggaacaattctcttttccttcagaaactctcggattggggaaaatgaagtttcacaccgattcctaatagtcacatacgcctcgtgtcacactagtaattgtattttttcccagttaatcatttttaagtacaaggaactaaatatgttgtatctagagcaagctcaggagatttatgtcaggaatacaatttttgatgaaaaaatatccttcaacaactcgtttagataga

SEQ ID NO: 119678 - DNA, 907 bp, Zea Mays
aggctaacctgattctgctccttaggccctagcaacaaatccgtatcccgagtccggcgacggcagtatccgagctcgcactcgcgcacccgtccatcgcatcgcatctgtcctcccatcccctcagcgccaccgcaccgcaatcacacgcgcgccacccgcgatgacgccggcggcggcgatctccggctccagcagccacgtcgtcgtctcctccgcccgcctcaggcagccgttcacgctccctccgcgcaccgcttgcccaatcgccgccgccgcctcgcccgtgacccgccgcggggtcgcggtcgccgccgtgtcgagccccgttgtgtccgccgccgcggggaaggatggttagttattctaacgccgcattgatgtactctgattcgttgcttgttcgggcttgctggtatcgagggtgctgaggggtatggctattggtatgtgctttcgatgggctagaagtaaccattgctgtgagatgggataaactgtaagctgcgatgattggttgatttcgttgatgctgcgatggaacagccaaaatatgatcgagtccttttgtttgtagctaactctggtgcccatggggtgccaatacctattagagcaactccaaaaggctagctataattctagctaaatttagagttttatgatgactctaaaaaatagataacttcataaacaatgaggtaaaccaacaaactctctataaatcttgtgtatccatattcaaatcacctgaaaacccctgctgtgccgagctacccgaaattgactgtccacatcatcggccaacgagacaaggtactgcacatacttcaagcagcctgcggagatgtatcgcacgatggacctagcaaacccattttcttctttggcttttgaactggaccgg

SEQ ID NO: 119679 - DNA, 1726 bp, Zea Mays
aggctaacctgattctgctccttaggccctagcaacaaatccgtatcccgagtccggcgacggcagtatccgagctcgcactcgcgcacccgtccatcgcatcgcatctgtcctcccatcccctcagcgccaccgcaccgcaatcacacgcgcgccacccgcgatgacgccggcggcggcgatctccggctccagcagccacgtcgtcgtctcctccgcccgcctcaggcagccgttcacgctccctccgcgcaccgcttgcccaatcgccgccgccgcctcgcccgtgacccgccgcggggtcgcggtcgccgccgtgtcgagccccgttgtgtccgccgccgcggggaaggatgccaaacaggctcctaaggatttccttcaaatcattgattttgacaaggatacaataatgaagattcttaatcgagccatcgaggttaaggcattgataaagtctggagacaagagcttccaaccgttcaaagggaaaacaatggccatgatttttgccaagccatcaatgaggacccgtgtttcatttgagacgggattctttttacttggtgggcatgctatttatttgggtccagatgatatccagatgggcaaacgtgaggagactcgtgatgttgctagagtactttctggctataatgacatcattatggctagggtctttgctcaccaagatattctggacttggcaaaatatgcatctgtacctgtcataaatggtctcactgactataaccatccatgccagataatggctgatgcacttactatgcttgagcagattggtcgtattgaaaacactaaggttgtctatgttggagatgggaacaacattgtgcactcatggctgctattggctgctgtgcttccttttcactttgtatgtgcttgtcccaagggatttgagcctgacgcaaacacagtggagatcgccaggagtgctggaatcagtaagattgaaataacaaacagtcccagggaagcagttaagggagcagacattgtgtacacagatgtttgggccagtatgggacaaaaggaagaagctgattatagaaaacagaagttccagggattcacggtggatgaggccctgatggagattgctggcccacaggcctaccttatgcactgtttgcctgcagagagaggagtggaggtgactgacggcgccattgaggctcccaactcaatcgtgttcccccaggctgagaacagaatgcacgctcagaacgccatcatgcttcacgtgctcggtgcttaactctcctattgcacaccagtgacacgctcctcttagattattgggcattgctgtcttgctgaagcattgaggctgttttggctttagggcatatatgagagcttagttcagacgaactgtttagtaaggtgataacggttcttcagggtgggaatttgttgtgctgtaaaggtttggtaacctgaataaaaaataaacttatgtgctagtttcattcgcgaatcatgacagctttaacattgaaagacacgtttggccgagaccctggatcagttttgcctggctccatccttccttgcctgcactactgcacctgccttctctttttgccgcatcaggttggagttttggaagggtgtggttggagttcggtgtgtttggttggtagatagaggatgcatcgtatatcctggtggagcggattcatatttcataaaaaaaaaa

SEQ ID NO: 119680 - DNA, 107 bp, Zea Mays
aaaaaaacacatgctcgcaagtactgaataatcgcagcaccgccttctacaaacatggagtagaaccagatgggaaacagaacaattgtcatcaccaaaaaaaaaaa

SEQ ID NO: 119681 - DNA, 235 bp, Zea Mays
gaagttcgtgtgcaggacctgcagccgcgccttcacctcgttccaggcgctcggtggacaccgaaccagccacctgcaggggcgacacggccttgagttcggcatcggcaccagggcactcatacaacacaagtagtagccgaccgacgacgacaatagaggagacaagcatgcgcaggcgcatcacaagtgccacatctacaagctcgactttaagacggggcaggtgctgggc

SEQ ID NO: 119682 - DNA, 1215 bp, Zea Mays
gaagttgagatctggagctcctggggagcaacgagaagcagctggaaaatctcatggtaacggttggcagagggggtccttgatctcttcctgagctggaggactccatctttcgagccgcggacccggagaaacttggatctctaggccatccaagggaaggtttactcattccttgctggtagcctactgcattgctgcctgccctcagatccgagctgccgcaagaagaaaggtggaatctttgctcgccttctggacaaatccgtccaaatttgggggtttcttgagctgttcttgggagcgccgtgcttcaagtttttttggggggaaaatgtcgttttctttgccggggtagatgcgggagtgatgtcgaccactttatgagctttccccctgctattttggggtttagattcgctctagttatggcggatcttgacatggagcattaggagtttctttcgtcgaaggcggaaggagcttgctgtaagctgcaatgtctctcaagagcattgtgcgggagctgaaggagatgagggacggtatcgggagcatgtcgagacgcggcggcagcggctccgacgggcgtgccttccacggccgctcggggtcgcggcattcttggcccagcctgtgggcggagcagcaacagtcgcatcggcagggccagggcctgggtccgggcccggaggggccgcatcatcagcatcaggggcggtgggcgaacttgcctccggaactgctgctggatgtgatacagagggtggagtccagcgaggcgacgtggccggcgcggcgccaggtcgtggcatgcgcagccatttgccgatcatggcgcgaggtcaccaaggaggtggtgaagacgctcgaggagtgtggcaggatcaccttccccatatcccttaagcagccggggcctcgtgaaatgccggtccaatgttttgtgaggagggagagggcaacatccacatatctactctacctagggctcagcccatctatgaatgtggagaaagacaagttattgcttgctgcccgtaaggtcaggcgtgccacaaggacttattttgtgatatcactggtctctgatgatttctctcactctagtagcacctacgttggcaaactgaagtaagatgcttattatgccaacttatgtggcatgattgtttttctttgtcttagtgacctaacctcgccattgcttctcat

SEQ ID NO: 119683 - DNA, 2134 bp, Zea Mays
gaagttgagatctggagctcctggggagcaacgagaagcagctggaaaatctcatggtaacggttggcagagggggtccttgatctcttcctgagctggaggactccatctttcgagccgcggacccggagaaacttggatctctaggccatccaagggaaggtttactcattccttgctggtagcctactgcattgctgcctgccctcagatccgagctgccgcaagaagaaaggtggaatctttgctcgccttctggacaaatccgtccaaatttgggggtttcttgagctgttcttgggagcgccgtgcttcaagtttttttggggggaaaatgtcgttttctttgccggggtagatgcgggagtgatgtcgaccactttatgagctttccccctgctattttggggtttagattcgctctagttatggcggatcttgacatggagcattaggagtttctttcgtcgaaggcggaaggagcttgctgtaagctgcaatgtctctcaagagcattgtgcgggagctgaaggagatgagggacggtatcgggagcatgtcgagacgcggcggcagcggctccgacgggcgtgccttccacggccgctcggggtcgcggcattcttggcccagcctgtgggcggagcagcaacagtcgcatcggcagggccagggcctgggtccgggcccggaggggccgcatcatcagcatcaggggcggtgggcgaacttgcctccggaactgctgctggatgtgatacagagggtggagtccagcgaggcgacgtggccggcgcggcgccaggtcgtggcatgcgcagccatttgccgatcatggcgcgaggtcaccaaggaggtggtgaagacgctcgaggagtgtggcaggatcaccttccccatatcccttaagcagccggggcctcgtgaaatgccggtccaatgttttgtgaggagggagagggcaacatccacatatctactctacctagggctcagcccatctatgaatgtggagaaagacaagttattgcttgctgcccgtaaggtcaggcgtgccacaaggacttattttgtgatatcactggtctctgatgatttctctcactctagtagcacctacgttggcaaactgaagccaaacttcctcggcacaaagttcacaatcttcgacagccagcctcctcctgacgctgtagtgctaccaaacaataagacaagcaaaaggcagtccaagcaagtatcaccgagactgccgctaggcaattacaatgttgctacagtcacgtacgagctcaccgtcctacgcaacaggggtccaaggagaatgcaatgcaccatgcactcaataccagctgagtgcatccaggagggcgggaaggcccctacccctacaggcgccatccagtcgcttgacgagccagtgtcgtccaccttacctagtgccaaagggaaggaagtggctgtagaattctcttcgacaagcctcagcgccgatctgtctggaccggcctgcgtgaacggaacacctctagtgctgaagaacaaagctcctcgttggcatgagcagctgcagtgttggtgcctcaacttccgggggcgtgtcaccgtcgcgtcagtgaagaacttccagctcgtcgcctctgttgatccttccctaaacatccccgcagcggagcaggagaaggtgatcctccagtttgggaagataggcaaggatatattcaccatggactaccggtacccactctcggcgttccaggcctttgcgatctgcctgaccagcttcgacaccaaaccggcctgcgaatgattgacggtagtttaaaatcgcgggtggagtcttgtgtacgtccgtgttcttccagggcgatgtaaattctttatcttgccatgctgggcctctgctgcccaggcgaaatggtagcttgtgaggtggagatgagcgatagcatctgtaccataggaagagatttgagcgaccttgtttacccaactgttatatgtattattgctgggatgtttggctgtgaaatatcactgccgtatcgataatggacgttgaccattttgctcgctcgctctcattttgagccgtgatgttcaacgatgtggttcctgcgttaaaaaaaaaaaa

SEQ ID NO: 119684 - DNA, 1087 bp, Zea Mays
ttagtttttacccattggcatcgcccgtctgtactgtacaacatccgatccgaaacctagcaacacccccggacagacgggcgcgaactcaaaccctagaaacggtagccatggattcgggaggcggaggagggagcggcgcgcacaaggcggcctcgggctccgcgccctcgccggcgcctaaccccacggcgatgctttcggcgctcatgagcaagcgcgccaagctccaggaggagctccgctccatcgagcgccaggtttatgatatggagaccacctacctacaggagactaatcaatttggaagtgtgctgaagggtttcgaatcttttttgtcatcctcaaaaaacacctctaagtaagacatctaagttttcatcatcttgttattcagtaactgatgcaatcttcaatatttcgagatcttcatttttttgtcatatagtactctttgcatgttgtaccaattttttttgacatttcaatgtatctgttcttactatatgattgagacctgaccttagaaatgtatatatcagcatgggtcatgtataataatctatatattgcaggaaaatttgggtgcaaggaatgtttttatgctcatgttaagttttgtcatgccagttcctttacctactgcgtgtagtatcagcaactcagcatgagagctttatatgtctgcaaatatagtttagactatagtgatcattggccatttgagattatggtgtgatgtggttattctgtagaagcaaatggtcttttatttttcgattttgcatttttgagtcagttcatgtaaatatgtaatgctgttcacatagaacattcgtgatggcttctgattgatttcagccttaagcgctctcggaaatttcaggctgacgagaggttattctccctgtcatccgttacttctccagcggtacgggcattactgctaaatgttgctgaatagcacacagcttcgaattattctttccctatggctttctaaagtttgaagtttgttaatttttcttctcccttttcctttcctgtgcatatacaggttgatgaacatttggctggacgagatggt

SEQ ID NO: 119685 - DNA, 1906 bp, Zea Mays
tacccagtcgaccgtgccgccaaaaaccctgggtctcccctacgcttcgctcgtcatgctgcgccgcctccgcctgcgcttgccggggagggcggcgtcggctgccgccggcgcggccgctgcaatggcgtcgctcaccaacgtcgcctacgccgacggcctcttccgccgccagtccgcgccgtcgaatccaggcgacgaggacaatttgggagcctccgcgttcggccgcgatccggagaccctggagcgcatggcccgagcgctgcgggagatcaacaactcaccgctcgccaagcaggtgtttgaactgatgcggaagcaggaggagacgcgcctcactgagctggaggtcgagaaggtccaatacgccatctatgagaagctgagggacatcgaaaggatgcagaaaaaagctgaagattacagaaatagtttgcaacaagaagcacaagcaaaagctcaagcattacgctttgaggatgaattagctagaaaaagaatgcagacagatcatgctgcacagaggcgacaggatgctgaactcgtgaagatgcaagaggcatctgccctcaggagagaagaagctaggcgtgcaacagaacagaagattttggaagaaatgatacgtactgagaaggaaaaggctgaaatagatcaggaaacaaacagagttaaagctatagctgaagcagaagctcgtgttcatgaagacaagcaatcagaagaagttgttaaaagaatgttattggaacgcatgaagggtgaaaaggaaaagtggctcactgcaataaatacaacattttcgcacattgaaggtggattcaaagcactgttaactgataggagcaaactaatgatgggtattggaggagttactgcactggctgctggagtttatactactagggaaggtgcgagggttacatggagttacataaatagaatcttgggtcagccttcgctgatccgtgagtcatcaatgtcaaagttcccactaccaatgtctaggctactcaaacctagttcagcatctttgtcggagggagcaggctttgagaaagttatcctgcacccttcactaaagcggaggattgaacatcttgcacgagcaactgcaaatacgaagtctcatggtgcaccattccgcaacatgctgttctatggacctcctggaactggcaaaactttagtagccagggagatggctcgcaaatctggcctggactatgccatgatgacgggaggagatgttgcacccttaggatcagaggctgttaccaagatccatcaaatatttgactgggctaagaagtccaaaaaaggcatgcttgttttcattgatgaagctgatgcattcttgtgcgagcgtaacagtacccatatgagcgaagctcagcggagtgctctcaatgcattattgtttcgaactggcgaccagtccagggatattgtccttgtcctggcaacaaacagaccgggtgaccttgatgctgctatcactgaccgcattgatgaagtcatagagttccccctgcctggggaggaggagaggtttcaactgctcaagctatacttgaaccaatatatactcaaggaagagggcaaaggatcttcttggagtgcattattcaagaagcagcagcggaagattcaggtcaatggcataagcgatgatttgctcagggaagctgcaaggaagatcgacggtttctctggcagggagattgcgaagctggtggctagtgtgcaagctgctgtttatgggcggcctgactgtatattggacccccagttattttcagaggtagttgactacaaagtgactgagcatcaccaacgcatcaagcttgcttcagagggtatggtttgatcagtaagaaatatttacctcccactgactcta

SEQ ID NO: 119686 - DNA, 877 bp, Zea Mays
gtttgataattagtataatcagttcaaacgtttgatagggcacattgtatccaataatactcacacccttacattcctgacatgacagggcctggactatgccatgatgacgggaggagatgttgcacccttaggatcagaggctgttaccaagatccatcaaatatttgactgggctaagaagtccaaaaaaggcgtaacagtacccatatgagcgaagctcagcggagtgctctcaatgcattattgtttcgaactggcgaccagtccagggatattgtccttgtcctggcaacaaacagaccgggtgaccttgatgctgctatcactgaccgcattgatgaagtcatagagttccccctgcctggggaggaggagaggtttcaactgctcaagctatacttgaaccaatatatactcaaggaagagggcaaaggatcttcttggagtgcattattcaagaagcagcagcggaagattcaggtcaatggcataagcgatgatttgctcagggaagctgcaaggaagatcgacggtttctctggcagggagattgcgaagctggtggctagtgtgcaagctgctgtttatgggcggcctgactgtatattggacccccagttattttcagaggtagttgactacaaagtgactgagcatcaccaacgcatcaagcttgcttcagagggtatggtttgatcagtaagaaatatttacctcccactgactctagtagtgcatgttttggatcccgtgggagtgggacattttgtagcccccgtctattcccaccagttttgttccatgtgctttgcctgcagcaagggttggtcccggatggacatccaaataggccggttgtggtcaattgaattta

SEQ ID NO: 119687 - DNA, 167 bp, Zea Mays
aaaccacaaaagtgttgttgtcttatagtagaagtggaatgtgaaatattaaaaaaatgggtcgatcttaagaactctaaaaagagacaacatgataagcaggtagctcaagacaaagaataatatattctagtatatttaagacaaataatagctagagtcttaaa

SEQ ID NO: 119688 - DNA, 4341 bp, Zea Mays
ggcggcgcgacggtcgcaagaagggatgcttcccctagctacggctccagctccggctccgcgacgggcacgaattggctgatgtcgctgcctttcttcctggactccggcttcggtgggaggatgggaagcgggaggagcaccccaccagcgaagagctcgtcggcgcaggagggcgaggcggcggggttggggtagagcggccataactcgaactctggggaggaggatgcgctactccacgcctcgggggcgtccatggctgcctgggggtggtaggagccgacctctctctgcttgctccgattgcttcagctgcctgcgagaagcaaggtggaagactggaagggaggtgaggagagggaatggcggaggtggcagcacgcgactttgacagtgctgctcccgtggctctaaatccccgacggcactgtggacgaagatctggaagtgagaaacagaggagaaggaggcttaccatctcgaagctgttgtcatgtgctcttgaccggttcccctacagctacgggcaccgcctccgtgttctcctcctcgcgaggatcctccgcctgcggctccacctcatcaggctcctcatccttgctcctcggatcgtggcagcgtctgggccatccccagcggcggtgggtcttcgtttcggccacatgttcgcactgctccacctcctcgcggcgtggccgggaccaatgcacggaggcagggctcgcggtggccggggggaaatagagggaggtggaggagaggggctggcagcggaaggggcagtggcgaaaggagcgggcgaaggcggaggaggcctagagcgtgctcatggaagcatagtgcttcttctgcttcttccccttgccagtgctcttgaccggttcccctacagctacgggcaccgcctccgtgttctcctcctcgcgaggatcctccgcctgcggctccacctcatcgggctcctcatccttgctcctcggatcgtggcggcgtctgggccatccccagcggcggtgggtcttcgtttcggccacatgttcgcactgctccacctcctcgcggcgtggccgggaccaatgcacggaggcagggctcgcggtggccggggggaaatagagggaggtggaggagaggggctggcagcggaaggggcagtggcgaaaggagcgggcgaaggcggaggaggcctagagcgtgctcatggaagcatagtgcttcttctgcttcttccccttgccagtgctcttgaccggttcccctacagctacgggcaccgcctccgtgttctcctcctcgcgaggatcctccgcctgcggctccacctcatcgggctcctcatccttgctcctcggatcgtggcggcgtctgggccatccccagcggcggtgggtcttcgtttcggccacatgttcgcactgctccacctcctcgcggcgtggccgggaccaatgcacggaggcagggctcgcggtggccggggggaaatagagggaggtggaggagaggggctgacagtggaaggggcagtggcgaaaggagcgggcgaaggcggaggaggcctagagcgtgctcatgaaaccgaacattattcacagaatagaaaacaatccgtccttagctgcgtgcatctcctcgccggtggccctcgcggcaaggctggcggcggctccgacggcgtcacgaagcgggcagcagctccggcaccacggtggactaccgataaccggcgtcggcaactggctgacgttgggtgttttccggccgtcgcatccatgcaaccgctccaaaagcttctagaagccgctgccgccacctctacccctctcgccgccgcgcatctccacgctaacattctccgctcgggcctcctccactcttcgcaccacctgaccgcgcacgtcctcgcgtgctaccctccgggcctcgcccgcgacctgttcgacgaaatccgcagcccgacgccgcgcctcgccaacgcgctcctccgcgcccacatccgcgcgcggcagtggcgcgccgctatcctccttggtcagcggctccgagtgcgccgggacggcttcactctctcgctcctgctgagggcctgcaccgcgctcccctcgctcacccatggccgcgccgtgcacgcggccgccgtacgctcttgcaccgcgtctgaagacgcctttgtcgccacagcgatcgtgcagatgtactccaggtgtggagacatggctggggccatcaacgcgtatggcatgcttgagaagccggacattgtgctcaggacgtctgtggtaaccggctacgagcagaacggaatggccgaggaagcactggagttctttgcaaggaacgttgttggtcagggcgttttggtgacaccagtcacacttgtgagtgtgatgtcggcagcagcacagttggggcatgtccggaagggacaggcgtgccacgcttatgttgtcagaaacagcttgagctatgatctagctttagtaaatgctgttctcggcttttatgtgaaaattggtgatttacaggcatctatgaggttatttgagggcatgacagatagggatgtgatcacttggagctgcatgatcaaagggtatgtgcaacacggagacgcacacacagggttcagaatgtacagggagatggttaaggcacgtgtccagcccaattcagtgactttagtgagtgttctgcaggcttgtgcgctagttgtcgatgctgaggaaggtaagcgacttcaccgtgttgctgtcagcataggttgtgagcttgagctgggtgtagcgacggctttggttgatatgtacatgaagtgctcatgtcatgaggaggcaatgcgcttatttcatcggatgccaaagaaagatgtggttgcttgggctgctgtcattggtggcctcacacaaaatgaactccctggtgaatccctccattcgttcaaatgcatgttgttgaatgatcatgttcctgatgccgtcacgatggtgaaggtacttgctgcatgctcagaatttggaggtaatcgcctagccatttgtctccatggctatttagttagaaatggtttcaataataatgcatttgtagctgctgcccttcttgatttgtattcaaaatgtggagacttagatagcgctgttagggtatttgaaggtactacagaaaaagatattgtggtgtggggctcaatgattgctggttatggagcccacggccttggtcaagaagctgttgcgttgtaccaaaggatgattgcctcatcaattcaacccaacaatgtgacgtttctgtcagtgttatcagcatgcagccactctggcctggttcaggaaggaatacaaatttttgatagcatgactcaagtttttggagtcgtgccaaatgccgagcatcaaagtgctatggttgatctccttggccgggctggtgaactgcaagaggctataagagtcattcgtgatatggatggaagagctgttgcccatacttggtgtgccttacttgctgcatgcagaaaacacaacaacactaagatgagcgaagtagcagcaaagaatctgctcaagctggatcctgaccatgttggctactacaatctcttgacaaatttatatgcatttgatgagaagtgggagaatgtaaaggacacaagggacatggtgaagggtagagatctgcgtaaagtggcaggttacagttcagttgaggtcactaactaagtgcacactttcattgctggggagaggactcaccaagattgggataatatatgtacattgctctgtgatgtgtcacgaaggtcaagaagcggggacagctcctttcatgtagacactggcttagcattctaggatttagctgactgctcttctttgaattgaaattgatacttgatgtacctcaattgttgccgaacttctagaagaaacctggtgggaaaaaggagggcagacccggtgcaggaggctctcacatgagtgggcccacagaagggataaaccgaggcaacccttcccccataaatgtggagaggctgcttcaaacccgcggctggtgactcaattaaacagctctcaccactgcaccaaacctaccctttagaagaaacctggcgagttttgttcctaaagaaggtttggtcatttcagagttctacaacctgcagattttgtagcctgtaggcaggtagcttattgaagtacttgtacaggtcttattataagcaattggatggtgtctggaatcttcattgatgattctctgtataaattactagtttttaaggaaccaaaaagctataagcctccagattttgctaaacattcatgttaaagttac

SEQ ID NO: 119689 - DNA, 104 bp, Zea Mays
tgatcgacaaccttgtgaagtgttgtttactgcactttttatgaattttcttcctgatggcatatcttatagatgctacttaagtacatatacatataaaaaaa

SEQ ID NO: 119690 - DNA, 1328 bp, Zea Mays
aagagtgcgacacccaaacggccgaaccattttcttcgagggagagcgtggtggtggcatatatcagcagctagcagcttgagagagcgccgagaaccaaggatatgcctgaccccacggtctactaccccgcgtcctccaacgccgtcctgcgcgcgcgggcgccttccacgaccgccaagggctcgttcggcccggtcttcgccgtgctcgcggcgatctccttcctcgccgtggccgcctgcgtcgccggcaggctgtgcgggcgccggctctccaggaagaggtacgccgccgaccaggactcctacgcctccgactccgtcggaggcgacctggagaagggcggcggattcgagatcaagtgcccggcgatgaagcccgtggcgagctcccgcgccacgatccacgacatcgacgacggcttcgagatcaagttcgcgccggggaagcctccggcgtggaagagcgacggcaagcttgctggcagcaacaaggggcgtcagcttaagcatcagcaacagccccagctcgtcggcgttcccaaaggctacgccgtgccaaaggactacgcgggcttcaggtaccctgctcaagctgtggctgtggctgtggacgggcaggggcaaataaggggcggggcgttcgttccagcgaagcctggcacatgagcgaacaataatgtagcggcagctttttaggttcacgagactcgatcgatgtatcacgtacaatctctcgtcgtccctcggcggacgacggcgttttacatcttcaactctagtttttgggggcgcagtgtgcaagagttggaaccctccgcgaactagttccaggcaccacttccatatcgtattttgtacatcaacccattataaaagcagtgaagaagaacatctcattctccagtgacatggcatggcttggcttggaagcatcaatcgtcgacagggtcctgaggagcttcggtagcgttccgttttatggtgatgacggggcattcggcatgcttaacgcagaactcgctcaccgtgcccacgaaaaccctacatggagtccattcagactcggtgcatgtaaattccatgtacatttttcttactgaaattaattccgtaaatagaatgcagcgacaaaaaaaaacttttgcgtagtctcgataatctactagtaccatccagatactagatgaatagactatggtagactatagtatgtttgaatgcactaaagctaatagttagctgctaaaatttgctgaagtcatccaacagtctagctaacaattcagctattagctacttttagcaaattaattaatagttagc

SEQ ID NO: 119691 - DNA, 1076 bp, Zea Mays
tgtccgctgcgtctccaaaacagagaagccaacaccaacgccaccccttctgtcttcttccataatggcaattatctcgccgtgcgaacccctgcacccgaaccctcacttaaaaactagtccccttgcgaaaaaattggtccgtccctgcctcagtctgcactctacgatggcggcgcctccggccacggctcccgcgaccgcccgatgtctgtccgtcgccaagtcgtgctgggctgccgagcggagctccagctcgtttgtcctctcggctcctgcgactggcctccggcaaagtgggagccgcgtcctcagcatccgtgccaaggttgccactggcctgcagagggcctgcattgcggatgatggagcggaaaggccgtggaagctcagtgatgctcgtcttgtcctggaagatggatcagtgtggacggccaagtcttttggtgcttcaggaacacaagttggtgaagttgttttcaacacatcactgacaggctatcaggagattttgaccgatccaagttatgctggtcagtttgtcctaatgaccaatcctcatattgggaacactggcgttaatcctgatgatgaagaatcaaaccaatgttttcttggtggcttaatcataagaaatctaagcatatgtacttccaactggcgatgcaaagaaacacttgagaagtatctgattaagaggaacatcatgggaatatatgatgtggatacacgtgctataacacgaagattaagagaagatggtagtcttattggtgtcttgagtactgatcagtctctgacagacaatgagttgttagaaatggcccaaaagtggaaaattgttggagttgatttgattagtggtgtcacatgtgatgctccatatgaatggtcggacaagactgattcagaatgggagtttaagagggatccgtcaagtgaaacttttcatgtggttgcctacgactttggtatcaagcataatattttgagacgattgacatcatatggatgcaaaataacagttgttccagcaaattggcctgcttcagaggctcttggtgggaagacattta

SEQ ID NO: 119692 - DNA, 1543 bp, Zea Mays
tgtccgctgcgtctccaaaacagagaagccaacaccaacgccaccccttctgtcttcttccataatggcaattatctcgccgtgcgaacccctgcacccgaaccctcacttaaaaactagtccccttgcgaaaaaattggtccgtccctgcctcagtctgcactctacgatggcggcgcctccggccacggctcccgcgaccgcccgatgtctgtccgtcgccaagtcgtgctgggctgccgagcggagctccagctcgtttgtcctctcggctcctgcgactggcctccggcaaagtgggagccgcgtcctcagcatccgtgccaaggttgccactggcctgcagagggcctgcattgcggatgatggagcggaaaggccgtggaagctcagtgatgctcgtcttgtcctggaagatggatcagtgtggacggccaagtcttttggtgcttcaggaacacaagttggtgaagttgttttcaacacatcactgacaggctatcaggagattttgaccgatccaagttatgctggtcagtttgtcctaatgaccaatcctcatattgggaacactggcgttaatcctgatgatgaagaatcaaaccaatgttttcttggtggcttaatcataagaaatctaagcatatgtacttccaactggcgatgcaaagaaacacttgagaagtatctgattaagaggaacatcatgggaatatatgatgtggatacacgtgctataacacgaagattaagagaagatggtagtcttattggtgtcttgagtactgatcagtctctgacagacaatgagttgttagaaatggcccaaaagtggaaaattgttggagttgatttgattagtggtgtcacatgtgatgctccatatgaatggtcggacaagactgattcagaatgggagtttaagagggatccgtcaagtgaaacttttcatgtggttgcctacgactttggtatcaagcataatattttgagacgattgacatcatatggatgcaaaataacagttgttccagcaaattggcctgcttcagaggtactcaatttgaagcctgatggtgttctttttagcaatggtcctggggatccagctgcagttccctatgctgtgaagacggtacaggaaataattgggaaggttcctgtttttggcatctgtatgggccaccaattgattgggcaggctcttggtgggaagacatttaaaatgaaatttggacatcatggcgggaatcaccctgtctgtgatctccgtagtggacgtgtagacataagtgcacagaaccataactacgcagttgacccagaatcactcccagaaggagcaaaagtaactcacgtcaatctcaacgataatagttgcgctggcctccagtactccaagatgaagcttatgtctctccagtaccatcccgagtcttcccctggtccgcatgactccgacacaggtacgtttcttgtactagaatcttctatagatccaccatggagtacaacgtgcttgctatcttaatgtgatttagct

SEQ ID NO: 119693 - DNA, 1904 bp, Zea Mays
tgtccgctgcgtctccaaaacagagaagccaacaccaacgccaccccttctgtcttcttccataatggcaattatctcgccgtgcgaacccctgcacccgaaccctcacttaaaaactagtccccttgcgaaaaaattggtccgtccctgcctcagtctgcactctacgatggcggcgcctccggccacggctcccgcgaccgcccgatgtctgtccgtcgccaagtcgtgctgggctgccgagcggagctccagctcgtttgtcctctcggctcctgcgactggcctccggcaaagtgggagccgcgtcctcagcatccgtgccaaggttgccactggcctgcagagggcctgcattgcggatgatggagcggaaaggccgtggaagctcagtgatgctcgtcttgtcctggaagatggatcagtgtggacggccaagtcttttggtgcttcaggaacacaagttggtgaagttgttttcaacacatcactgacaggctatcaggagattttgaccgatccaagttatgctggtcagtttgtcctaatgaccaatcctcatattgggaacactggcgttaatcctgatgatgaagaatcaaaccaatgttttcttggtggcttaatcataagaaatctaagcatatgtacttccaactggcgatgcaaagaaacacttgagaagtatctgattaagaggaacatcatgggaatatatgatgtggatacacgtgctataacacgaagattaagagaagatggtagtcttattggtgtcttgagtactgatcagtctctgacagacaatgagttgttagaaatggcccaaaagtggaaaattgttggtatttgatttgattagtggtgtcacatgtgatgctccatatgaatggtcggacaagactgattcagaatgggagtttaagagggatccgtcaagtgaaacttttcatgtggttgcctacgactttggtatcaagcataatattttgagacgattgacatcatatggatgcaaaataacagttgttccagcaaattggcctgcttcagaggtactcaatttgaagcctgatggtgttctttttagcaatggtcctggggatccagctgcagttccctatgctgtgaagacggtacaggaaataattgggaaggttcctgtttttggcatctgtatgggccaccaattgattgggcaggctcttggtgggaagacatttaaaatgaaatttggacatcatggcgggaatcaccctgtctgtgatctccgtagtggacgtgtagacataagtgcacagaaccataactacgcagttgacccagaatcactcccagaaggagcaaaagtaactcacgtcaatctcaacgataatagttgcgctggcctccagtactccaagatgaagcttatgtctctccagtaccatcccgagtcttcccctggtccgcatgactccgacacagccttcggcgagtttatagagctcatgaagagcaacagattgtaagaaaggggatcaggggagtacttgaaaaggtcaataattgtattggtgctccctcgcaccaacctcaaaagaatttgttgtatctgtagtgtttttcttttggttttgggacgttcatgtgcttgaatttttgggtccagaggacatagcataagatgctctgcgcattgtaccatgaaatggcctggttggatttcgtgaagataacatgtcatcaaactgtacggtacggtacactcactcggacagcgcctcgcgaatttcttaacggcaggtaaagtcgtcagtggatggccatgaaggccggtcagtggatgctttacttttgttgttccaggctaatcagatgtgcacgacgttgttgtcatctttattaaatgctttcatcatcca

SEQ ID NO: 119694 - DNA, 1916 bp, Zea Mays
tgtccgctgcgtctccaaaacagagaagccaacaccaacgccaccccttctgtcttcttccataatggcaattatctcgccgtgcgaacccctgcacccgaaccctcacttaaaaactagtccccttgcgaaaaaattggtccgtccctgcctcagtctgcactctacgatggcggcgcctccggccacggctcccgcgaccgcccgatgtctgtccgtcgccaagtcgtgctgggctgccgagcggagctccagctcgtttgtcctctcggctcctgcgactggcctccggcaaagtgggagccgcgtcctcagcatccgtgccaaggttgccactggcctgcagagggcctgcattgcggatgatggagcggaaaggccgtggaagctcagtgatgctcgtcttgtcctggaagatggatcagtgtggacggccaagtcttttggtgcttcaggaacacaagttggtgaagttgttttcaacacatcactgacaggctatcaggagattttgaccgatccaagttatgctggtcagtttgtcctaatgaccaatcctcatattgggaacactggcgttaatcctgatgatgaagaatcaaaccaatgttttcttggtggcttaatcataagaaatctaagcatatgtacttccaactggcgatgcaaagaaacacttgagaagtatctgattaagaggaacatcatgggaatatatgatgtggatacacgtgctataacacgaagattaagagaagatggtagtcttattggtgtcttgagtactgatcagtctctgacagacaatgagttgttagaaatggcccaaaagtggaaaattgttggagttgatttgattagtggtgtcacatgtgatgctccatatgaatggtcggacaagactgattcagaatgggagtttaagagggatccgtcaagtgaaacttttcatgtggttgcctacgactttggtatcaagcataatattttgagacgattgacatcatatggatgcaaaataacagttgttccagcaaattggcctgcttcagaggtactcaatttgaagcctgatggtgttctttttagcaatggtcctggggatccagctgcagttccctatgctgtgaagacggtacaggaaataattgggaaggttcctgtttttggcatctgtatgggccaccaattgattgggcaggctcttggtgggaagacatttaaaatgaaatttggacatcatggcgggaatcaccctgtctgtgatctccgtagtggacgtgtagacataagtgcacagaaccataactacgcagttgacccagaatcactcccagaaggagcaaaagtaactcacgtcaatctcaacgataatagttgcgctggcctccagtactccaagatgaagcttatgtctctccagtaccatcccgagtcttcccctggtccgcatgactccgacacagccttcggcgagtttatagagctcatgaagagcaacagattgtaagaaaggggatcaggggagtacttgaaaaggtcaataattgtattggtgctccctcgcaccaacctcaaaagaatttgttgtatctgtagtgtttttcttttggttttgggacgttcatgtgcttgaatttttgggtccagaggacatagcataagatgctctgcgcattgtaccatgaaatggcctggttggatttcgtgaagataacatgtcatcaaactgtacggtacggtacactcactcggacagcgcctcgcgaatttcttaacggcaggtaaagtcgtcagtggatggccatgaaggccggtcagtggatgctttacttttgttgttccaggctaatcagatgtgcacgacgttgttgtcatctttattaaatgctttcatcatccagcttttggtggca

SEQ ID NO: 119695 - DNA, 107 bp, Zea Mays
tcgtcaaacaccaaaatcgattatagaaaatgttgagactatttccctttcaatagtcctaatcatcaaacactttgcatgttgtcttatagtttatttaatttgca

SEQ ID NO: 119696 - DNA, 1564 bp, Zea Mays
cggtgtgacgcccgtctgtctccactctacagttgtgccgcctcgtctctctcctctctgctgcgcccccctatcgtgcgtgagcgtgattctatccaggattctagggttcgttcgcctcgtctcgcgatggacaagggcagcgtcgtcgtgcccccggcccctgccgccgccgccgcgaagaaggccaagcgcttcgagatcaagaagtggaacgccgtctctctctgggcctgggacatcgtggtggacaactgcgccatctgccgcaaccacatcatggacctttgcatcgagtgccaggcgaaccaggcgagcgccaccagcgaggagtgcaccgtcgcttggggaatttgcaaccatgcattccacttccactgtatcagccgttggctaaagacccgtcaagtgtgccctcttgacaacagtgagtgggagttccagaagtatggtcactagagagaatggcttcggcgtggagttgcttcatcgtttctcgtcgtttagcagtagtggttactgaatagattctggtgaacatgctatggatctgtaacgtttctgaagctctgccttacttgaagctgtaggcgaatactctggttatgccatattcgtccttcagggcgctgttcaacagctcttcctcacatgaagctgtagacgaattactcactttgcagaaattaattggtaattgtgggctatgggctagagcaatgtttagctctccgtttccctatattggcatatgaatttgtgatgttttaattagacggctctgtttctcacgtgaattcagaaaatacaagctatactcaggtgaaacatatctgcaagtgagaatcgatgaaccaaacacgatggataggagataggacgcatataatttgtagacgtgtaacttctgtatctaggcctgagatgggggaccgcgttcgattattattgcttttgtcatcttcaacttgtccaacagccgattctcgctggcaaatttaattttcaattaagtagggatcgaatttgctgtgtcattgattttttttttcatgtatgtaataaaaacccaggtacaactgacgaatgcaaactcgcacctcagagaggtagtagaaaaggagaaacagtagcatttgaaactttacaacaatcaatttaagcattttcatatttccaaatatgtaaacaccactactcccgttaccccccatctgaacaaaccaaatgaatacgaataccttagtaacaatcctcgccttccatcacaataccgtgtcatctgaggacagagtgactcatgcagcaacggcatttctcttggtggcgatatacgggttggtctcgagcagattctccagggatttcgcctttctgcttcgcacccggccagcctccttcaatagctccccaagcctccgcttctcgtcgtcaacgtctgggtttgccgtacctagcttctcctcgcgcattccaaccacatattccaagatctcgatggcctcatccagcctggtaaacaaaatgcaaatatcaacagataatttgtggctaaaatgaaaca

SEQ ID NO: 119697 - DNA, 569 bp, Zea Mays
gttcttccttccccttctatttgttctggttttgtgctttgatctaacctcgcttgttgtggcggtccgcgtctgtctgttgtgtaggcatcgagtgccaggcgaaccaggcgagcgccaccagcgaggagtgcaccgtcgcttggggaatttgcaaccatgcattccacttccactgtatcagccgttggctaaagacccgtcaagtgtgccctcttgacaacagtgagtgggagttccagaagtatggtcactagagagaatggcttcggcgtggagttgcttcatcgtttctcgtcgtttagcagtagtggttactgaatagattctggtgaacatgctatggatctgtaacgtttctgaagctctgccttacttgaagctgtaggcgaatactctggttatgccatattcgtccttcagggcgctgttcaacagctcttcctcacatgaagctgtagacgaattactcactttgcagaaattaattggtaattgtgggctatgggctagagcaatgtttagctctccgtttccctatattggcatatgaatttgtgatgttttaa

SEQ ID NO: 119698 - DNA, 5228 bp, Zea Mays
tttcaatcatagaggattggtagaccagatcctggcaaagcaatgctgatggaccctcctgttatgcaaatggactgcaagttgaaaaatgctatggataaaacaccacaaatcgcctatgataggaagctgaccgtctcacatgatgattatgggtgggcaggctctgatgtccacctaaaagatgatacaatagtatgtagccctgtcgatcttagcgatgcttgtcaatcaggcatggatcgggtattagattctgcttccaaaaattcatctcttaatttgggcgatttatctcaggggacagaactaagagagaagaatagcgacagttcttactccgatgtaaaacttcagttaaatttaagtgctggaaattataatggcttgcaaactgatgattatagctttaataaacagagttttggtaagaaggatatgcatcatcctcaggaagagatacattcttctcccaatacaatgtcattaccaagtccatgcagactcaatggagacgtcacaccttgtgaagcggagaaaatagcagaggatcgtggcaaagtagatgggattgtagatgctgtaagtaaggaagtcaaaactgacttggtaggatgccatgcacggcaggaagaattgcaatgcacgctccaagatctatcagaaatagcctgcagtattgatttagtacgtaataaatcttctccacaagaagagaagaagtctgtttcccctttgaatgacatgggccataatgtggataacaatagttgtaatggtgataccaattataaagggcaggagctcaatatggggaatgttggagatgaggatcatgctgtagcactttgggtgaagtggagaggaaaatggcaaactggaatccgatgctgtagagcagattgtcctttacctactctaagggcaaaaccaacacatgacaggaagacctatatagttgttttcttcccacgaacaaaaacttactcttgggtagacatgctacttgttcttccaatagaggaatgtcctttgccacttgtgaatggaactcatcgtaaatggagaaagctggtaaaggatttgaacattcctcgacgattcaacatacagaatcttgccattttaatgataaatttaattgatgagcttcatattgaggctgtagttgataatgcacggaaggctacaacatggaaagaatttgccctggaagcatcttgctgtagagattacactgatcttgggaagatgctcctcaaatttcaaaatatgattcttcctgactgcataagctgtgaatgggtacaaaattctattgagacgtggaatcaaaagtgtatgaacgcacatgatgccgagactattgaaatgctttgtgaggaacttcgacagtccattcttgggaacaagcttaaggaattgcgggatgcatcagtgcagcctgaattagtccctgagtggaagacgtggaaacaagaattgctgaaacagtacttttcattacatcctgctggtaatgttggcaacttcgagaaaactaattgttacgacgatccagctttagatcaacaaggtagtagaaagcgtccaaaacttgaggttcgaagaggagagatccaaattttacacatgggtgaagctgactacaggactccaactgaggacccaaaccaaaataagcttcctagtaactctgtcatgcatgaaaatataggggcattaggagcaacaagtcaaaaaaatgctgtcatgttccctggaagttctggcaccaatgagaatacaatatctggtagttccaatgcagctttacagaatgctagacttgatttagattcattcaagagctctcggcagtgttctgcgtacattgaagcaaaggggaggcagtgtggtaggtgggcaaatgatggtgatatttactgttgtgtgcatcaaagtatgcattttcttgatcattcttcaagggaggataagacacttaccattgaagctccattgtgtagtggtatgactaacatgggtagaaaatgcaagcatcgagctcagcatggttctactttttgtaaaaagcaccgcctacagacaaacttggatgtaatgcacccaggaaatttgttggatccatctgaggtactccatatgggcgaagaacctccgaataagtgggtggaaggaatttctaagtcgcaagcattgtatagcatagacttagaaacagacaaaaatgtccaggctgttgtacaagtgaaactgatgcccactgtggctatagagaactctggtgaaaaaggttgtgcaatggagaaaactgatatgtgtgctgcgtcaacgtccatgacaaatactgatgatacttctctttgtattggaattcgctctcatgacagtattgttgaatgccaggattatgccaaacgacatactctttattgtgagaagcaccttccaaagttccttaaacgtgccaggaatggaaagagtcgactcgtttctaaagatgtctttgtcaatctgttgaagggctgctcatcaagaaaagataagatatgtttacaccaggcttgcgaatttctttattggttcttgagaaacaacctttctcatcaacgcaccggtcttgctagtgaacatatgccccagatactggctgaagtgtcgaaaaatccagattttggagaatttttgttaaagttgatatctactgagagagagaaactagcaaatatctggggatttggtacagatagatctaagcaaatatattctgaaaacaaagaaggatctgtagcgttgcaggaagagaaaactaatctttcatctggtcctaagtgcaaaatctgtggtcaccagttctctgatgatcaagctcttggattacattggacaactgtccacaaaaaggaagcccggtggctgtttagaggttactcttgtgctgcatgcatggaatcatttaccaacaaaaaagtccttgaaagacatgtacaggatgtacatggggctcaatacctccagtattcaattctcattcgatgtatgtcatgtaacagcaattttttgaacactgatctgctataccctcacattgtttccgaccatgcccaacagttcaggcttcttgatgtccctcagcgaccaagtggtcaatctgctcaacaaacagaagggatgagtggtctgcccctttatgatagccacaacgttgaggatgaaaatggctcacagaagtttgtctgcagattatgtgggctcaaatttgatcttctgccagatcttggccgccaccataaagtcgctcatatggtctcaggtgctgttggccacattccactgggccgtgggaagtaccagcttaaccgcggccgacactactattccgctttcaagaaaagtttgcgaccaacaagtacattaaagaagagcagtagctctggaatcgataaaaatttgaagtttcagatctctggcttaacatctcaaatagttgaatctgaaacatccagccttggtaagttacaggatttccaatgcttagatgttgcacaaactttattttccaagattcaaaagacaagaccccatccaagcaactttgatgttttatcggttgcccgctctgtatgctgtaagacaagtcttcttgctgcgttggaagttaaatacggacctttacctgagaacatatttgtgaaagctgcaaagctttgcagtgacaatggcatccaaattgattggcatcaagagggattcatatgccctaaagggtgcaagtctagatataattcaaatgctctgcttcctatgcaactcacggcagttgattttcttgaagctcctgttgattcccgtaatgatgatgaaatgtggggaatggaagaataccattatgttcttgattcaaagcacttcggatggaagcctaaaaatgagagtgttgttctctgtgaagacataagctttggcagggagaaagttccaattgtctgtgtcattgatgtggatgcaaaagattctttaggtatgaagcctgaagaacttttgccacatggcagttctttgccttgggaaggatttcactatatcacaaaccgtgtgatggattcatctcttattgattcagagaactctatgcctgggtgtgcatgttctcatcctgaatgttctcctgagaactgtggtcacgtgagtctctttgatggtgtctacaatagcctggtggatatcaatggaacaccaatgcatggcagatttgcatatgatgaagatagtaaaattattttacaggaagggtatccaatatatgagtgcaattcatcatgtatttgtgactcgtcctgccagaataaagtattgcagaaagggctgcttgttaagttggaactctttagaagtgagaataagggttgggctattagggctgctgaacctattctacagggtacctttgtctgcgagtatattggtgaagttgtgaaggctgacaaggctatgaaaaatgcagaaagtgtgtcatcaaagggtgggtgcagttacttgtttagcattgcttcccagattgatagggaaagagttcggactgtaggggctattgaatactttattgatgccacaaggtctggaaatgtttcccgttatattagtcacagttgttccccgaatctcagtacccggttggttttggtagagagcaaagattgccagcttgctcacattggattgtttgctaatcaagatattgccgtaggagaagaactcgcctatgattaccgacaaaagcttgtagcaggcgatggctgcccatgccattgtggaactaccaattgccgaggccgtgtctattgattttgcaggaatacactaactgttcaatgctcggttgcagaactccagagatttcaacagttgtgtaggcttgctgagcgatttagcattgcaattttcctacagcttgagtgcagggctaggatctcattgttaatgctacaaatagtgattgtgatataggactcaggcaagcattaggcaataacatagtgtcgattttagtcatggtaccatcatgtttaactgattatttgttagaagcagcctgaaatgaaactgattcaggctgctctgttcgtaggcgagaattctctctgtaaaattccttcattcatattttatggttcatgagcaccatcattgacgtgaagtaataaactagttatcccagtggccta

SEQ ID NO: 119699 - DNA, 1161 bp, Zea Mays
aacaccgaaattcaccttacaactagattaaaaaaaaagacaaaacaaccctgtgacctgtgcctcgccgatgacgtcacccgcttgcgcgacgaaaagcatttccctccgtctcttcccgcgcgcactttggccatgtcagcgatccgctccaaaacgcatctgagccgtccaaggcaagaagcacgaacgcctcgcgcgcctcctcccccagcgatccgcggcatccaccacctttccaccaaccagcgcgcaccacatttcctctataagtacccgccccacatctgcgccattttctcatcgcagaaatcctccgcaacttcacagcgtatcatcgttttccatcgctcctactcctatcatccagaaaatctgagcggtattgatggcgcccaaggcggagaagaagccggcggcgaagaaggtggcggaggaggagccctcggagaaggcggctccggcggagaaggcccccgcggggaagaagcccaaggcggagaagcggctacctgcgggcaagtccgccggcaaggagggcggcgacaagaagggtaggaagaaggcgaagaagagcgtggagacctacaagatctacatcttcaaggtcctgaagcaggtgcaccccgacatcggcatctcctccaaggccatgtccatcatgaactccttcatcaacgacatcttcgagaagctcgccgcggaggccgccaagctcgcccggtacaacaagaagcccaccatcacctcccgcgagatccagacctccgtccgcctcgtcctccccggcgagctcgccaagcacgccgtctcggagggtaccaaggccgtcaccaagttcacctcgtcttagccgccttgttgtaggcgtcgttgttgtctgcttctcaagcaagcactgtcatgtgccgcttctcatggcagtagtggtggttggctggtgtgtgtaagtggtgcagtggcttttgcctgtgttatgaatttagtcatggtggtaatgtattgctatggttatttgaatgttgatcagtgatcttatgtccgcctaccatatatgtcagttgttaatcttgttaggtcttattcggttagctttcaatctatatagattgagtgagattgagtgagtttaaatctcaaacaagtcaaattttttttaaa

SEQ ID NO: 119700 - DNA, 896 bp, Zea Mays
ctcagctgctgcttgccagctcaccagtcgggcagtcactacccagtacccaccacccacccacccaccactgttacatcgtgtgctccgaatgcgacgatggcggcgagctccaccagcgcgcccacgatgccggcgatggtcacgcctctgccgggctacggctaccagggctctgccgcgggcgcgggcgcgggcggcgagcctctgtacagctcctcggggtcgtcgtccatgggcaccttcttcggggtgctcgtcgcggtcgtggtgctcaccctgctgtcctgcgtcttcggccgggtgtgcgcgggccacgccgaggggcccgacgagcgctacgactgcacgaggctggccccgcggtggtggtgcggctggcggcgggcgcctcgccggaccgctgtgaagcgcgaggcgaaggcgccgcccgtgttggaattggaagcgcctgccgcatcgccgccgcccggggagccgtaaacaagctcccggcgaagaggtttatggtcctttaccttcgttctcttcactcccgagttacggttatatattattagtaggatatatagtctaattaaataggagaaagaatccatcttagatcaaagtaaatttaaattatataatctgatacatgctctaagtcactaaatgttgtctgatcatctattcttcgttcgtgttcactttcgctcaacatcatgattagtatttctttatattgtttacatcataggatagaatgtttttgcttataatatatatatagtactttgaacctcccaataattgttttgtactcggatcaaccagtacgtgcatgatatgtgtatgcatacgtccgtatccatcgatcctcgttagactaaaccgaagagacaacatagcagcag

SEQ ID NO: 119701 - DNA, 792 bp, Zea Mays
atgccgccgccctctccccaacgctgctgctctctccccaacgatgtcgccctgctcagctccctaaaccccatcccttacggctgcggttggggaagagagagatcgaagagaatcagggtaatgcagatgggatcgatggaattcgtagcgccggcgttggaggagcttttgccggaactttccctcgaggagcagccacggttgcagaaccaatcccgcgagcgtgaccgcacccggaagcgacataccaagcactctcctcctccccgtccgtcgttgatctcggtacggtacgtgatggagatgggatcgatgggaatggatttcgtggcgccggcgttggaggagctgctgccggatctttcccgcgaggagcagctacggttgcaaaacaaagcccgcgggcatgaccgcatcttgaagccacataacaagcacactcctcgtccccgtccgtcgtcgttctcggaatggtactgcaacttcttcaaaattcccaaggttctccaggctctcgcccactacaatgccaggcaccctggtggcgagttcgatgatgtgaagcccctgaagcagagccgcgtgggattccggggccaggcatggttccatatcaacttctaggctcgcccccgcagcagcagcagcagcagtaataacaagacaatcaagcgcttctttgctgaggtgcactacaagccaaccctgatcagcagcccctcatcgtcttcgtcatcacttgcaataactgcagttcctatagttgaaatatgcatcattatcggtaag

SEQ ID NO: 119702 - DNA, 1305 bp, Zea Mays
ccgcctccgccatcaaatactcccgccgcgcgcgcgcgcactcgccctcggaacctaccattactgccatcacgcgccgcgctcacgcacgctccggccgatcgagcgagcctatcccacacccaccatggcgagagccttccgcgctgcgtccccgctgcccctgccgagctcgaggagcgcggccgcggcggcgacgagcggcggcgggagagggaacttcccgtggctgacgaagaagcagggctcgtcgtcgtcgagcaagccatcgccgagcggcggcggccaggagagcaagggcgacgagcacgagggggcgagcgccgccgggtccgtcgagcagtctccctcgccgtctccgtcgccgtcgaggaggcgcgcggacgcgctggcgcggctgcgggcgctgttcctggcggcgatcacgcaccggcggcggcggcggcagctggggtcgtgcgtgacgggcaccatcttcgggcggcggcgcgggcgcgtgcacgtcgcgctgcagacggacccgcgctcgccgcccgtgctgctggtggagatggccgcctactccaccggcgcgctggtccgggagatgtcgtcgggcctcgtgcgcctcgcgctcgagtgcgagaagccgccgctcgccgccggggagaagcggcggggcctgttggaggagccaacgtggcgcgcgtactgcaacggccgcaagtgcgggttcgcggtgcgccgggactgcggcgcggacgagtggcgggtgctgggcgcggtggagccggtgtccgtgggcgccggcgtgctcccggacgacgacgtcgccggctccgtctccggctccggcgcggcggagggcgacctgatgtacatgcgggcgaggttcgagcgcgtggtgggctccagggactcggaggcgttctacatgatgaaccccgacggcagcggcggcccggagctcagcatctacctcctgcgagtgtgaccggcgagccctgtgcctgtacgtggcgtggacatggcttccgtctttgtatgtagtgtatgtacgcatcatgcgtgtgtctggtcgggctcctgtgtttccaagtgtgtgcccaagtgcatgtacaatattactactgatcacttacatggtaaaaaggttgatcactgtaggtgattattgggctgtgcctctctctctggcgcgcagtgcaggctcttgccgcgttaattgctcagcaggaactatactgtcagcgctactgtgtgtgccataagtgtgatgcgactgaatgcttaataaattctgctgtcgctgtatctattgttccg

SEQ ID NO: 119703 - DNA, 176 bp, Zea Mays
tgaggtaaaacctggggttccatacagaatagtgaaagtatcaattacaggtttatcaaggtagtatatacacacaactctaggttttcatgattcttccaaacttacaacggatcacatttatgacgacgacgaaagcactactggataaaaacttgcgatgcttctatgcaatt

SEQ ID NO: 119704 - DNA, 117 bp, Zea Mays
attttttcaaccatatatgccgagtttttgaacctttacttaccctacataaatattcaatcgtgtttggattacaaatcttggtattacatacgaccaagcaaaacaaaataaaac

SEQ ID NO: 119705 - DNA, 947 bp, Zea Mays
acgcagggcccatgcacggttttgagacgagagcagctcagcagcatagcgccagccgccggattcctgcgcagcacgcacggacgccatcgaggaaccctaaccagagcacagcacacggagcgacggcggcgcgccaccggcgactggcggctggtgccccctctcggtccccactccccagcacggcgacggcctgctgcatcaggtgatctctgatgtctgactctcttctccagttctccccagtccccgtttccccgacttcctgttcagtgttcaccgtcgagtggcctgctaccctgctgtgctcatgtgatgtgctcgttgtgaacttgtgattgtgaatttgtgatccgatccgagtcagtccccagtccccacccagttattaatgaaattgacatccttgaagatgatgaagaatctgaggaaatgcaaatgaatggggaagatggttctgggccttctagctcatttgggactgaaaatgcatttcaagtggatgaagatttactttagctagtagatcatttatcacttatcaagtggatgaatatttgctcatttgtttcatgtttgactttgctgcagttggactttgattttagaactttaaacttatgtcatttatgttgtactcttttgctggacaacctgcaacaatacagttttacttatgtaatggcttattaacctgttcctgtgagtttagaatggctggactgttttttttactatgttttacttttacctatggtaatgtctgacagccatacagtgcaggagaaagcagatggtacacttatcctgtgatttttgttgtgttcctaactttgcttggatgtttgtttgattaattgattccattggtttgtatgcttgttgctgcagatggtaaattatttttcagactcagagtgcaaaaaagttggttcgtccaggga

SEQ ID NO: 119706 - DNA, 1189 bp, Zea Mays
acgcagggcccatgcacggttttgagacgagagcagctcagcagcatagcgccagccgccggattcctgcgcagcacgcacggacgccatcgaggaaccctaaccagagcacagcacacggagcgacggcggcgcgccaccggcgactggcggctggtgccccctctcggtccccactccccagcacggcgacggcctgctgcatcagatggtaaattatttttcagactcagagtgcaaaaaagttggttcgtccagggaagaggaatagaggttatgcttttgtgtgagcggcggcggcggtgctggcattcttgctacctcagctctgccaggaaataaatcgcagcagcgcggaatttgtgtggagattcatgtttacgaatgcgcagcgccaggtcgagcgcaccggccgttctggcactccgcgagaccagtaccttcaggatctcgtgacccagttccagaacgccacggatgaagaatctaaggagaagatagttgctaacctggcaaattttgcttatgacccttttaattatgccttcatgcgccagctgaatgttctggagttattcttggactgcattacagagcctaatgaaaggcttatcgagttcggcattggtggaatatgtaactcctgtgttgatcctgcaaatgctttaatcattactcagtgtggtggaatcccattggttatacaatgcttatcgagcccagtgcggaatactgtgacttatgcgcttggggctttgtattacctttgtaacccttcgacaaagaaggagatcctgaaaccagatgtagttagtactataagagagtatgcttcagctggaactgtgaataacaactttagcaatctggctaatgctttcttggagaaacatgttgatccatgatatgacaattttacagggtagactaaagcttacacatttcgtgtacctgtggtgttttcatattctggatatgaactaaagaaactagagcttagatctcatgctttcattgttttgggcacgatgctttgcctggaattgagcaagggctcctttttagatgagagttatgcacagtttttcagttgggaagctaatttgtcatagttcagttttttcccagttatctgttggacgatttgaacattgtaaggccctgtttggaaacaaagtttttgaaaacc

SEQ ID NO: 119707 - DNA, 1836 bp, Zea Mays
gtgaattctcaaagaaactgaaagctggaacgaactttgcataaggctgcggctggtttgccgtgcgggaggccgttataagaaccacgccaccaccgtggccatcatacgcgctctcatctctggctggctcagaaaacagccgccaagcgcacacaccactctctcatcatgacctccatataggccccctacattctttgatcagtgatcactctcgctgggtctcaccccctcccgcagacggccaaacagaacccacgcgtgcgcgcgcgcccacgagcgagcgatgcctcccctccgccgcgcgcgctccatcctgctcctcctccactacgtggccgcctcccacctcctgctgcgcgccgccgcggccacattgccggaccccgcgccgctcgacccggcactggtcgcgaccccggtgcagcccgccgccgccgttccggggggcacgatcccggcgttccccgcgcagtcggactcgctggcgggttcctcgtccacgtgcccgctcgccccttccccggcgctcctcccggccgtgcgggcctcctgcgccgccgccgcggcgctgccgccgaggctgcgctgctgccccgcgctggccgcgtggctgttcgcggcctacgcgcccgccgcgctcgcggagcggccgcccgcgaggcctccggccgcggcggcggccgccgtggacatgccgctgccgcccgacgactccgaggcgtgcgcgggcgccgcggaccgcgcgcttcgtgcggcgggggcgacgctgccccgccccaccggcggcaataacgggacgtgcgacgtggcgttctgctactgcggggtcaggctgaggcggctgacgtgcggacccccgccggcagccgagggcgggctgtgggcgccggctgacgacgcggcggcgaggaggctggagagggactgcgcgcagccgggcgtccccggctgctccaaatgccttcttgctctgaccatgataaagaacactagtcccggcggtggcgccgccgcggaggcagcgagcaaggagaagcaggccgccgtccggtcgggcgagagtgaccgggactgcgagctcatggggctcatgtggctgctgcagcgcaacgccacgcgctacggagcgacggccacggccgtcatccaggcgctgatggccgtggacgaggcgtccgccgcgggtgtcgcggtggcggcagacgcggggccggccgcggcgtgctcgctgcccgtggacgacatgcccctcccggccgaatacgcgcaggtcggcggggccagcgacgcgcctcgcggcgtctgctgcttcttctgcctgctcgtgctgttctccgttctaagcttccgctccgtgtactcgctgtagcaattttgtggttcaattgaagttcgttatatgctccggccactgtgttttgctcatggaaaattatctgattatgtcctgcacgcatgggatgagcacgtgtcaccgcatcgatcaccttgtgagttgtgaggcatgcatgcggccgttgccatctgttccatggacactggttcttcactggagatccagcatgtatccctctttttagtttttacccggtgggcggtggctctatccatctttgttttgcgagcgaacctcttcaaagaaggcaggcatgtaggtccaaaagttcacctaaaaataaataattgatcggattttatagggaaaaatgaatccaaaaaactaacagcagtataatttattaaaggaaaaccaacgaaaacctctagcaagacacaccggttgactatccaggcgtaccacactaagggcatgtttcgtcaattgcctaa

SEQ ID NO: 119708 - DNA, 952 bp, Zea Mays
cccctctgcgcacttcgattgcctgagcatttggccccagagaccaactccattccttgtttttctcttccttttccctcgaggatctcgatgtcattagaagaagcatatgctttagtattaccgtctcacatcagtgacgaactcgacgtctacacgtatcattttcaagtccgtttttggattggtgttaaaacctcacatgcaagtatcttgacatccatggcagataaagaacactagtcccggcggtggcgccgccgcggaggcagcgagcaaggagaagcaggccgccgtccggtcgggcgagagtgaccgggactgcgagctcatggggctcatgtggctgctgcagcgcaacgccacgcgctacggagcgacggccacggccgtcatccaggcgctgatggccgtggacgaggcgtccgccgcgggtgtcgcggtggcggcagacgcggggccggccgcggcgtgctcgctgcccgtggacgacatgcccctcccggccgaatacgcgcaggtcggcggggccagcgacgcgcctcgcggcgtctgctgcttcttctgcctgctcgtgctgttctccgttctaagcttccgctccgtgtactcgctgtagcaattttgtggttcaattgaagttcgttatatgctccggccactgtgttttgctcatggaaaattatctgattatgtcctgcacgcatgggatgagcacgtgtcaccgcatcgatcaccttgtgagttgtgaggcatgcatgcggccgttgccatctgttccatggacactggttcttcactggagatccagcatgtatccctctttttagtttttacccggtgggcggtggctctatccatctttgttttgcgagcgaacctcttcaaagaaggcaggcatgtaggtccaaaagttcacctaaaaataaataattgatcggattttataggg

SEQ ID NO: 119709 - DNA, 1700 bp, Zea Mays
cagattgtgaacaagtgggagacaaataaaccatggctccccaaaaagagagtagatgaggttgtgagtcaagcagagaaagtgaaagcttggctggaggagaaggaaaacctgcagaaaaatacccctgtctatagctcaccagttttcacatctgaacaagtttatgagaaagttctggacttacaagataaggtctcaagtgtcaacagaattccaaaaccaaaacccaaggtcgagaagaaaacagcagaggaagagcctgctagcaaggggaaaaccacatcttcggaatctgcacccaacgagggagagtacaccgaaacgtctcaggaacctaaggctcgagaaggggatcattcagcatcagccaacagtagtgatttagatcctgaatctcacgacgagttgtgagtaccagaatccatagaaacagttaggaaagattacgcatatatagtacacaagaaggcagtttgaggataaattttggttgctcaaatttccccaatttttatttgacgaccaaaagatgaggctatgtagttgggtgccgaggaacactagatgctgtagggccgaaatgattttatcggtagtttctgattgctcattgctgtaaggcagctttataatggtgtaagttactcgcctcaaaggcgttgttcaggatctagaaacgctttgttgtgctgaactcatttcatttctttgacgagtaacgctatatagattctacgccaagagtattgttataatgaattcgtttgatttttttttgaacgaagtggcaggagctttgcctttcaattaagagagaggggaaaaaagttagagtacataggggcggcaaccctcaggccatagaattgggcacctaagaaggaacacgacagacaatcctagtacaagccaaggcggctggacgcacttttatagagcaagacacactctcttactctccctgcgatctggagcggtgacagcgagcaatgctcaaagattcttcggttgcgctccttccaaaggttccacatagtgtagatgaccagaccattgaactctcttttgcgatcttgcggaaagagagtctccgtcttctcccaccactcgctaatgctcgagatgttgctccaaaccacatgttgcggcagggaaaagctttcccaagcaagaactgtgttccagacctcatgagcgaaggggcaggttaggcatagatggagtcctgattctataggtccattgcatagggcgcaagatgggtggtgtggccatccacgacgtgcgaggttgtctgctgtgaggagtttattttggatgagcacccaagcgaagaatttacatttgttctctgttctagcccgccaaatgaggctgatcttgtggttgatgtaggaacccaagaattgagctctgtaggctgagctggaggagtagataccgtgctgtgtccatttccacactaaagtgtcctctacatccggctgcaagctcacctgtcggatcctagtccagaggtagacaaattcctcaagttgcgtggtggttgtgatttttcctcgcagagactgaatccaagcactgttagtcagttcttgggccacagatttattcttccttctgatcagcttgaagaggtgaggtgccaggttgcgtggagcctccccatccagccagccatggtgccagaactttgc

SEQ ID NO: 119710 - DNA, 685 bp, Zea Mays
attagcccagctgggagggcgaccttggttaaatcagtgcttacggcagtccctatctaccattttataacacttctgtgccccaaatgggttgtcaaggctatagataaattcggagaggattcctttggacaggaagaactgacatcaaaggaggtcattgtgcagtgggttgggctaaggtatgcaaaccagtgaaccaaggaggtctgggtctgcacaacttgaatgttctagggtgggctctaaacttgaggtggctctggcttaaaaaacacaaccggacagaccctggacagtgtttgacatccaaatacatccgtacgcagcagcccttttctcagcctgtgtgtgttccattgttggcaatggtgcttcaactcttttctggacagatcgctgtctccacgggcaatcctttaagcagattgctccttccctgctaagccatatacccaaaagagttcagaattgcagaactgtcaaggaagctttgattgataatagatgggtgaatgatatctctggaagtctgccggagcaagttctatttgagtacttcagggtttaggacttgattcaggggattcatcttcatccaggggttcttgattggcacagacggctacccacgtcctctggggaatactccgccaaatctgcatataaacggtttctagctggg

SEQ ID NO: 119711 - DNA, 1836 bp, Zea Mays
gaaccaaaagcgccggcatctcaaacccgacggcgctctcttctctatcctctgtcccctccaccaaaaccgacggcgacgtcgctctcctccaccggtgcttggagctctccctccaccagcggcggtccacggacgctcggcgagctccaccggcgggcgctggtcagatccgcttggcagtcatccacctggcacatcgggtagctcacgcctccgttggcagtcccaccgccgcctggccctcccccagtgcccccggtgatccggaccgcacccgcttgctcggcctaacgaccggctcctgccccgccgcagccgaagctcccagcgtcctcctgcaggccgagctgaaggttcagcgcgccggtggagttcgacgacgaaactccgtcacgtcatacctctccgcctcccgtcttccagacgtctccaatcggggctcccagcgtctcggagaagaggagcagcacggcacggcggctgtggcgaggaaggctcctgtcccatcccaacccagttagcagccgcccaaggaggaggagatccaatcggcgtgcgggcgtccgcggtccatccatcgatccaattccaatctgcagaagaagggatcaaggaacagcgaccagagaaaggctgcgtctgctgctgctcctacggctgctgatgctacgaacaagaggcccagggccagcggaagctgtcacagtcgtcgattttagttgttggagctggaggtttgggctctcccctggcattgtatctagcagcttgtggtgtcggttgcttgggcattgtggatggtgatgatgttgaattgaataatcttcatcgacagataattcataaagaagcatatgttggacaatctaaagtgaagtcagcagctgatgcttgccgattaattcctctatcaaggtagtagagcatcaccatactctgaagccatgcaatgctttggagattgcacggaaatatgatatagttgttgatgcaactgacaaccttcctactaggtatatgatcagcgattgctgtgttttgctgaacaagccacttgtatctggtgcggcattaggcttagaagggcagttgactgtttatcatcataatggaagcccatgctatcggtgcctctttccaactccaccacctgtggcagcctgccagagatgctcagacagtggtgtccttggggttgttccgggagtgattggttgcttacaagctctggaggctataaaggttgcaactggtgttggtgagcccctatgtggaagaatgctactatttgatgcactctctgctcgtattagagttgttaaacttcgtggaagctctccagattgcacccattgtggcgaaaactccgttttcacagaagaagactttcagaagtttgactatgagagcttcacacagtcaccaatgtctgataaggcagcagcaagcgtgaacgtactcccagagagcgcgcgtatcacttgcagagagtacaagaaactggccgacgatggtgaacctcatctactgctggacgtacgacctgcgcatcacttccagatagcttcgatctctccgtcccacaacatcccgctctccatgctggaagagaagctgcccgcgctcgaagcctcgctgaaggaagcaggggaggggtcagccttggttgtcctgtgtaggagaggcaatgactctcagagagccgtccagcttctccgcgagaagggattcgccaacgcgaaggatatcatcggtgggctgcaggcgtggggacaagacgtcgatcctgatttccctgtgtactagcgagatggaaatggatgcactaccttg

SEQ ID NO: 119712 - DNA, 2193 bp, Zea Mays
gaaccaaaagcgccggcatctcaaacccgacggcgctctcttctctatcctctgtcccctccaccaaaaccgacggcgacgtcgctctcctccaccggtgcttggagctctccctccaccagcggcggtccacggacgctcggcgagctccaccggcgggcgctggtcagatccgcttggcagtcatccacctggcacatcgggtagctcacgcctccgttggcagtcccaccgccgcctggccctcccccagtgcccccggtgatccggaccgcacccgcttgctcggcctaacgaccggctcctgccccgccgcagccgaagctcccagcgtcctcctgcaggccgagctgaaggttcagcgcgccggtggagttcgacgacgaaactccgtcacgtcatacctctccgcctcccgtcttccagacgtctccaatcggggctcccagcgtctcggagaagaggagcagcacggcacggcggctgtggcgaggaaggctcctgtcccatcccaacccagttagcagccgcccaaggaggaggagatccaatcggcgtgcgggcgtccgcggtccatccatcgatccaattccaatctgcagaagaagggatcaaggaacagcgaccagagaaaggctgcgtctgctgctgctcctacggctgctgatgctacgaacaagaggcccaggatcaatcctggatccgccactgggcggcaggagggaggccatagagcgggagctgaagaagcttcgggcagagcgggaggagctcgacggccggatacggctgctggaatcgcagctcgaggcagggcctgcgggattcaacggtgcggcagcggggaaaggagtaggggatgatgcgtgcggcgggagtggagcgtgccagagccgcgtgggtaacgggtttgctccggacggtagcctcccggcggatatgatctaccggtacagccgccacctccttctcccggacttcggggtcgaaggccagcggaagctgtcacagtcgtcgattttagttgttggagctggaggtttgggctctcccctggcattgtatctagcagcttgtggtgtcggttgcttgggcattgtggatggtgatgatgttgaattgaataatcttcatcgacagataattcataaagaagcatatgttggacaatctaaagtgaagtcagcagctgatgcttgccgtgagtatatgatcagcgattgctgtgttttgctgaacaagccacttgtatctggtgcggcattaggcttagaagggcagttgactgtttatcatcataatggaagcccatgctatcggtgcctctttccaactccaccacctgtggcagcctgccagagatgctcagacagtggtgtccttggggttgttccgggagtgattggttgcttacaagctctggaggctataaaggttgcaactggtgttggtgagcccctatgtggaagaatgctactatttgatgcactctctgctcgtattagagttgttaaacttcgtggaagctctccagattgcacccattgtggcgaaaactccgttttcacagaagaagactttcagaagtttgactatgagagcttcacacagtcaccaatgtctgataaggcagcagcaagcgtgaacgtactcccagagagcgcgcgtatcacttgcagagagtacaagaaactggccgacgatggtgaacctcatctactgctggacgtacgacctgcgcatcacttccagatagcttcgatctctccgtcccacaacatcccgctctccatgctggaagagaagctgcccgcgctcgaagcctcgctgaaggaagcaggggaggggtcagccttggttgtcctgtgtaggagaggcaatgactctcagagagccgtccagcttctccgcgagaagggattcgccaacgcgaaggatatcatcggtgggctgcaggcgtggggacaagacgtcgatcctgatttccctgtgtactagcgagatggaaatggatgcactaccttgtaacagtttggatgccgctagaacgagaactctgatactatgatttgagtactaattttgccataccgtgtacttgcaaaaacaaatatacaactggtatggacacggtattgtgatgaataatgccatggacaaaataaaatttgagtgatatttttttgcaggttt

SEQ ID NO: 119713 - DNA, 2094 bp, Zea Mays
ctctgtcccctccaccaaaaccgacggcgacgtcgctctcctccaccggtgcttggagctctccctccaccagcggcggtccacggacgctcggcgagctccaccggcgggcgctggtcagatccgcttggcagtcatccacctggcacatcggccgaagctcccagcgtcctcctgcaggccgagctgaaggttcagcgcgccggtggagttcgacgacgaaactccgtcacgtcatacctctccgcctcccgtcttccagacgtctccaatcggggctcccagcgtctcggagaagaggagcagcacggcacggcggctgtggcgaggaaggctcctgtcccatcccaacccagttagcagccgcccaaggaggaggagatccaatcggcgtgcgggcgtccgcggtccatccatcgatccaattccaatctgcagaagaagggatcaaggaacagcgaccagagaaaggctgcgtctgctgctgctcctacggctgctgatgctacgaacaagaggcccagggttagtgccttcttccgcttggatggcagtaaggtttttgctaatcaactgtgagccaatctggcactgattggtactagatccaattagtcttagcttagtagcccccctcttagatcaatcctggatccgccactgggcggcaggagggaggccatagagcgggagctgaagaagcttcgggcagagcgggaggagctcgacggccggatacggctgctggaatcgcagctcgaggcagggcctgcgggattcaacggtgcggcagcggggaaaggagtaggggatgatgcgtgcggcgggagtggagcgtgccagagccgcgtgggtaacgggtttgctccggacggtagcctcccggcggatatgatctaccggtacagccgccacctccttctcccggacttcggggtcgaaggccagcggaagctgtcacagtcgtcgattttagttgttggagctggaggtttgggctctcccctggcattgtatctagcagcttgtggtgtcggttgcttgggcattgtggatggtgatgatgttgaattgaataatcttcatcgacagataattcataaagaagcatatgttggacaatctaaagtgaagtcagcagctgatgcttgccgtgagattaattcctctatcaaggtagtagagcatcaccatactctgaagccatgcaatgctttggagattgcacggaaatatgatatagttgttgatgcaactgacaaccttcctactaggtatatgatcagcgattgctgtgttttgctgaacaagccacttgtatctggtgcggcattaggcttagaagggcagttgactgtttatcatcataatggaagcccatgctatcggtgcctctttccaactccaccacctgtggcagcctgccagagatgctcagacagtggtgtccttggggttgttccgggagtgattggttgcttacaagctctggaggctataaaggttgcaactggtgttggtgagcccctatgtggaagaatgctactatttgatgcactctctgctcgtattagagttgttaaacttcgtggaagctctccagattgcacccattgtggcgaaaactccgttttcacagaagaagactttcagaagtttgactatgagagcttcacacagtcaccaatgtctgataaggcagcagcaagcgtgaacgtactcccagagagcgcgcgtatcacttgcagagagtacaagaaactggccgacgatggtgaacctcatctactgctggacgtacgacctgcgcatcacttccagatagcttcgatctctccgtcccacaacatcccgctctccatgctggaagagaagctgcccgcgctcgaagcctcgctgaaggaagcaggggaggggtcagccttggttgtcctgtgtaggagaggcaatgactctcagagagccgtccagcttctccgcgagaagggattcgccaacgcgaaggatatcatcggtgggctgcaggcgtggggacaagacgtcgatcctgatttccctgtgtactagcgagatggaaatggatgcactaccttg

SEQ ID NO: 119714 - DNA, 2029 bp, Zea Mays
ctctgtcccctccaccaaaaccgacggcgacgtcgctctcctccaccggtgcttggagctctccctccaccagcggcggtccacggacgctcggcgagctccaccggcgggcgctggtcagatccgcttggcagtcatccacctggcacatcggccgaagctcccagcgtcctcctgcaggccgagctgaaggttcagcgcgccggtggagttcgacgacgaaactccgtcacgtcatacctctccgcctcccgtcttccagacgtctccaatcggggctcccagcgtctcggagaagaggagcagcacggcacggcggctgtggcgaggaaggctcctgtcccatcccaacccagttagcagccgcccaaggaggaggagatccaatcggcgtgcgggcgtccgcggtccatccatcgatccaattccaatctgcagaagaagggatcaaggaacagcgaccagagaaaggctgcgtctgctgctgctcctacggctgctgatgctacgaacaagaggcccaggatcaatcctggatccgccactgggcggcaggagggaggccatagagcgggagctgaagaagcttcgggcagagcgggaggagctcgacggccggatacggctgctggaatcgcagctcgaggcagggcctgcgggattcaacggtgcggcagcggggaaaggagtaggggatgatgcgtgcggcgggagtggagcgtgccagagccgcgtgggtaacgggtttgctccggacggtagcctcccggcggatatgatctaccggtacagccgccacctccttctcccggacttcggggtcgaaggccagcggaagctgtcacagtcgtcgattttagttgttggagctggaggtttgggctctcccctggcattgtatctagcagcttgtggtgtcggttgcttgggcattgtggatggtgatgatgttgaattgaataatcttcatcgacagataattcataaagaagcatatgttggacaatctaaagtgaagtcagcagctgatgcttgccgtgagtatatgatcagcgattgctgtgttttgctgaacaagccacttgtatctggtgcggcattaggcttagaagggcagttgactgtttatcatcataatggaagcccatgctatcggtgcctctttccaactccaccacctgtggcagcctgccagagatgctcagacagtggtgtccttggggttgttccgggagtgattggttgcttacaagctctggaggctataaaggttgcaactggtgttggtgagcccctatgtggaagaatgctactatttgatgcactctctgctcgtattagagttgttaaacttcgtggaagctctccagattgcacccattgtggcgaaaactccgttttcacagaagaagactttcagaagtttgactatgagagcttcacacagtcaccaatgtctgataaggcagcagcaagcgtgaacgtactcccagagagcgcgcgtatcacttgcagagagtacaagaaactggccgacgatggtgaacctcatctactgctggacgtacgacctgcgcatcacttccagatagcttcgatctctccgtcccacaacatcccgctctccatgctggaagagaagctgcccgcgctcgaagcctcgctgaaggaagcaggggaggggtcagccttggttgtcctgtgtaggagaggcaatgactctcagagagccgtccagcttctccgcgagaagggattcgccaacgcgaaggatatcatcggtgggctgcaggcgtggggacaagacgtcgatcctgatttccctgtgtactagcgagatggaaatggatgcactaccttgtaacagtttggatgccgctagaacgagaactctgatactatgatttgagtactaattttgccataccgtgtacttgcaaaaacaaatatacaactggtatggacacggtattgtgatgaataatgccatggacaaaataaaatttgagtgatatttttttgcaggttt

SEQ ID NO: 119715 - DNA, 2265 bp, Zea Mays
gtcccctccaccaaaaccgacggcgacgtcgctctcctccaccggtgcttggagctctccctccaccagcggcggtccacggacgctcggcgagctccaccggcgggcgctggtcagatccgcttggcagtcatccacctggcacatcgggtagctcacgcctccgttggcagtcccaccgccgcctggccctcccccagtgcccccggtgatccggaccgcacccgcttgctcggcctaacgaccggctcctgccccgccgcagccgaagctcccagcgtcctcctgcaggccgagctgaaggttcagcgcgccggtggagttcgacgacgaaactccgtcacgtcatacctctccgcctcccgtcttccagacgtctccaatcggggctcccagcgtctcggagaagaggagcagcacggcacggcggctgtggcgaggaaggctcctgtcccatcccaacccagttagcagccgcccaaggaggaggagatccaatcggcgtgcgggcgtccgcggtccatccatcgatccaattccaatctgcagaagaagggatcaaggaacagcgaccagagaaaggctgcgtctgctgctgctcctacggctgctgatgctacgaacaagaggcccaggatcaatcctggatccgccactgggcggcaggagggaggccatagagcgggagctgaagaagcttcgggcagagcgggaggagctcgacggccggatacggctgctggaatcgcagctcgaggcagggcctgcgggattcaacggtgcggcagcggggaaaggagtaggggatgatgcgtgcggcgggagtggagcgtgccagagccgcgtgggtaacgggtttgctccggacggtagcctcccggcggatatgatctaccggtacagccgccacctccttctcccggacttcggggtcgaaggccagcggaagctgtcacagtcgtcgattttagttgttggagctggaggtttgggctctcccctggcattgtatctagcagcttgtggtgtcggttgcttgggcattgtggatggtgatgatgttgaattgaataatcttcatcgacagataattcataaagaagcatatgttggacaatctaaagtgaagtcagcagctgatgcttgccgtgagattaattcctctatcaaggtagtagagcatcaccatactctgaagccatgcaatgctttggagattgcacggaaatatgatatagttgttgatgcaactgacaaccttcctactaggtatatgatcagcgattgctgtgttttgctgaacaagccacttgtatctggtgcggcattaggcttagaagggcagttgactgtttatcatcataatggaagcccatgctatcggtgcctctttccaactccaccacctgtggcagcctgccagagatgctcagacagtggtgtccttggggttgttccgggagtgattggttgcttacaagctctggaggctataaaggttgcaactggtgttggtgagcccctatgtggaagaatgctactatttgatgcactctctgctcgtattagagttgttaaacttcgtggaagctctccagattgcacccattgtggcgaaaactccgttttcacagaagaagactttcagaagtttgactatgagagcttcacacagtcaccaatgtctgataaggcagcagcaagcgtgaacgtactcccagagagcgcgcgtatcacttgcagagagtacaagaaactggccgacgatggtgaacctcatctactgctggacgtacgacctgcgcatcacttccagatagcttcgatctctccgtcccacaacatcccgctctccatgctggaagagaagctgcccgcgctcgaagcctcgctgaaggaagcaggggaggggtcagccttggttgtcctgtgtaggagaggcaatgactctcagagagccgtccagcttctccgcgagaagggattcgccaacgcgaaggatatcatcggtgggctgcaggcgtggggacaagacgtcgatcctgatttccctgtgtactagcgagatggaaatggatgcactaccttgtaacagtttggatgccgctagaacgagaactctgatactatgatttgagtactaattttgccataccgtgtacttgcaaaaacaaatatacaactggtatggacacggtattgtgatgaataatgccatggacaaaataaaatttgagtgatatttttttgcaggtttaaattttt

SEQ ID NO: 119716 - DNA, 1952 bp, Zea Mays
ccctccaccaaaaccgacggcgacgtcgctctcctccaccggtgcttggagctctccctccaccagcggcggtccacggacgctcggcgagctccaccggcgggcgctggtcagatccgcttggcagtcatccacctggcacatcgggtagctcacgcctccgttggcagtcccaccgccgcctggccctcccccagtgcccccggtgatccggaccgcacccgcttgctcggcctaacgaccggctcctgccccgccgcagccgaagctcccagcgtcctcctgcaggccgagctgaaggttcagcgcgccggtggagttcgacgacgaaactccgtcacgtcatacctctccgcctcccgtcttccagacgtctccaatcggggctcccagcgtctcggagaagaggagcagcacggcacggcggctgtggcgaggaaggctcctgtcccatcccaacccagttagcagccgcccaaggaggaggagatccaatcggcgtgcgggcgtccgcggtccatccatcgatccaattccaatctgcagaagaagggatcaaggaacagcgaccagagaaaggctgcgtctgctgctgctcctacggctgctgatgctacgaacaagaggcccagggccagcggaagctgtcacagtcgtcgattttagttgttggagctggaggtttgggctctcccctggcattgtatctagcagcttgtggtgtcggttgcttgggcattgtggatggtgatgatgttgaattgaataatcttcatcgacagataattcataaagaagcatatgttggacaatctaaagtgaagtcagcagctgatgcttgccgtgagattaattcctctatcaaggtagtagagcatcaccatactctgaagccatgcaatgctttggagattgcacggaaatatgatatagttgttgatgcaactgacaaccttcctactaggtatatgatcagcgattgctgtgttttgctgaacaagccacttgtatctggtgcggcattaggcttagaagggcagttgactgtttatcatcataatggaagcccatgctatcggtgcctctttccaactccaccacctgtggcagcctgccagagatgctcagacagtggtgtccttggggttgttccgggagtgattggttgcttacaagctctggaggctataaaggttgcaactggtgttggtgagcccctatgtggaagaatgctactatttgatgcactctctgctcgtattagagttgttaaacttcgtggaagctctccagattgcacccattgtggcgaaaactccgttttcacagaagaagactttcagaagtttgactatgagagcttcacacagtcaccaatgtctgataaggcagcagcaagcgtgaacgtactcccagagagcgcgcgtatcacttgcagagagtacaagaaactggccgacgatggtgaacctcatctactgctggacgtacgacctgcgcatcacttccagatagcttcgatctctccgtcccacaacatcccgctctccatgctggaagagaagctgcccgcgctcgaagcctcgctgaaggaagcaggggaggggtcagccttggttgtcctgtgtaggagaggcaatgactctcagagagccgtccagcttctccgcgagaagggattcgccaacgcgaaggatatcatcggtgggctgcaggcgtggggacaagacgtcgatcctgatttccctgtgtactagcgagatggaaatggatgcactaccttgtaacagtttggatgccgctagaacgagaactctgatactatgatttgagtactaattttgccataccgtgtacttgcaaaaacaaatatacaactggtatggacacggtattgtgatgaataatgccatggacaaaataaaatttgagtgatatttttttgcaggttt

SEQ ID NO: 119717 - DNA, 1308 bp, Zea Mays
ctttctggcgagatcaatatctagctcatcaagattaatagtaaatttgcactttatactggtcccaagtgcatggaaaacaactatccatgtgtctgaatctttgcttgtggattctattgggtttctaactatagtctaccctaatttgcttgggataaaaggctttgttgatgatgatcatgatggtcccaagtagcacattatagaagtcaaataacaccctctcctcatgtctagtgaacaattgatccccatctacccgttttccaacgaaattattcctcttcctatgacagccatccagaccttcgcagagagctgctaactaacctattcccagcatcagtagttagtgttacaaaccttctaacgtcaaaaataatataattgtgaagcagacaccaaagcttccgcatgatcttgtttggtttcttcaccaagaacttactgtgatctgcagtggccaatggcatttgaaaccatgttcgagcattcatcctatttgcaggtggtctgccatcaagtggattgtggccatcaatgtacctgcaaaactattaacatcttctgatccttcgaagttgcttgcattgcttggacgcataactataggactgtcttgaattcttgatacatctcattaccatgtctacgtacaacttgcaggttaaacttcgtggaagctctccagattgcacccattgtggcgaaaactccgttttcacagaagaagactttcagaagtttgactatgagagcttcacacagtcaccaatgtctgataaggcagcagcaagcgtgaacgtactcccagagagcgcgcgtatcacttgcagagagtacaagaaactggccgacgatggtgaacctcatctactgctggacgtacgacctgcgcatcacttccagatagcttcgatctctccgtcccacaacatcccgctctccatgctggaagagaagctgcccgcgctcgaagcctcgctgaaggaagcaggggaggggtcagccttggttgtcctgtgtaggagaggcaatgactctcagagagccgtccagcttctccgcgagaagggattcgccaacgcgaaggatatcatcggtgggctgcaggcgtggggacaagacgtcgatcctgatttccctgtgtactagcgagatggaaatggatgcactaccttgtaacagtttggatgccgctagaacgagaactctgatactatgatttgagtactaattttgccataccgtgtacttgcaaaaacaaatatacaactggtatggacacggtattgtgatgaataa

SEQ ID NO: 119718 - DNA, 1257 bp, Zea Mays
atgcagaggctattttttctaaatggtgatcaagatctttcttcatttctatcagtggaatttggtatagtgaagtttccagactatgtttgcagcatctcccatcgcatttttcaagaaagaaatgatctacttgagtacgaagacgctattcgagttgctcaggtgatggatgaatcccttgataataataaaatggacttggtgacaagatgcatcgatttatctgagaatcgattatgcattatgccaaaacgagaaaacgcgattacacctgaacgtctcccatcattcttttctcgcttttcagcgtcctgggtctattcgaaaatactcacattaggtgtctctgtttatgaaagagaccgcaggtatgaagatgcagtcaggattctaaagacactacttagcacagttgcttgtgatagacggcgaggatattgggcattgaggctatccattgatttggagcatatgggtcgttcaaatgagagcctatccacagctgaaggaggggcaattgatccatgggtccatgctggttcaaagttcgcgctgcaaaggagagttctgcgtttaagcaaacctccacgacgctggaaagttcccagttacgctgattatgttaagagaaatataagagaggtaagcattgaaggaaggccattgaattgcgagacaggagcaaagaatgtattttacggttacgatggggaactttgtggggtagaacagttggctttacaatattatgctgatgaaggtggtggttggcaagattgtttgttggaccttgtcaagatcttttctcttcgttccttactgttcttcacaactcttggtaccctacagtacgacttctttgttctcgtgcagacagatgatttttataaatctagagagaacattgcagaatctcagttgaagaggatacgggacggaatggccgaagagatgctaatcagctcatgggagctacatcaggggacatcctgccagggtgttaactgggcccgttattcgttaactgatctacgggctgttgttgcatgcgttggtggccaccgtttggcatcgctcctccgccatctagccgttgattacaggagctggtcgagtggaatgcccgatctgctgctatggcgtttccttgatgaaagaggtggaggtgaggctaaacttgtggaggtcaaaggacccagggaccagctgtcagagcaacagcgtgcatggattttggatttgacgtggaagtaa

SEQ ID NO: 119719 - DNA, 2229 bp, Zea Mays
gaaagacgcttacctgaccgtccagatcgcgagaaaccttgtcgcgagcgcggccgctgatggtggaagccgagacggagcgacggacgacgacgacgcgaccttatctggtgtcggtcgaccagcagccgtccgcggctccgcccgacgcgatgtccccaaccggcagccgagcgcggattgccgaagcaccacactctcctcgctgattcgtgcggccgccctccgaagctccgcccgacgcgacgccaccactgcttcacgacggcaggtggcggagctcgttgcgcgccgcgcgcgtgcagacgtcggcgaacggggctcccgggacgtccgcgctggccagtcgtgtctggtctatggaagaaatagccgagcgaccagatattagatatccatctattttcctctagtcccctattgaccatgatattcttatgtctcgtttttttgaaaagagatggtgcaatgtgacgaggtgccctccgggttatttcaaggatgaaagcattgataaaattttggtgccaagaatgaagaaaatgccagtaaagatgtttagatccatcagacataccaaggattttgatatgtctctcaactatgacaaagcttatgaactgcctccaggcattccatcacacaagtttgcagagtattctgtatcgggactgacagatgccagtgaaaagtatgcacaccgtaatttatctgcacccatcaaagcaaatctacatttttctttgagcagaagtggaattatcgctcttgatagagcagaagcagtaattgagataactgaatgggttgaagttccaaagaagatattgactccagagagtaacatcaccaatcagaattcatcttctaaagtaggagtagctaatagcacgacagatattaaggaaaatttgagttctggcagtgataataattccagcactcccattaatgggagtaatgttcaagaaattattacagagaaggtgctaaagaaaagaacatttagggttccattgaaggttgtggaaaaaacaactggtggtggaacaattctttcaaaggagttgtattctgaagcaaaaaataggttagaggcactcgataagaaggatgctgagcggaggaaaactgccgaacttaagaataacctagagtcatacgtatattctatgaaggagaagttggaagaaagcacagatattttgactgtctcaactgaacaggagagggaatcctttgcggagaaacttagcaaggtgcaggattggttgtacatggacggtgaagatgctcaagctaatgaattcaaagaacgccttggtcaacttaaggccattggtgaaccgattcttttcagattgagtgaattaaaagcccgaccagctgcctgtgaaaatgctcgattgtatcttgatgagctgcaaaagattgtgaacaagtgggagacaaataaacaatggctccccaaaaagagagtagatgaggttgtgagtcaagcagagaaagtgaaagcttggctggaggagaaggaaaacctgcagaaaaatacccctgtctatagctcaccagttttcacatctgaacaagtttatgagaaagttctggacttacaagataaggtctcaagtgtcaacagaattccaaaaccaaaacccaaggccgagaagaaaatagcagaggaagagcctgctagcaaggggaaaaccacatcttcggaatctgcacccaacgagggtgagtacaccgaaacgtctcaggaacctaaggctcgagaaggggatcattcagcatcagccaacagtagtgatttagatcctgaatctcacgacgagttgtgagtagcagaatccatagaaacaggtaggaaagattacgcatatatagtacacaagaaggcagtttgaggataaattttggttgctcaaatttccccaatttttatttgacgaccaaaagatgaggctatgtagtagggtgccgaggaatactagatgctgtagggccgaaatgattttatcggtagtttctgattgctcattgctgtaaggcagctttatattggtgtaagttactcgcctcaaaggcgttattcaggatctagaaacgctttgttgtgctgaactcatttcatttttttgacgagtaacgctatatagattctacgccaagagtattgttgtaatgaattcatttgattttttaaacgagaaattctatatagatttt

SEQ ID NO: 119720 - DNA, 745 bp, Zea Mays
ttttttttgttttcttgtacttgtaaaaggtggctaactccggttgagcattttgcagtacccctgtctatagctcaccagttttcacatctgaacaagtttatgagaaagttctggacttacaagataaggtctcaagtgtcaacagaattccaaaaccaaaacccaaggccgagaagaaaatagcagaggaagagcctgctagcaaggggaaaaccacatcttcggaatctgcacccaacgagggtgagtacaccgaaacgtctcaggaacctaaggctcgagaaggggatcattcagcatcagccaacagtagtgatttagatcctgaatctcacgacgagttgtgagtagcagaatccatagaaacaggtaggaaagattacgcatatatagtacacaagaaggcagtttgaggataaattttggttgctcaaatttccccaatttttatttgacgaccaaaagatgaggctatgtagtagggtgccgaggaatactagatgctgtagggccgaaatgattttatcggtagtttctgattgctcattgctgtaaggcagctttatattggtgtaagttactcgcctcaaaggcgttattcaggatctagaaacgctttgttgtgctgaactcatttcatttttttgacgagtaacgctatatagattctacgccaagagtattgttgtaatgaattcatttgattttttaaacgagaaattctatatagattttacatcaa

SEQ ID NO: 119721 - DNA, 1483 bp, Zea Mays
ttgatgctggatcagagaattttatagcgccctatagggcgctgctaattctagtttatttattattggaaggaagtagctgctttaaacgtaagaggacaacgacaaattgacaatccaaggcgagcagcagagcagcacaaggaagtttacatctcatcataccggccgaaccgaaagtttcctgcttttttcttatctacaacactccctacaagaagaaccggattcttggctaatgattccatcaccaatcaaccaagaaccaaaaggaagacgagccgttgcccgaacggaacaacgggttattccttcctggccgtcgctctcagtctcagacgatggtgcaggcgttgggattctcctcgctgaagatggtggtgagcctgttggcgtcggtggcgatgcggtagatgccctcgcgcaccggcgtcgggtagtagctccggtactccccggagaagtactcgtgccgccgcggcgtcgcctcccacctcggcagcggcgacggcgtgtaccggatcaggtatccctgcgcctgcccctgcgcgggcgcgggcgccgcgccgtgatgatgaggctcctgacccggcggcggcggcgctttctcgctctcgctgctgttgcctggcccctgcccctgcgcgtgctcctgcttttgccgttcctcctgctgcggagagggaggctcggggccgaaccggacgcggcccggctgccccttcttgctcttgcctcgctttgggtttgggccctttggtggcttcggctcggcgccggcggcctgtggcggcgcgtcttccgtttgcgcgggtgcctcgggttgctcggcttggggttgggattcgggtgcaccgtcgtgctgctcgggctcgtgccggggcggcgtttggggtcgctgtggctctggtggtgcgctctgctgctgcggttgtggcgacggcgacggtggggtcacgtagatggagttgttgctggcgaaggtcaccgtgcgcgccaccggccgcatgtagtgggtctccgtgggctgacagcccaaggcgtgatcaaagtccagctccagcctcccttcccgccatctctcgcgccctgcacgtgagcaagtcgtatttttttttcacgactcacgaattttgcaatattataatttacggcgatgcggtgagcggtggcacaagagccgagggccatgcatgcaagcttcggcactcaacagcgcaccctctggcctctactgtctaggagtaggaggacgagagctaccaactagaagaatgaattcagaagcgaagctgaagatgtaaagaaagtgaaagcgaagaacttggcacgcaccgccgttgcattttccgagcgctctagacacgatcttggccaggggaggatagcaacccatggcgccgctgcctccctacctcgccggacggtggtggtggtggtggtgccgtttgcgtgtgtgtttcggtgcgggatacatgctcgc

SEQ ID NO: 119722 - DNA, 109 bp, Zea Mays
gtgtatgtatttccttcatggcatcttttctctctttctttattatttcaaattctaaattgtaaaccaagtcttaattcccattgatgtaatcactattttcagtgaa

SEQ ID NO: 119723 - DNA, 125 bp, Zea Mays
gggacaggacaggagaggtgaccgacgtgcagctgcagccggaccgggggagaagtgtccggttaggcttgttcggttaatcccgttacccatggattggatgagattagaaaaaaattaaaaaa

SEQ ID NO: 119724 - DNA, 487 bp, Zea Mays
tatttgcagcggaaataaattctttattacaaaatggttacaagttacaacatttacaagttatagcaagattacaatatatatcatcggagttggttacaaaagaaattgattcaaaaagattacaatttgaatgtataaaacatttataagttttaaaatacatgctagcttaagtgacaatcctcaataaagaagctaaagataggatatacttatataagaaggccgagcccaccggcatttagcagcatccacaacagaacaaaattataacctgaaaaacaacagggaataaaaccctgagtacacaattactcagcaagacttacccgactaaagaaaagactctcaagggtatgctggtttattgggaatcaaggtaaggctcatcaaatttcaaagactcgtttttgcagaaaagcatactagtagtggatccttatgccaaaattttacttcacaagttaagtacttttcctgaatc

SEQ ID NO: 119725 - DNA, 285 bp, Zea Mays
aaaatctttagctctaaagaagagaaaggaagggctctgaagttgaataatgaacacggtctagcccagaggtcgatcaactctccagaagagctgttttgtgaacaatacagacatttatgtgaacatggatccaagttttctctctctttcagcaatccctacagcggccaaatcattgcgtctctggggtgggcacaggatggagagtggagactctggggtgggcataggaaagagactccggcatcaagcaaacagttaattgatgagcagccgtactga

SEQ ID NO: 119726 - DNA, 98 bp, Zea Mays
tacgtatctctctttacccacagaccacagctagctaaagctagccatcgtcttctggctctactcctacgtgtaatctttcagacacatggctccag

SEQ ID NO: 119727 - DNA, 252 bp, Zea Mays
atggcatggctgtttgcggggcggcatgtctgcgtgcccgcgctgtgggcttgcaaggtggcggctgcgttccagctcgccttcgaggagcggtggctgctgcttgcagcggcgcggcctgcagtcataccaggtccaatccggcgcgctcgcatctactcgtggtgcagtgtagcctgcgtgctcgcctgcagggtggcggcagggcctgtgcccgcacgtttgcacttgcttgcagtggaatcaagttag

SEQ ID NO: 119728 - DNA, 1949 bp, Zea Mays
acgacaatcccctcgccgccgcctcggcctctctacctttccacctttcccacccgccgattcactcgctcgcgcggccgcgactccagcctcccctaaatccgctcgcgcccagcgaggaggcggggtcgcagcgagcgaagattccctccgaatcctctcctccaaaaacttccgatccgcttacgatggctacgcagcagcagcacgcggggccggcgtccgggtcggcgtcggcgtcgagctctagctcggggctgcaccttcccgcctcgccctcggccttcggggacaccacccacaccaaggttttcgtgggcggtctcgcctgggagaccaacagcggcaggctccggcgcttctacgagcgtttcggggacatactcgaggccgtcgtcatcaccgaccgccactctggccgctccaagggatacggattcgtgacattccgtgaagccgagtccgcgaggaaggcatgcgaggaccccacaccagtgatcgacggcaggcgggccaattgtaacctggcttcgttgggtcgagcccagcatcccgtgcaccctgggcggccaagttcagctgggtcctactttggtgtcccagttccaagggctttttatttaggaggttatggccaccaccgaccgtttccacttgggtattaccaaggatttccggttccccagtacagttatccttcatatgggaccgaatacatctctccacagggtacattaaatccatatcccgctcagcaatatcttcctatttatggagtctcagctgcagcaaacacagccaaccaaacatttaaccagttgaatccatacatttctggtgggggcaatggttatatgtcggttcatagttacaacatgcctggaaatcaatatgtgcagctcactggatcaaacttcagcagtgcgtcaccaacagctcaaccttcctgtcagactccttttttagtagcgacacccgttcctgcacatccacacctaataattccagccccctcaccccagtttacacaagctagtggttcagaccaaagagcaagctgaactgtgcatccaagcatttgtaccttgaggtttgctttgtttgcacggttaccatcttgtttcctttctgacaattagacaacaactgactttagtgctttggttcatggcaggtacccttagattgcagcaggactaaaaagagcagtgttgctgtatccacagcttttgttcttgcctggcaagagatcatccttgcattcataaggttgtcgttatcatggtcaacagatgtacctggaaatcgtgaagttgtccctatggatggggcaagtgatccaagagcaagggttgctcttgcctttccactcggtttaaatcgtatacgtgtgatggagccagatgcagccttaatgatcctgtatctgacaagctcgtggaaatgtagcctatgctggaacggagtccagcatatgtaagatggattgatccaacgggggattagccatcatggccttcaggtgattgttcatctgaaaattcatgttgtgtgcggtcctagtcccagtcactgcgcacagggtctggtgaccaaaagtgtatccagttctgtacaagcctgcagtcatcgtgttgtctgcgtgactgcatccatcagcctttggacctaatatgcagtcatcattgtgttgtttacactactggttgtagccagtgatggtcattggtttgccccagtctcccaatttaaggtgtgatttatgtgtgtattgctctgtgtttggtggttccaagcatagagcggttctcttgtacttcaaaataaagccatttaatgggaatcccatgacgctggtgccagtgatatgtgctagactgacaatgtgtacctgtgatttatgaattatgacccttttaccgttccattttatcaaataagttatatca

SEQ ID NO: 119729 - DNA, 1871 bp, Zea Mays
acgacaatcccctcgccgccgcctcggcctctctacctttccacctttcccacccgccgattcactcgctcgcgcggccgcgactccagcctcccctaaatccgctcgcgcccagcgaggaggcggggtcgcagcgagcgaagattccctccgaatcctctcctccaaaaacttccgatccgcttacgatggctacgcagcagcagcacgcggggccggcgtccgggtcggcgtcggcgtcgagctctagctcggggctgcaccttcccgcctcgccctcggccttcggggacaccacccacaccaaggttttcgtgggcggtctcgcctgggagaccaacagcggcaggctccggcgcttctacgagcgtttcggggacatactcgaggccgtcgtcatcaccgaccgccactctggccgctccaagggatacggattcgtgacattccgtgaagccgagtccgcgaggaaggcatgcgaggaccccacaccagtgatcgacggcaggcgggccaattgtaacctggcttcgttgggtcgagcccagcatcccgtgcaccctgggcggccaagttcagctgggtcctactttggtgtcccagttccaagggctttttatttaggaggttatggccaccaccgaccgtttccacttgggtattaccaaggatttccggttccccagtacagttatccttcatatgggaccgaatacatctctccacagggtacattaaatccatatcccgctcagcaatatcttcctatttatggagtctcagctgcagcaaacacagccaaccaaacatttaaccagttgaatccatacatttctggtgggggcaatggttatatgtcggttcatagttacaacatgcctggaaatcaatatgtgcagctcactggatcaaacttcagcagtgcgtcaccaacagctcaaccttcctgtcagactccttttttagtagcgacacccgttcctgcacatccacacctaataattccagccccctcaccccagtttacacaagctagtggttcagaccaaagagcaagctgaactgtgcatccaagcatttgtaccttgaggtacccttagattgcagcaggactaaaaagagcagtgttgctgtatccacagcttttgttcttgcctggcaagagatcatccttgcattcataaggttgtcgttatcatggtcaacagatgtacctggaaatcgtgaagttgtccctatggatggggcaagtgatccaagagcaagggttgctcttgcctttccactcggtttaaatcgtatacgtgtgatggagccagatgcagccttaatgatcctgtatctgacaagctcgtggaaatgtagcctatgctggaacggagtccagcatatgtaagatggattgatccaacgggggattagccatcatggccttcaggtgattgttcatctgaaaattcatgttgtgtgcggtcctagtcccagtcactgcgcacagggtctggtgaccaaaagtgtatccagttctgtacaagcctgcagtcatcgtgttgtctgcgtgactgcatccatcagcctttggacctaatatgcagtcatcattgtgttgtttacactactggttgtagccagtgatggtcattggtttgccccagtctcccaatttaaggtgtgatttatgtgtgtattgctctgtgtttggtggttccaagcatagagcggttctcttgtacttcaaaataaagccatttaatgggaatcccatgacgctggtgccagtgatatgtgctagactgacaatgtgtacctgtgatttatgaattatgacccttttaccgttccattttatcaaataagttatatcaatgcct

SEQ ID NO: 119730 - DNA, 1373 bp, Zea Mays
cactcttctggaagttaccgtgtttatatgcgtttcaacgttggcaataacagtatatatttttagggcggccaagttcagctgggtcctactttggtgtcccagttccaagggctttttatttaggaggttatggccaccaccgaccgtttccacttgggtattaccaaggatttccggttccccagtacagttatccttcatatgggaccgaatacatctctccacagggtacattaaatccatatcccgctcagcaatatcttcctatttatggagtctcagctgcagcaaacacagccaaccaaacatttaaccagttgaatccatacatttctggtgggggcaatggttatatgtcggttcatagttacaacatgcctggaaatcaatatgtgcagctcactggatcaaacttcagcagtgcgtcaccaacagctcaaccttcctgtcagactccttttttagtagcgacacccgttcctgcacatccacacctaataattccagccccctcaccccagtttacacaagctagtggttcagaccaaagagcaagctgaactgtgcatccaagcatttgtaccttgaggtacccttagattgcagcaggactaaaaagagcagtgttgctgtatccacagcttttgttcttgcctggcaagagatcatccttgcattcataaggttgtcgttatcatggtcaacagatgtacctggaaatcgtgaagttgtccctatggatggggcaagtgatccaagagcaagggttgctcttgcctttccactcggtttaaatcgtatacgtgtgatggagccagatgcagccttaatgatcctgtatctgacaagctcgtggaaatgtagcctatgctggaacggagtccagcatatgtaagatggattgatccaacgggggattagccatcatggccttcaggtgattgttcatctgaaaattcatgttgtgtgcggtcctagtcccagtcactgcgcacagggtctggtgaccaaaagtgtatccagttctgtacaagcctgcagtcatcgtgttgtctgcgtgactgcatccatcagcctttggacctaatatgcagtcatcattgtgttgtttacactactggttgtagccagtgatggtcattggtttgccccagtctcccaatttaaggtgtgatttatgtgtgtattgctctgtgtttggtggttccaagcatagagcggttctcttgtacttcaaaataaagccatttaatgggaatcccatgacgctggtgccagtgatatgtgctagactgacaatgtgtacctgtgatttatgaattatgacccttttaccgttccattttatcaaataagttatatcaatgcct

SEQ ID NO: 119731 - DNA, 100 bp, Zea Mays
ggtagacaacccagtcggtttgttgttgacagataccctatggcagtgtgcctgctccgtgctcccctctagctctcctagcaccgtagcacgttctcaa

SEQ ID NO: 119732 - DNA, 2233 bp, Zea Mays
ccgtcattttctatatcctaaatcatataaactattttatctttcttcacactttatctacatgaaactgtattccctacaaccatatttttctggcagtcagattctaaaaaaaatcctcacaaaaaagttgaaccaaactcgcgagccacgggcccgcgtccggcgctgcacgagctgtgtcacgcctcccggcctcccggggtccagccaaatagggctctacatgtgcacagggccagatttcacgtccgccgacgtggttacggcgtcacatgatcacatctggctcctccgggcccaggcgccagtgacgccgtgcccgcctctaaatagcgcctctctcccgggctgccggcggaaccgaggcggtcaggctccctcctccttcctcctccctgcaaatcctgcaggcaccaccgctcgttttcctgtccgggggacaggagagaaggggagagaccgagagagggtgaggcgcggcgtccgcccgatctgctccgccccccgaagcagcctgtcacgtcgtcctcactctcagcaaccagcgaaaatgggtgccggaggcaggatgaccgagaaggagcgggagaagcatgagcaggagcaggtcgcccgtgctaccggcggtggcgcggcagtgcagcggtcgccggtggagaagccgccgttcacgttggggcagatcaagaaggcgatcccgccgcactgcttcgagcgctccgtgctgaggtccttctcgtacgtggcccacgacctgtcgctcgccgcggcgctcctctacctcgcggtggccgtgataccggcgctaccctgcccgctccgctacgcggcctggccgctgtactgggtggcccaggggtgcgtgtgcacgggcgtgtgggtgatcgcgcacgagtgcggccaccacgccttctccgaccacgcgctcctggacgacgccgtcggcctggcgctgcactcggcgctgctggtgccctacttctcgtggaagtacagccaccggcgccaccactccaacacggggtccctggagcgcgacgaggtgttcgtgccgaggaccaaggaggcgctgccgtggtacgccccgtacgtgcacggcagccccgcgggccggctggcgcacgtcgccgtgcagctcaccctgggctggccgctgtacctggccaccaacgcgtcggggcgcccgtacccgcgcttcgcctgccacttcgacccctacggcccgatctacggcgaccgggagcgcgcccagatcttcgtctcggacgccggcgtcgcggccgtggcgttcgggctgtacaagctggcggcggcgttcgggctctggtgggtggtgcgcgtgtacgccgtgccgctgctgatcgtcaacgcgtggctggtgctcatcacgtacctgcagcacacccacccggcgctgccccactacgactcgggcgagtgggactggctgcgcggcgcgctcgccaccgtcgaccgagactacggcgtcctcaaccgcgtgttccaccacatcacggacacgcacgtcgcgcaccacctcttctccaccatgccgcactaccacgccgtggaggccaccagggcgatcaggcccgtcctcggcgagtactaccagttcgacccgacccctgtcgccaaggccacctggcgcgaggccagggagtgcatctacgtcgagcctgagaaccgcaaccgcaagggcgtcttctggtacaacagcaagttctagccgccgcttgctttttccctaggaatgggaggagaaatcaggatgagaagatggtaatgtctgcatctacctgtctaatggttagtcaccagtctttagacaggaagagagcatttgggcttcagaaaaggaggcttactgcactactgcagtgccatcgctagatttaaggcaaattcagtgtgtctgtgcccatggctgtgagctttgggtactctcaagtagtcaagttctcttgtttttgtttttagtcgtcgctgttgtaggcttgccggcggcggtcgttgcgtggccgcgccttgtcgtgtgcgtcttgccatctcttcgtgctcccttcgtgttgttgtaaaacactagtctggtgtctttggcggaataacagatcgtcgaacgacaacgttttcgtgctgcccgtcccatagagcgacgggagtggacgtggcggcccggtcgacggcggcagcggcctggtagcacgacccacattcagcgtgcggagtc

SEQ ID NO: 119733 - DNA, 688 bp, Zea Mays
atgccgtcgtcgtcagctggctctcttggcatgatctgctgctctctgtctctgcacgtatcaataccagacaacacactgcttccggaaacgaagcagctacctgtgcgtcaggccaaagcatcgtgtaaaccatgcacgcgcatacagtggtataggcatagtagtaggctcggcaaatggtatagtagcgcggcagtgcagggacagggagcgtactcttacacagaccagcgattcctacacttccgttcctagtcgtatcgcagattaagcacgacggacagataacttgatggcaactgtgagatcatcgtcggtacctctaattaactctgacggattaatataataagcatgtacgtacgtacgtacgtacacgcgtaccttcgttgataaaccctccggtgcgaccacgcagcaactccggcgacggggacgatagtagtaggcacgtcaagaacgagagcggacccagtacctgtaccgcgacgacgacgccggcaaggcctccagtcatttaccggacaaaaaactcccagtagaagtggcggcggccggtgatcagcactctctctctctctctctcaacaagtatcgagtaccttcgtgcagctagtgcagtggccaacgatcactgatctcctctccactggcggcacggcaatgcagcagcagacgccgagtg

SEQ ID NO: 119734 - DNA, 462 bp, Zea Mays
atggagccaggggaggtgtcagggatcacaagagataatggagtcagtcagcgcctcgctacttcgctagacatcgctaacaggaggacgtgggcacgtggcagtggtgctggtgcacctctataccatcctcagcggcgtgcatatggcctgctgcgggggaacgcggcgtcgcgcggcggagatacaccgccatcaccttcgacatacgcggcgctccacggggcgtgcgtcggtcacgggctccaccgagggccggggacgtcgtcgccgtctgcggatgtgtcgcagagaacatcaggccgcgtgacatcctccgcgtcggatcctcatctgcttcgctcttctgaagctgtgtttggtcaatttggatgtgcaaatgacaattctgttggtatactcattcgtgctatagggcaccaattgtcggacctgcagttgatatacagtgtgtttggttag

SEQ ID NO: 119735 - DNA, 1691 bp, Zea Mays
gagctgaaccaaccacccatctctctcctctctaaacccaagccagtgtgctgccccagcacccagcagctattggagctcagccatccagaacaccagggcgctagctgttcgttgatagaaaccctcctgctgcttcccttcccttcctgctcacccacgtcccaatcttcgctgcggctttccgatctgcggtacttccggcaccgcgacctaaagctcgccaccgatccgctgggtcctcggcattcctttttctccagcaccggcaaagcttccatcttttcgccagcagacttgacaaacggagtgcatgacgctgcttggagtagacgcaagctctgtggaaggtcagatttctttttttttttcgttcacaaattcaaaaagatctctccttcctttttactttatctgatctgattattagatgcgtattgcttccgatttatataagtttcaattggtatatgcatgctgtttgatttgaattcattctttctcgataggtatgcttgtttccgtttcttattctcagttccgttctttttttttgtttttgcaaaagctctcgattttgttttactttatttgattagattcgtattgctgtctattttatataactttcatttggatatacgcacatgtttttttatttgaatgaatcggtttcgaatgacatggatctcagtagacctcgtagtccattctctcgccgtatcttcttttttccaccaaggataaagaagttcattgttacatacactgatacacactccaatctccatcacgatttttcggtcctgaactacccactttctgagcacgccgttgattctgtttatgcagatctctagtgtatccgttttttactagattgtctaagaccagttgtcttgacgaagtacttcatttccaacaagcaaatctgataaaacaaaaggagcagcttcaacagagcctgcagctccagtggttggactgaccaacatttgcacagctgaaattgaatccatgggcagaggaagagggagagggaagaagctaaccactgtcaggagccacgaagacaaaggtagcagcggcgaagaagtcgtgcctgcaaagaagaggaggggaaggccccaaaagcgcttcgccagtaagatcgatcaagcagatgttgaaaactttgtagaacaggtcgatgccgaccaagaagaagctgatgatgccaagctgaagaacagtgccgcagctggtggtaccaagagaggcaggccgctgaaagagggctccaatattgccgtagaagatactaattctactgttcgattaagcagtgatgaatcaacgaggaccaatgggttcaggcagattgggagccggcgaaaaaacaagccccggcgagcatcggaggcagggctagaatgcaagtgaaccgtccctgcatttttcagtacaaggtagcatccttttttttttttttgctacatccgtcatgtttggtagctcccaatgctggaaaaacaaaatgtaaactagcatgttctgattacatgcctcagtttttttttcattgacacaaagtgtatgaactgatggtacaccaacttgttcagctgctctagaccctggttctgtttgagctgcttgtagcagagatcttacctttcagtttaccatatagtgttcctgcagttttgatt

SEQ ID NO: 119736 - DNA, 1191 bp, Zea Mays
gagctgaaccaaccacccatctctctcctctctaaacccaagccagtgtgctgccccagcacccagcagctattggagctcagccatccagaacaccagggcgctagctgttcgttgatagaaaccctcctgctgcttcccttcccttcctgctcacccacgtcccaatcttcgctgcggctttccgatctgcggtacttccggcaccgcgacctaaagctcgccaccgatccgctgggtcctcggcattcctttttctccagcaccggcaaagcttccatcttttcgccagcagacttgacaaacggagtgcatgacgctgcttggagtagacgcaagctctgtggaagatctctagtgtatccgttttttactagattgtctaagaccagttgtcttgacgaagtacttcatttccaacaagcaaatctgataaaacaaaaggagcagcttcaacagagcctgcagctccagtggttggactgaccaacatttgcacagctgaaattgaatccatgggcagaggaagagggagagggaagaagctaaccactgtcaggagccacgaagacaaaggtagcagcggcgaagaagtcgtgcctgcaaagaagaggaggggaaggccccaaaagcgcttcgccagtaagatcgatcaagcagatgttgaaaactttgtagaacaggtcgatgccgaccaagaagaagctgatgatgccaagctgaagaacagtgccgcagctggtggtaccaagagaggcaggccgctgaaagagggctccaatattgccgtagaagatactaattctactgttcgattaagcagtgatgaatcaacgaggaccaatgggttcaggcagattgggagccggcgaaaaaacaagccccggcgagcatcggaggcagggctagaatgcaagtgaaccgtccctgcatttttcagtacaaggtagcatccttttttttttttttgctacatccgtcatgtttggtagctcccaatgctggaaaaacaaaatgtaaactagcatgttctgattacatgcctcagtttttttttcattgacacaaagtgtatgaactgatggtacaccaacttgttcagctgctctagaccctggttctgtttgagctgcttgtagcagagatcttacctttcagtttaccatatagtgttcctgcagttttgattga

SEQ ID NO: 119737 - DNA, 879 bp, Zea Mays
atgagcgcgagcaggagaaggaggagaagcagaaggaccggcagtcgtacgtgttcgactggcgcagcctccgacgagcgcgagcaggagaaggaggagaagcagaaggaccggcggccgtacgagcagtccggctgctgcaagccgccgacggcgtgccagtacagcggaggcatgccagtcggggcgcaggacgaggactgctaccggtggaacgccccggacatcctctgctaccggtgcgactcgtgcagggccggcgtgatggagcaggtgcgccaagactggcacaagatctttgtgctcgacgtcgccgtgctcgccgctctcgtctgcatctgctcatgcgggtgttgtgccttcaggaacgctcgccactcccggtcccagtacccatacggggtaaaccaaacgtccaagataaacccacgctgggactactggtggcgatgatggggtggtagaagagaacagatctactaggctagctgtagcttctcaatgcatgtatgatattttgatccaatcttctatggtaaaagataaaataacacttgggatctgtatgtgttattagcccctgtggtactctatttgtttccaggtctgcagagtttagtttctatagatatttgagttaagaggagactaagccatgaagtaaaagagatgcctagttttttccccttcaatatggtagccagcattgtatcatgtagaattttaatccaggacagaagtggttccatgtatatgggggaaaccaaaccacacaagaagttatcagctatgcttgttctactgttggtgtggcttctctatctcattaggtactgtcttctggacataacttatgatgtgattacactggattccttt

SEQ ID NO: 119738 - DNA, 121 bp, Zea Mays
tatttatttctttttgttcaaattaaaatagaaagcaatagaaatgcttgtgaatcttgttggttatgcaatttgtttttatttacttatgatctagtaatttaatgtcaagaattaaagc

SEQ ID NO: 119739 - DNA, 788 bp, Zea Mays
cgcctctcgcagcactccaaggcgtacctgtccgcggcgaacgtcgggatcatcgacggcgtgcacccgatcctcggcggccggtgggcggcggtggccgtctccgcgacatcagtggcagtgttgttgttgctgccactctccatgctcactgcgctggtgcggcgcatgggcccgtacctgctgctcctccaccgcgcgttactgctggcgcaggcgtaccttgccatctacttcgcgacactcgcgctcaccgcggtcacctcggggctggagcccctgcgcttcgtccacgcgtcctcccccgccgcttacgcctggacacaggccgcgcagtcactcggcttcatggcctacctcgtgctccagatggtggacctcgtcgtcgtcttctcgggcaccacctcccctgagaacgacgacaacggggatgccgccaaggccctcaggctcacgcagatggtggtcggcctcgtcgccgtcttccaccgcgccaactggcgcgtgtacgccgtgtatgcggtatgcttcgcaatcgtgtgcgcctgcgcgcgcgccgagaggaggaagaaggcctacctcgcgggcaccgactgcgtcgtcgaggagtggaagaagagctgagctgaccgtatcgggaacagagagagggaacttctctaggaggaaaaaaatcctaatacagtggtcggtggaagcccaactgcccatgtgcgtgaacgtaacccagaatttaggaagaaaaaggatggtataaaagtaaaagaatacgggagcaagttgcgatt

SEQ ID NO: 119740 - DNA, 276 bp, Zea Mays
atggggatggacaaatgcaacgcgaatggacaagtgtggcgcgaacagcgtggacagcgacatcgtacacaatgcgggcatggtaatgaacaggttgcccatcagtgtgtacacatcagagatgttggggtgtgcggcgaccatgtccacagacggttgatgagcaagatgctcgggcgcattggggattcaccgctgatcaggttcgacacatacacatgcggcgcgtgcgccgtgtcgggcacgctcaagtgggacatgaccactgtcatgtag

SEQ ID NO: 119741 - DNA, 1780 bp, Zea Mays
atgttgcatatttttcccaaactcctcaagcaatttccatttccaccacgaccactctcttcctcgcagcgcgtaccaacccgccgccgtctactgccactccgcctgctcatggcctcccctacgcaaggtgatgcccccctcgcggctccggctccggcggctgacgctacggacgcggccttcgccgccgcggccgcggtgccggatccaggcgcagagttcgggttccagcgtccggagctcgggaaggagaagctggtcgggacggtggggttccacgagcgccatgtgttcctctgttacaagggcccggatttgtggccgtcccacctcgaggcctctgagtctgaccgcctcccccgcctcctcgccgccgccatcaaggcccgaaagcccaatctgaagaagaccatcaaattgaccatctgtgaaggagaagatggcactgaatcatcaaatggagatgtgttgatctttccagatatgatcagatataaagggctgacccattttgacgtggacaactttgttgaagaagtgcttgtgaaggatattgactggcttcctagatctcctgagcctatgagtggttcctatatttttgtttgctcccatggaagcagggacaaaaggtgtggtgtttgtggacctgctttgattaaaaggttcaaggaagagataaatgaactgggacttgatgatcaggtggctgtcagtgcatgctcacacgtgggaggtcataagtatgcaggaaacgtcatcattttcagttctgatgccaagggagaagtgactggtcattggtatggttatgttgttcctgatgatgtgcctgttttgctgcataaacatattggacaaggagaagttgtggaccatctatggaggggacagatgggtttatctgtggagcagcagaagcgagctctcgagcttcggaacatggtaaatggtggcgaagaatcccttgaagaaaccagaacagatggtgcttctttcaaccctgcagcagctggtggatgctgccaaggcaatggtggcttcacctgctgccaaactgacctgccaaaggaaaaacaagacaagagcatcatagctgagcagaaccccaagagctctgacaaggagggtggtgctggcagcaagaagggggatacaaagacttgcccagtgcccatctggtttgagacctgggagagagctgacacatatgccgctcttgctgttgttgcagctgccgcagcggtgcttgtctccttcagaatctacaagaacctcaactgaagaacatgggagatcctggaagaggtgaccaaaacaagtataggtgaaacagcgtactgtgataaaagtctgggatgagaataaatttacctgtgcataatgctaggcttaggctatggctagcaaatcgttgtgcaaaatattgttgtgcattgtttacaaagtgatgtttgaaatagaagataacggcgatgaacaagccgttggagataaccttagaacctcaaagtagcttatctggagatggagacggtgttgaaaagatgttgctgccagtgttctcgtatgtgaactccttgtgaacctccactccactgcaatcgaagtttcgatgccttagctgctgtttatcataagcaaggcgatgggatcggcatcaccactaactttgatgatgttatcttttgtttgaattttggatgttctggagcatctagatgttaaaactatgtcaggttgattagaaaatagaataaaatagagagactaaaaa

SEQ ID NO: 119742 - DNA, 1048 bp, Zea Mays
atggtcgacccgtgcccgcaaatcccgtcgtggccactgcagccgccaaccaacgccgcggttccagtggacatagcgcccaatccgttgatcatacccccgcatcccatgccaacatcctcatccggtagcgaccaaccatatcccatcggagctggtgcatacccctgtcatctcctctttcccctacattcccacgcccccgtcgctggagaggaaggaggatccaaaggaaaaggagcttgccacgctgccggagaggaaggaattctaatattgctcaaccgcgcaggcctcgaccaagtaatgagaataaagaaattccttgtatacgacaaatggtggttcgtgtgcctactccgtggcaatcagaaacggaagtcccctgaaagagttcgcattgatcttcggtccaacaatcattttgccccaaaagagtcgacatataatttctactcgttgagactggtgttcggaaaggttctaaatcttttgatgaagcccaagcagcaggattcaccaaagagagttgaactttgggtgatatatgggagactgtaccaagcagtgatcttgttcataagttggatggccatcacccagctagctcaccatgaaatgcttttcgtcccaattggcttcacctttggttcaggcatgttcgacatggatggtatcagaggaggcagcccctatggcgcgggggtatttgctggcgatggcagcagacaacccagtgagactgaacttgcccttgcagaacaccagggcaagtacatggcctccataatgaaaaagctagctctccatgcttgagacagccacccctgtgcagtagaagtcacatggtcaccttcctccggtgcttggcttctcctattgtttccggatacatccggcccgtcgtatatgtgcacagcttgccctatcgtttgtgaaagtagccacccctaaattaaggttcatttgtacattgtcggcatattcatattgttgtccatttgagcaataagagtgtcataataaacatcatatgtcatattggttt

SEQ ID NO: 119743 - DNA, 101 bp, Zea Mays
ctttggttgaatatgaaggagagcaacatgggtttcgcaaagccgagaacatcaagttcacattggagcaacatatggtgttctttgcaagattagttggg

SEQ ID NO: 119744 - DNA, 347 bp, Zea Mays
gcgacaatcagtgaccctccacatcgacaaatagagtcgccgtcgtagcaggggtagagcatgcggccgccgtggtggatccacgtcggcatcgtcgggccgcaagacttcggctgtggtctcctgcgtcgcgcaatccctcggcagatgggaggtgcacaagctcaggtgacagcgagcatacttagagtgcttcagcaatggctgccttgtcctctgccattaatacatcgacaaaacccagcagcacacagacacaatctcattcaggccaagggtctcaaagagccgctgctgttgcagcgctatccagtgttatatcaggggaaaaattttctgtgcatacc

SEQ ID NO: 119745 - DNA, 3839 bp, Zea Mays
cgctgcatccccccttccgctgaaacaacaatcgtccgctgcattcctcatttcctccgcgtgggttctgtcacttctgtgacttctgtctgcgtctcgctctccggcgactggtgggccgccgccaccctaagccagttgcggaggtttacattggtctcttcgccggcgacgagcacccaccaggtactcccacccctttctctgcccttctcttcatgttgtgcgaagctgagcactgaaaccctaacctaaagctatttgacaagcctcctagcttcgattttcttgcaagaattatcggtacacatccctttactggattaacccctggctttgtggaaagcgatgttttccctctgtatctgattaataattgtcacgtaaaaacaagtttttttttttttgcttcgtctggaggtttagtttccaaaggattgtaattgatagaataacttcatgtgtttagtctttaattctacacgaaaactaaactacaaaacaatgtatgtagtcctactttaaagtttcagatgtctcgtgtatatgttatgcctgatgggagttccataacttaaggcccctgtgttacactttttgatgtgcatatatgatgaattttgatttgaatgacgtaggcttccataagcagaacttacgcacatctttgtggtaggagtcttgacaagtttttccaatggaccaagtaccgaatggaaggcataaggtttcttttgcgaagccaagagtagttgtgctttcagattctgactctgactctgaaggttttgtagaagagctaactcctgttcactcaaagtcaaacgggaaggcttcatctgcgagcctaaaaactggtggaaaggcttcagccctttctaaaggtgaggcaagcaaaggaaaagcatacagtagtgacaaaggtggaaagggttcttcatcacatgcagtgcctaccaagtctgatgcagaactaaagctagagcttgatatccctccaaattctagaatgctaatgaattgtgaagcagctgaactattgcaagaaattcacgagcacatggccatactatcagaggaccccaagatcaaaattcctgagtcatttgacaaagcttttcagtattcaaaagatggaaatcatttcaccactgcaagctctgtgaaacaagccattgagtatcctaatcatttttttttacaatagatatattagaactcgcatcttatttgagagttatactattttacttaccagtacagttccttaactggttgctgcagacctcttaaaaaatgtggggtcagtgatggagagatatgcatgatagcaaacattgggcctgagaccgttgaagaggtttacgcactagtgccatctctcaaggctaataggtcagctatcgaaggttcagtcaccgaggttcttaccgccctcgcaaacataaaagctgctaagtgaatctccaatggaactagaccgacaataaatcggaagcagctgtcttgttgatcgaggagcgcggaatctgcaaactggcccttcagtgttttggatgtgctgcggaaacgtgttatgatgtgtatataaaaaacgtagcatgtgctgcatgaactcctgtaggatgtctaactactgaagtgcagattcagcctcaactagtctactcgaactgacgaatactgtctgaacatgtggctactgcttgaacatgacatgttgccatctgttggattgtgcttctgtacgcctcaacttgtctgttgcacttccgacttccgagtctgtgagaagttctgcccgttaccattcgtgcatggttctaggtttcagaagtgagtggtaggaccgtcaccggtgtcgtaccttaatgttctgcattctaattgaaaaccatttgtgaaggctacttgattatagcatgattcgttaaactgtaaccggaaccagcgaattacaccacctgaagtccagaaaggagcaaccagcatgcaaagctgtttgtacgcgagatgcatgcaagggacggatagacagtataataacaaccggaaattcacgtcgatcagctagtcactgcctttgcagggtaatcgaacggcagtggctgcacgtcgtcactgagcgaactggcgtgccggaaaccgtacgccctcagcacctggtcgtcggcgaagttgagcgcgcggcgcatgccctggtcgcagctgtccccggagtagtgctcgttgcgctgcccactgcacggctgacaccccgtgaagtgcgtcacgaacgggcggcgccacccgtgcaccccggtctccgccagcccggccccgcccagggcggcgttccttgccaccgcgtactccgcgtgctccctctccgcgtgccgcctccgcagcgcggcagctcccggccgccgctccatcgcctcgtacctctccgtcatgttggcgagccgccccacgatctccatccagtagccctcgaagtagtagccgctctccaggaacaccttgtcccgccaccggctgccctcctgcagcagcatgtacacgagcgcggactggtcgtccgactcgtcgaacaccttgtccttgaacgtggacttgagcacggcgccccagtgctggtagtccggggagtcgggacccatggcggcccacgcgtccatgaagtcgagcgaccactggcagttccggatgaggaacacgccggcgttgaggctggtccaggagctggcctcgaacacgaggctcggccagccgtggacgacgaggttgtgggcgcggtaccggcgcagcgggaggcggaagtccatgtcggtgagcacggcgtcggagtcgacccaccacacccactccgcctccgggtgcgccaccatggcggcgcggatcaccggtatcttggcccagtaccggtccatcgacggccgcagcagcgccatgttgtacagcagctgcacgccgtggagacggcagtagtcggccttgttcttgagcagccgcatcagcgtgtggtctccgcccggggaccggcacggcgtcggctgcgagccggacaccatgaggacgcgccccttctcgccaccgccggcgaactccgggtgcgcgcgcagccacccggcgcgcttctcgtcccaccccgtgatgggccggtccacggtgtacgccagcgccgggtcgtcgtagaacgtgtgggcggcggcaccaccaccaccgccggcggcgcccacggatgatgagccagagccagagccagaggacgggactgctccgtcgccgtagtagccctccggctgagcgaacgggttggcgaacgcgagcagcgccacggtggccaccacggcacccgcggcgaagaggagcgcgtctccgagccacgacggcttcgcggtcgcagcgcgtggcggcatcgtgtgctctcggctctcgctgccgggatgcactacggctctacggcagtatcgtccctgtcacgctcacgccacgtacaatactgacgccccgatgcgtgcggggacggtgtatgtgtaaagccgagccgtcccactttcggcggcgagaacgcgtacgccaaagaccctccgccggtgccagccttgccgcccccgtccgtctgcgtggcgaggggagggagaggccaaacggggagggcagcggtggttgggtagcggcatgcgtccaaacgggactctcgtgccgtcatgcatgcgggcgaaggagaaacgcacgcatgcgtagcgtctgccttgcaggccttggagccatcggcagggtagatcgctggatggcagctggccgcggcgccggcaccggatcggaggcggcccccgggccgggttggactgttg

SEQ ID NO: 119746 - DNA, 3734 bp, Zea Mays
cgctgcatccccccttccgctgaaacaacaatcgtccgctgcattcctcatttcctccgcgtgggttctgtcacttctgtgacttctgtctgcgtctcgctctccggcgactggtgggccgccgccaccctaagccagttgcggaggtttacattggtctcttcgccggcgacgagcacccaccaggtactcccacccctttctctgcccttctcttcatgttgtgcgaagctgagcactgaaaccctaacctaaagctatttgacaagcctcctagcttcgattttcttgcaagaattatcggtacacatccctttactggattaacccctggctttgtggaaagcgatgttttccctctgtatctgattaataattgtcacgtaaaaacaagtttttttttttttgcttcgtctggaggtttagtttccaaaggattgtaattgatagaataacttcatgtgtttagtctttaattctacacgaaaactaaactacaaaacaatgtatgtagtcctactttaaagtttcagatgtctcgtgtatatgttatgcctgatgggagttccataacttaaggcccctgtgttacactttttgatgtgcatatatgatgaattttgatttgaatgacgtaggcttccataagcagaacttacgcacatctttgtggtaggagtcttgacaagtttttccaatggaccaagtaccgaatggaaggcataaggtttcttttgcgaagccaagagtagttgtgctttcagattctgactctgactctgaaggttttgtagaagagctaactcctgttcactcaaagtcaaacgggaaggcttcatctgcgagcctaaaaactggtggaaaggcttcagccctttctaaaggtgaggcaagcaaaggaaaagcatacagtagtgacaaaggtggaaagggttcttcatcacatgcagtgcctaccaagtctgatgcagaactaaagctagagcttgatatccctccaaattctagaatgctaatgaattgtgaagcagctgaactattgcaagaaattcacgagcacatggccatactatcagaggaccccaagatcaaaattcctgagtcatttgacaaagcttttcagtattcaaaagatggaaatcatttcaccactgcaagctctgtgaaacaagccattgaacctcttaaaaaatgtggggtcagtgatggagagatatgcatgatagcaaacattgggcctgagaccgttgaagaggtttacgcactagtgccatctctcaaggctaataggtcagctatcgaaggttcagtcaccgaggttcttaccgccctcgcaaacataaaagctgctaagtgaatctccaatggaactagaccgacaataaatcggaagcagctgtcttgttgatcgaggagcgcggaatctgcaaactggcccttcagtgttttggatgtgctgcggaaacgtgttatgatgtgtatataaaaaacgtagcatgtgctgcatgaactcctgtaggatgtctaactactgaagtgcagattcagcctcaactagtctactcgaactgacgaatactgtctgaacatgtggctactgcttgaacatgacatgttgccatctgttggattgtgcttctgtacgcctcaacttgtctgttgcacttccgacttccgagtctgtgagaagttctgcccgttaccattcgtgcatggttctaggtttcagaagtgagtggtaggaccgtcaccggtgtcgtaccttaatgttctgcattctaattgaaaaccatttgtgaaggctacttgattatagcatgattcgttaaactgtaaccggaaccagcgaattacaccacctgaagtccagaaaggagcaaccagcatgcaaagctgtttgtacgcgagatgcatgcaagggacggatagacagtataataacaaccggaaattcacgtcgatcagctagtcactgcctttgcagggtaatcgaacggcagtggctgcacgtcgtcactgagcgaactggcgtgccggaaaccgtacgccctcagcacctggtcgtcggcgaagttgagcgcgcggcgcatgccctggtcgcagctgtccccggagtagtgctcgttgcgctgcccactgcacggctgacaccccgtgaagtgcgtcacgaacgggcggcgccacccgtgcaccccggtctccgccagcccggccccgcccagggcggcgttccttgccaccgcgtactccgcgtgctccctctccgcgtgccgcctccgcagcgcggcagctcccggccgccgctccatcgcctcgtacctctccgtcatgttggcgagccgccccacgatctccatccagtagccctcgaagtagtagccgctctccaggaacaccttgtcccgccaccggctgccctcctgcagcagcatgtacacgagcgcggactggtcgtccgactcgtcgaacaccttgtccttgaacgtggacttgagcacggcgccccagtgctggtagtccggggagtcgggacccatggcggcccacgcgtccatgaagtcgagcgaccactggcagttccggatgaggaacacgccggcgttgaggctggtccaggagctggcctcgaacacgaggctcggccagccgtggacgacgaggttgtgggcgcggtaccggcgcagcgggaggcggaagtccatgtcggtgagcacggcgtcggagtcgacccaccacacccactccgcctccgggtgcgccaccatggcggcgcggatcaccggtatcttggcccagtaccggtccatcgacggccgcagcagcgccatgttgtacagcagctgcacgccgtggagacggcagtagtcggccttgttcttgagcagccgcatcagcgtgtggtctccgcccggggaccggcacggcgtcggctgcgagccggacaccatgaggacgcgccccttctcgccaccgccggcgaactccgggtgcgcgcgcagccacccggcgcgcttctcgtcccaccccgtgatgggccggtccacggtgtacgccagcgccgggtcgtcgtagaacgtgtgggcggcggcaccaccaccaccgccggcggcgcccacggatgatgagccagagccagagccagaggacgggactgctccgtcgccgtagtagccctccggctgagcgaacgggttggcgaacgcgagcagcgccacggtggccaccacggcacccgcggcgaagaggagcgcgtctccgagccacgacggcttcgcggtcgcagcgcgtggcggcatcgtgtgctctcggctctcgctgccgggatgcactacggctctacggcagtatcgtccctgtcacgctcacgccacgtacaatactgacgccccgatgcgtgcggggacggtgtatgtgtaaagccgagccgtcccactttcggcggcgagaacgcgtacgccaaagaccctccgccggtgccagccttgccgcccccgtccgtctgcgtggcgaggggagggagaggccaaacggggagggcagcggtggttgggtagcggcatgcgtccaaacgggactctcgtgccgtcatgcatgcgggcgaaggagaaacgcacgcatgcgtagcgtctgccttgcaggccttggagccatcggcagggtagatcgctggatggcagctggccgcggcgccggcaccggatcggaggcggcccccgggccgggttggactgttg

SEQ ID NO: 119747 - DNA, 3325 bp, Zea Mays
cgctgcatccccccttccgctgaaacaacaatcgtccgctgcattcctcatttcctccgcgtgggttctgtcacttctgtgacttctgtctgcgtctcgctctccggcgactggtgggccgccgccaccctaagccagttgcggaggtttacattggtctcttcgccggcgacgagcacccaccaggagtcttgacaagtttttccaatggaccaagtaccgaatggaaggcataaggtttcttttgcgaagccaagagtagttgtgctttcagattctgactctgactctgaaggttttgtagaagagctaactcctgttcactcaaagtcaaacgggaaggcttcatctgcgagcctaaaaactggtggaaaggcttcagccctttctaaaggtgaggcaagcaaaggaaaagcatacagtagtgacaaaggtggaaagggttcttcatcacatgcagtgcctaccaagtctgatgcagaactaaagctagagcttgatatccctccaaattctagaatgctaatgaattgtgaagcagctgaactattgcaagaaattcacgagcacatggccatactatcagaggaccccaagatcaaaattcctgagtcatttgacaaagcttttcagtattcaaaagatggaaatcatttcaccactgcaagctctgtgaaacaagccattgaacctcttaaaaaatgtggggtcagtgatggagagatatgcatgatagcaaacattgggcctgagaccgttgaagaggtttacgcactagtgccatctctcaaggctaataggtcagctatcgaaggttcagtcaccgaggttcttaccgccctcgcaaacataaaagctgctaagtgaatctccaatggaactagaccgacaatagtaataaccattctgcagatatttgaatacacgcgtatatcctgatcgtgcaccgttcttatttgtcttcgctgcctccagaatcggaagcagctgtcttgttgatcgaggagcgcggaatctgcaaactggcccttcagtgttttggatgtgctgcggaaacgtgttatgatgtgtatataaaaaacgtagcatgtgctgcatgaactcctgtaggatgtctaactactgaagtgcagattcagcctcaactagtctactcgaactgacgaatactgtctgaacatgtggctactgcttgaacatgacatgttgccatctgttggattgtgcttctgtacgcctcaacttgtctgttgcacttccgacttccgagtctgtgagaagttctgcccgttaccattcgtgcatggttctaggtttcagaagtgagtggtaggaccgtcaccggtgtcgtaccttaatgttctgcattctaattgaaaaccatttgtgaaggctacttgattatagcatgattcgttaaactgtaaccggaaccagcgaattacaccacctgaagtccagaaaggagcaaccagcatgcaaagctgtttgtacgcgagatgcatgcaagggacggatagacagtataataacaaccggaaattcacgtcgatcagctagtcactgcctttgcagggtaatcgaacggcagtggctgcacgtcgtcactgagcgaactggcgtgccggaaaccgtacgccctcagcacctggtcgtcggcgaagttgagcgcgcggcgcatgccctggtcgcagctgtccccggagtagtgctcgttgcgctgcccactgcacggctgacaccccgtgaagtgcgtcacgaacgggcggcgccacccgtgcaccccggtctccgccagcccggccccgcccagggcggcgttccttgccaccgcgtactccgcgtgctccctctccgcgtgccgcctccgcagcgcggcagctcccggccgccgctccatcgcctcgtacctctccgtcatgttggcgagccgccccacgatctccatccagtagccctcgaagtagtagccgctctccaggaacaccttgtcccgccaccggctgccctcctgcagcagcatgtacacgagcgcggactggtcgtccgactcgtcgaacaccttgtccttgaacgtggacttgagcacggcgccccagtgctggtagtccggggagtcgggacccatggcggcccacgcgtccatgaagtcgagcgaccactggcagttccggatgaggaacacgccggcgttgaggctggtccaggagctggcctcgaacacgaggctcggccagccgtggacgacgaggttgtgggcgcggtaccggcgcagcgggaggcggaagtccatgtcggtgagcacggcgtcggagtcgacccaccacacccactccgcctccgggtgcgccaccatggcggcgcggatcaccggtatcttggcccagtaccggtccatcgacggccgcagcagcgccatgttgtacagcagctgcacgccgtggagacggcagtagtcggccttgttcttgagcagccgcatcagcgtgtggtctccgcccggggaccggcacggcgtcggctgcgagccggacaccatgaggacgcgccccttctcgccaccgccggcgaactccgggtgcgcgcgcagccacccggcgcgcttctcgtcccaccccgtgatgggccggtccacggtgtacgccagcgccgggtcgtcgtagaacgtgtgggcggcggcaccaccaccaccgccggcggcgcccacggatgatgagccagagccagagccagaggacgggactgctccgtcgccgtagtagccctccggctgagcgaacgggttggcgaacgcgagcagcgccacggtggccaccacggcacccgcggcgaagaggagcgcgtctccgagccacgacggcttcgcggtcgcagcgcgtggcggcatcgtgtgctctcggctctcgctgccgggatgcactacggctctacggcagtatcgtccctgtcacgctcacgccacgtacaatactgacgccccgatgcgtgcggggacggtgtatgtgtaaagccgagccgtcccactttcggcggcgagaacgcgtacgccaaagaccctccgccggtgccagccttgccgcccccgtccgtctgcgtggcgaggggagggagaggccaaacggggagggcagcggtggttgggtagcggcatgcgtccaaacgggactctcgtgccgtcatgcatgcgggcgaaggagaaacgcacgcatgcgtagcgtctgccttgcaggccttggagccatcggcagggtagatcgctggatggcagctggccgcggcgccggcaccggatcggaggcggcccccgggccgggttggactgttg

SEQ ID NO: 119748 - DNA, 3282 bp, Zea Mays
cgctgcatccccccttccgctgaaacaacaatcgtccgctgcattcctcatttcctccgcgtgggttctgtcacttctgtgacttctgtctgcgtctcgctctccggcgactggtgggccgccgccaccctaagccagttgcggaggtttacattggtctcttcgccggcgacgagcacccaccaggcttccataagcagaacttacgcacatctttgtggtaggagtcttgacaagtttttccaatggaccaagtaccgaatggaaggcataaggtttcttttgcgaagccaagagtagttgtgctttcagattctgactctgactctgaaggttttgtagaagagctaactcctgttcactcaaagtcaaacgggaaggcttcatctgcgagcctaaaaactggtggaaaggcttcagccctttctaaaggtgaggcaagcaaaggaaaagcatacagtagtgacaaaggtggaaagggttcttcatcacatgcagtgcctaccaagtctgatgcagaactaaagctagagcttgatatccctccaaattctagaatgctaatgaattgtgaagcagctgaactattgcaagaaattcacgagcacatggccatactatcagaggaccccaagatcaaaattcctgagtcatttgacaaagcttttcagtattcaaaagatggaaatcatttcaccactgcaagctctgtgaaacaagccattgaacctcttaaaaaatgtggggtcagtgatggagagatatgcatgatagcaaacattgggcctgagaccgttgaagaggtttacgcactagtgccatctctcaaggctaataggtcagctatcgaaggttcagtcaccgaggttcttaccgccctcgcaaacataaaagctgctaagtgaatctccaatggaactagaccgacaataaatcggaagcagctgtcttgttgatcgaggagcgcggaatctgcaaactggcccttcagtgttttggatgtgctgcggaaacgtgttatgatgtgtatataaaaaacgtagcatgtgctgcatgaactcctgtaggatgtctaactactgaagtgcagattcagcctcaactagtctactcgaactgacgaatactgtctgaacatgtggctactgcttgaacatgacatgttgccatctgttggattgtgcttctgtacgcctcaacttgtctgttgcacttccgacttccgagtctgtgagaagttctgcccgttaccattcgtgcatggttctaggtttcagaagtgagtggtaggaccgtcaccggtgtcgtaccttaatgttctgcattctaattgaaaaccatttgtgaaggctacttgattatagcatgattcgttaaactgtaaccggaaccagcgaattacaccacctgaagtccagaaaggagcaaccagcatgcaaagctgtttgtacgcgagatgcatgcaagggacggatagacagtataataacaaccggaaattcacgtcgatcagctagtcactgcctttgcagggtaatcgaacggcagtggctgcacgtcgtcactgagcgaactggcgtgccggaaaccgtacgccctcagcacctggtcgtcggcgaagttgagcgcgcggcgcatgccctggtcgcagctgtccccggagtagtgctcgttgcgctgcccactgcacggctgacaccccgtgaagtgcgtcacgaacgggcggcgccacccgtgcaccccggtctccgccagcccggccccgcccagggcggcgttccttgccaccgcgtactccgcgtgctccctctccgcgtgccgcctccgcagcgcggcagctcccggccgccgctccatcgcctcgtacctctccgtcatgttggcgagccgccccacgatctccatccagtagccctcgaagtagtagccgctctccaggaacaccttgtcccgccaccggctgccctcctgcagcagcatgtacacgagcgcggactggtcgtccgactcgtcgaacaccttgtccttgaacgtggacttgagcacggcgccccagtgctggtagtccggggagtcgggacccatggcggcccacgcgtccatgaagtcgagcgaccactggcagttccggatgaggaacacgccggcgttgaggctggtccaggagctggcctcgaacacgaggctcggccagccgtggacgacgaggttgtgggcgcggtaccggcgcagcgggaggcggaagtccatgtcggtgagcacggcgtcggagtcgacccaccacacccactccgcctccgggtgcgccaccatggcggcgcggatcaccggtatcttggcccagtaccggtccatcgacggccgcagcagcgccatgttgtacagcagctgcacgccgtggagacggcagtagtcggccttgttcttgagcagccgcatcagcgtgtggtctccgcccggggaccggcacggcgtcggctgcgagccggacaccatgaggacgcgccccttctcgccaccgccggcgaactccgggtgcgcgcgcagccacccggcgcgcttctcgtcccaccccgtgatgggccggtccacggtgtacgccagcgccgggtcgtcgtagaacgtgtgggcggcggcaccaccaccaccgccggcggcgcccacggatgatgagccagagccagagccagaggacgggactgctccgtcgccgtagtagccctccggctgagcgaacgggttggcgaacgcgagcagcgccacggtggccaccacggcacccgcggcgaagaggagcgcgtctccgagccacgacggcttcgcggtcgcagcgcgtggcggcatcgtgtgctctcggctctcgctgccgggatgcactacggctctacggcagtatcgtccctgtcacgctcacgccacgtacaatactgacgccccgatgcgtgcggggacggtgtatgtgtaaagccgagccgtcccactttcggcggcgagaacgcgtacgccaaagaccctccgccggtgccagccttgccgcccccgtccgtctgcgtggcgaggggagggagaggccaaacggggagggcagcggtggttgggtagcggcatgcgtccaaacgggactctcgtgccgtcatgcatgcgggcgaaggagaaacgcacgcatgcgtagcgtctgccttgcaggccttggagccatcggcagggtagatcgctggatggcagctggccgcggcgccggcaccggatcggaggcggcccccgggccgggttggactgttg

SEQ ID NO: 119749 - DNA, 3268 bp, Zea Mays
cgctgcatccccccttccgctgaaacaacaatcgtccgctgcattcctcatttcctccgcgtgggttctgtcacttctgtgacttctgtctgcgtctcgctctccggcgactggtgggccgccgccaccctaagccagttgcggaggtttacattggtctcttcgccggcgacgagcacccaccagaacttacgcacatctttgtggtaggagtcttgacaagtttttccaatggaccaagtaccgaatggaaggcataaggtttcttttgcgaagccaagagtagttgtgctttcagattctgactctgactctgaaggttttgtagaagagctaactcctgttcactcaaagtcaaacgggaaggcttcatctgcgagcctaaaaactggtggaaaggcttcagccctttctaaaggtgaggcaagcaaaggaaaagcatacagtagtgacaaaggtggaaagggttcttcatcacatgcagtgcctaccaagtctgatgcagaactaaagctagagcttgatatccctccaaattctagaatgctaatgaattgtgaagcagctgaactattgcaagaaattcacgagcacatggccatactatcagaggaccccaagatcaaaattcctgagtcatttgacaaagcttttcagtattcaaaagatggaaatcatttcaccactgcaagctctgtgaaacaagccattgaacctcttaaaaaatgtggggtcagtgatggagagatatgcatgatagcaaacattgggcctgagaccgttgaagaggtttacgcactagtgccatctctcaaggctaataggtcagctatcgaaggttcagtcaccgaggttcttaccgccctcgcaaacataaaagctgctaagtgaatctccaatggaactagaccgacaataaatcggaagcagctgtcttgttgatcgaggagcgcggaatctgcaaactggcccttcagtgttttggatgtgctgcggaaacgtgttatgatgtgtatataaaaaacgtagcatgtgctgcatgaactcctgtaggatgtctaactactgaagtgcagattcagcctcaactagtctactcgaactgacgaatactgtctgaacatgtggctactgcttgaacatgacatgttgccatctgttggattgtgcttctgtacgcctcaacttgtctgttgcacttccgacttccgagtctgtgagaagttctgcccgttaccattcgtgcatggttctaggtttcagaagtgagtggtaggaccgtcaccggtgtcgtaccttaatgttctgcattctaattgaaaaccatttgtgaaggctacttgattatagcatgattcgttaaactgtaaccggaaccagcgaattacaccacctgaagtccagaaaggagcaaccagcatgcaaagctgtttgtacgcgagatgcatgcaagggacggatagacagtataataacaaccggaaattcacgtcgatcagctagtcactgcctttgcagggtaatcgaacggcagtggctgcacgtcgtcactgagcgaactggcgtgccggaaaccgtacgccctcagcacctggtcgtcggcgaagttgagcgcgcggcgcatgccctggtcgcagctgtccccggagtagtgctcgttgcgctgcccactgcacggctgacaccccgtgaagtgcgtcacgaacgggcggcgccacccgtgcaccccggtctccgccagcccggccccgcccagggcggcgttccttgccaccgcgtactccgcgtgctccctctccgcgtgccgcctccgcagcgcggcagctcccggccgccgctccatcgcctcgtacctctccgtcatgttggcgagccgccccacgatctccatccagtagccctcgaagtagtagccgctctccaggaacaccttgtcccgccaccggctgccctcctgcagcagcatgtacacgagcgcggactggtcgtccgactcgtcgaacaccttgtccttgaacgtggacttgagcacggcgccccagtgctggtagtccggggagtcgggacccatggcggcccacgcgtccatgaagtcgagcgaccactggcagttccggatgaggaacacgccggcgttgaggctggtccaggagctggcctcgaacacgaggctcggccagccgtggacgacgaggttgtgggcgcggtaccggcgcagcgggaggcggaagtccatgtcggtgagcacggcgtcggagtcgacccaccacacccactccgcctccgggtgcgccaccatggcggcgcggatcaccggtatcttggcccagtaccggtccatcgacggccgcagcagcgccatgttgtacagcagctgcacgccgtggagacggcagtagtcggccttgttcttgagcagccgcatcagcgtgtggtctccgcccggggaccggcacggcgtcggctgcgagccggacaccatgaggacgcgccccttctcgccaccgccggcgaactccgggtgcgcgcgcagccacccggcgcgcttctcgtcccaccccgtgatgggccggtccacggtgtacgccagcgccgggtcgtcgtagaacgtgtgggcggcggcaccaccaccaccgccggcggcgcccacggatgatgagccagagccagagccagaggacgggactgctccgtcgccgtagtagccctccggctgagcgaacgggttggcgaacgcgagcagcgccacggtggccaccacggcacccgcggcgaagaggagcgcgtctccgagccacgacggcttcgcggtcgcagcgcgtggcggcatcgtgtgctctcggctctcgctgccgggatgcactacggctctacggcagtatcgtccctgtcacgctcacgccacgtacaatactgacgccccgatgcgtgcggggacggtgtatgtgtaaagccgagccgtcccactttcggcggcgagaacgcgtacgccaaagaccctccgccggtgccagccttgccgcccccgtccgtctgcgtggcgaggggagggagaggccaaacggggagggcagcggtggttgggtagcggcatgcgtccaaacgggactctcgtgccgtcatgcatgcgggcgaaggagaaacgcacgcatgcgtagcgtctgccttgcaggccttggagccatcggcagggtagatcgctggatggcagctggccgcggcgccggcaccggatcggaggcggcccccgggccgggttggactgttg

SEQ ID NO: 119750 - DNA, 3244 bp, Zea Mays
cgctgcatccccccttccgctgaaacaacaatcgtccgctgcattcctcatttcctccgcgtgggttctgtcacttctgtgacttctgtctgcgtctcgctctccggcgactggtgggccgccgccaccctaagccagttgcggaggtttacattggtctcttcgccggcgacgagcacccaccaggagtcttgacaagtttttccaatggaccaagtaccgaatggaaggcataaggtttcttttgcgaagccaagagtagttgtgctttcagattctgactctgactctgaaggttttgtagaagagctaactcctgttcactcaaagtcaaacgggaaggcttcatctgcgagcctaaaaactggtggaaaggcttcagccctttctaaaggtgaggcaagcaaaggaaaagcatacagtagtgacaaaggtggaaagggttcttcatcacatgcagtgcctaccaagtctgatgcagaactaaagctagagcttgatatccctccaaattctagaatgctaatgaattgtgaagcagctgaactattgcaagaaattcacgagcacatggccatactatcagaggaccccaagatcaaaattcctgagtcatttgacaaagcttttcagtattcaaaagatggaaatcatttcaccactgcaagctctgtgaaacaagccattgaacctcttaaaaaatgtggggtcagtgatggagagatatgcatgatagcaaacattgggcctgagaccgttgaagaggtttacgcactagtgccatctctcaaggctaataggtcagctatcgaaggttcagtcaccgaggttcttaccgccctcgcaaacataaaagctgctaagtgaatctccaatggaactagaccgacaataaatcggaagcagctgtcttgttgatcgaggagcgcggaatctgcaaactggcccttcagtgttttggatgtgctgcggaaacgtgttatgatgtgtatataaaaaacgtagcatgtgctgcatgaactcctgtaggatgtctaactactgaagtgcagattcagcctcaactagtctactcgaactgacgaatactgtctgaacatgtggctactgcttgaacatgacatgttgccatctgttggattgtgcttctgtacgcctcaacttgtctgttgcacttccgacttccgagtctgtgagaagttctgcccgttaccattcgtgcatggttctaggtttcagaagtgagtggtaggaccgtcaccggtgtcgtaccttaatgttctgcattctaattgaaaaccatttgtgaaggctacttgattatagcatgattcgttaaactgtaaccggaaccagcgaattacaccacctgaagtccagaaaggagcaaccagcatgcaaagctgtttgtacgcgagatgcatgcaagggacggatagacagtataataacaaccggaaattcacgtcgatcagctagtcactgcctttgcagggtaatcgaacggcagtggctgcacgtcgtcactgagcgaactggcgtgccggaaaccgtacgccctcagcacctggtcgtcggcgaagttgagcgcgcggcgcatgccctggtcgcagctgtccccggagtagtgctcgttgcgctgcccactgcacggctgacaccccgtgaagtgcgtcacgaacgggcggcgccacccgtgcaccccggtctccgccagcccggccccgcccagggcggcgttccttgccaccgcgtactccgcgtgctccctctccgcgtgccgcctccgcagcgcggcagctcccggccgccgctccatcgcctcgtacctctccgtcatgttggcgagccgccccacgatctccatccagtagccctcgaagtagtagccgctctccaggaacaccttgtcccgccaccggctgccctcctgcagcagcatgtacacgagcgcggactggtcgtccgactcgtcgaacaccttgtccttgaacgtggacttgagcacggcgccccagtgctggtagtccggggagtcgggacccatggcggcccacgcgtccatgaagtcgagcgaccactggcagttccggatgaggaacacgccggcgttgaggctggtccaggagctggcctcgaacacgaggctcggccagccgtggacgacgaggttgtgggcgcggtaccggcgcagcgggaggcggaagtccatgtcggtgagcacggcgtcggagtcgacccaccacacccactccgcctccgggtgcgccaccatggcggcgcggatcaccggtatcttggcccagtaccggtccatcgacggccgcagcagcgccatgttgtacagcagctgcacgccgtggagacggcagtagtcggccttgttcttgagcagccgcatcagcgtgtggtctccgcccggggaccggcacggcgtcggctgcgagccggacaccatgaggacgcgccccttctcgccaccgccggcgaactccgggtgcgcgcgcagccacccggcgcgcttctcgtcccaccccgtgatgggccggtccacggtgtacgccagcgccgggtcgtcgtagaacgtgtgggcggcggcaccaccaccaccgccggcggcgcccacggatgatgagccagagccagagccagaggacgggactgctccgtcgccgtagtagccctccggctgagcgaacgggttggcgaacgcgagcagcgccacggtggccaccacggcacccgcggcgaagaggagcgcgtctccgagccacgacggcttcgcggtcgcagcgcgtggcggcatcgtgtgctctcggctctcgctgccgggatgcactacggctctacggcagtatcgtccctgtcacgctcacgccacgtacaatactgacgccccgatgcgtgcggggacggtgtatgtgtaaagccgagccgtcccactttcggcggcgagaacgcgtacgccaaagaccctccgccggtgccagccttgccgcccccgtccgtctgcgtggcgaggggagggagaggccaaacggggagggcagcggtggttgggtagcggcatgcgtccaaacgggactctcgtgccgtcatgcatgcgggcgaaggagaaacgcacgcatgcgtagcgtctgccttgcaggccttggagccatcggcagggtagatcgctggatggcagctggccgcggcgccggcaccggatcggaggcggcccccgggccgggttggactgttg

SEQ ID NO: 119751 - DNA, 3506 bp, Zea Mays
cgctgcatccccccttccgctgaaacaacaatcgtccgctgcattcctcatttcctccgcgtgggttctgtcacttctgtgacttctgtctgcgtctcgctctccggcgactggtgggccgccgccaccctaagccagttgcggaggtttacattggtctcttcgccggcgacgagcacccaccaggcttccataagcagaacttacgcacatctttgtggtaggagtcttgacaagtttttccaatggaccaagtaccgaatggaaggcataaggtttcttttgcgaagccaagagtagttgtgctttcagattctgactctgactctgaaggttttgtagaagagctaactcctgttcactcaaagtcaaacgggaaggcttcatctgcgagcctaaaaactggtggaaaggcttcagccctttctaaaggtgaggcaagcaaaggaaaagcatacagtagtgacaaaggtggaaagggttcttcatcacatgcagtgcctaccaagtctgatgcagaactaaagctagagcttgatatccctccaaattctagaatgctaatgaattgtgaagcagctgaactattgcaagaaattcacgagcacatggccatactatcagaggaccccaagatcaaaattcctgagtcatttgacaaagcttttcagtattcaaaagatggaaatcatttcaccactgcaagctctgtgaaacaagccattgagtatcctaatcatttttttttacaatagatatattagaactcgcatcttatttgagagttatactattttacttaccagtacagttccttaactggttgctgcagacctcttaaaaaatgtggggtcagtgatggagaggtttgttacttattccttcttcctttcctttctatgtagcactaacctcggctcacttcaccattgtggtctgcgtacaacagatatgcatgatagcaaacattgggcctgagaccgttgaagaggtttacgcactagtgccatctctcaaggctaataggtcagctatcgaaggttcagtcaccgaggttcttaccgccctcgcaaacataaaagctgctaagtgaatctccaatggaactagaccgacaataaatcggaagcagctgtcttgttgatcgaggagcgcggaatctgcaaactggcccttcagtgttttggatgtgctgcggaaacgtgttatgatgtgtatataaaaaacgtagcatgtgctgcatgaactcctgtaggatgtctaactactgaagtgcagattcagcctcaactagtctactcgaactgacgaatactgtctgaacatgtggctactgcttgaacatgacatgttgccatctgttggattgtgcttctgtacgcctcaacttgtctgttgcacttccgacttccgagtctgtgagaagttctgcccgttaccattcgtgcatggttctaggtttcagaagtgagtggtaggaccgtcaccggtgtcgtaccttaatgttctgcattctaattgaaaaccatttgtgaaggctacttgattatagcatgattcgttaaactgtaaccggaaccagcgaattacaccacctgaagtccagaaaggagcaaccagcatgcaaagctgtttgtacgcgagatgcatgcaagggacggatagacagtataataacaaccggaaattcacgtcgatcagctagtcactgcctttgcagggtaatcgaacggcagtggctgcacgtcgtcactgagcgaactggcgtgccggaaaccgtacgccctcagcacctggtcgtcggcgaagttgagcgcgcggcgcatgccctggtcgcagctgtccccggagtagtgctcgttgcgctgcccactgcacggctgacaccccgtgaagtgcgtcacgaacgggcggcgccacccgtgcaccccggtctccgccagcccggccccgcccagggcggcgttccttgccaccgcgtactccgcgtgctccctctccgcgtgccgcctccgcagcgcggcagctcccggccgccgctccatcgcctcgtacctctccgtcatgttggcgagccgccccacgatctccatccagtagccctcgaagtagtagccgctctccaggaacaccttgtcccgccaccggctgccctcctgcagcagcatgtacacgagcgcggactggtcgtccgactcgtcgaacaccttgtccttgaacgtggacttgagcacggcgccccagtgctggtagtccggggagtcgggacccatggcggcccacgcgtccatgaagtcgagcgaccactggcagttccggatgaggaacacgccggcgttgaggctggtccaggagctggcctcgaacacgaggctcggccagccgtggacgacgaggttgtgggcgcggtaccggcgcagcgggaggcggaagtccatgtcggtgagcacggcgtcggagtcgacccaccacacccactccgcctccgggtgcgccaccatggcggcgcggatcaccggtatcttggcccagtaccggtccatcgacggccgcagcagcgccatgttgtacagcagctgcacgccgtggagacggcagtagtcggccttgttcttgagcagccgcatcagcgtgtggtctccgcccggggaccggcacggcgtcggctgcgagccggacaccatgaggacgcgccccttctcgccaccgccggcgaactccgggtgcgcgcgcagccacccggcgcgcttctcgtcccaccccgtgatgggccggtccacggtgtacgccagcgccgggtcgtcgtagaacgtgtgggcggcggcaccaccaccaccgccggcggcgcccacggatgatgagccagagccagagccagaggacgggactgctccgtcgccgtagtagccctccggctgagcgaacgggttggcgaacgcgagcagcgccacggtggccaccacggcacccgcggcgaagaggagcgcgtctccgagccacgacggcttcgcggtcgcagcgcgtggcggcatcgtgtgctctcggctctcgctgccgggatgcactacggctctacggcagtatcgtccctgtcacgctcacgccacgtacaatactgacgccccgatgcgtgcggggacggtgtatgtgtaaagccgagccgtcccactttcggcggcgagaacgcgtacgccaaagaccctccgccggtgccagccttgccgcccccgtccgtctgcgtggcgaggggagggagaggccaaacggggagggcagcggtggttgggtagcggcatgcgtccaaacgggactctcgtgccgtcatgcatgcgggcgaaggagaaacgcacgcatgcgtagcgtctgccttgcaggccttggagccatcggcagggtagatcgctggatggcagctggccgcggcgccggcaccggatcggaggcggcccccgggccgggttggactgttgggtcttcctcttgcggactgactggtggtgaagatc

SEQ ID NO: 119752 - DNA, 884 bp, Zea Mays
atcacaaatacaaggcgaattttactgttgatctgacttccatgaaacttggatcattggatgagttattgaaagcaatgagaactgttcttgaccctccttggggagcctcaaatttgatccctagggatgtgctgtggtctgacccttcctttcagatgggtctttctcccaataaagatcaagacattgtattgctttggggtcctgatatcactcagcaatttccgaggacaaatcatttgaagcgatgcacatgcgaattgatcatgtgcaggtctaaaagtgtaatggtggtttatcgagggagcaattacaaaaggcctctaaaatcccaagctctaaatggtgcctcatcatcggttaaaggcgaagatggtgcattgttcatccaaaatgcctcaaacactattgagaatgatattcaggggatatatttgtctgcaaaacatgcaattgtgtccctattgaatgtgcagaatattgagcacatgaatgaggaagggctggagttcgataagataattgatgagctgggtcttcattttgtggattggtgaggaacggagctgactagccaaagttagtgaggaatgccattttgctctagggagaaatgagaactatcatgtttagcagcagtaatataataaggagcatgctgcaactgcccaagcgcggcaatgacgatgaatatggacatcgagcgtgtgctcaaggagaagtacagcgacactttcaaggaaatccatcgagtgttcgacggggaccagtcggcggcagagacaacgttcgaggcggtgaactggaacctagacattctgcggtcaccgattgcgaactcgtggatgtgttggtcgtcgatggcgaggactgtctggtga

SEQ ID NO: 119753 - DNA, 1479 bp, Zea Mays
tgttgcttactgttccttattcctcccttggtctactgagactatgttcaacgccggttccttcgtccacacgaccgcgcgctcggaaaactccgcggagggcgaaggaggcgaaccaagggcgacgtatccgccgccggagaaggtagccctcgatccgccgtctcccgcgattcgtttgtcttgcgacagctgggcgaccgtcgtcgccgccgcccttctccaggtgcccaggtcttcgccggtccctttgccgcctccttgccgccgacgagcaccagccaggaagaaaagaagctgaaccatggggaagagaaagtcagctgctaagccacctcctaagaagcggatggacaagcttgacactgtcttttcctgcccattctgcaaccacgggagtagtgttgagtgccgaattgacatgaagaatctgattggcgaagcatcttgtagaatctgtcaggaaaacttcagcacaactgttaatgcactcactgagcctattgatatatatagtgaatggattgatgagtgtgagcgtgtcaacactgttgaaggcgacgatgatgcgtgagcttgccccatgcgatgaaactgttacctacaatcgtaatgtaatgtgctggtattctcgaatgccatagcccatagtcagccatggcttggaataacgtagtggctgactgatatgccagtaggcacctgtctagtacttacagaactacaaaaagtttgtactatacatatatggacaaccttataagtggctatgtgtgtacctatcctaacgcttatcccagatggtgtatcagcgtttttctgtgagattgttttcaagcaaggggttgttcattcattgggtcttctcgggaaaaagagaattatgctgcagtcaaccagatggccgctgttgtgccgacaatacagggtaaaccaaatgcaaccagaatataatctgcagcggaagatattcatagatacaattgttttcagttcattcaacgctgaaagcggtttcggtctggaggctgagctttggatcattggatggcactatgcagctttggcacctggagtaccgctcattagtttttcataaagtcccgttcatttcttgtgcacattgctggagattgagagatcgagatcaagactgtacgcatcataaaccgatcagtctattctttgctgtgtacacctgggttgtctttgtgcctgtggtctctgccaggagggtgttcttcgaagtttgaagtacatgtggtttgtgtcttaatgcagttcggtttcatggacgggttgtcaagtgttttaccaggaacagttgtcggtgcagcagtatgcttaatcatgaataaatgatttttgtatttaaatctgggcgcgcggtttggtttgcatttcttctggttttcttgtgcgtttcttctgttcttttaagtgaatgttgtctgagatttgtcgttacaggttcaccac

SEQ ID NO: 119754 - DNA, 243 bp, Zea Mays
atggcgccgcagctcgccgcagctggcccgaccttatacgcgcctcgctttggcaccgccctcccctgccgcgcccggacaaggaagccggtctctcggcgccgggccgcgctccccaaggatgaggattattacttgatcgatgcggatgagtccattggggatggcttctcgttcagtggagggaagtacggggatggaccaagtaagtcggatgagtggtttgctcaagggaaaatggta

SEQ ID NO: 119755 - DNA, 3279 bp, Zea Mays
cacaaattcaggtaaattttacaactcaatcacattgtataaaagtgttattttttcttaatttcgtttcaaacattttatacttactgtgtattatatattaacttatacataatatttatgtatatttaaaatcttagatacgaatttgatatcgcgcatagtatgtgaaaaaaccaataaaaaatgaccataacggtagggtgcaacgcgaaatgacaagcacctccactccaactgaatttacccccttccacggcacctccagtccacttcgtcttcctctcttccccagttcagatctactccattgccaccttcctctcccggccgcttctcatgacgtctccgagcgaaaaccctaaccctaatcctaatacaccatttgagatcgggaagcttttcaggccaacgaatcccatgcccaacgccacccccaaccccatcttccccggcgtcgctggaggcccggcgccatccggcccctactcctaccctccggtgaccccgcccttccaccgcggaccctacatccactacccgcaggacccccacgccatgacccgcccagttgtctccttccccatgccaaacccaaacctcaaccccaacccgaacgctaaccccaacgccgtcgccccgggccccaaccccggcgcgcgcctcatgcagctgctcgggaactccgggccgacacaattcgagaccgccgtctccatgcccccgcccacatcggaattcgcacaactgcagttgctcccagcgatgccatccgcgccgccggccaggatgctgagcagcaccagcagcaaggtgcccaggggggcggttacttggcaccggggaacgagcggtgcacgatgttgactcgaggctgcccggggaagcgcagccaccgcagctggaggtaacaccgattaccaagtacacatcggatcccgggctcgtgctgggcagacagatcgctgtgaaccggacgtacatcgtgtatggcctcaagctcggtaacatccgtgtgctgaacatcaacaccgcactccgttcactcctccgtggtcacacacagagggtgacagacatggctttctttgctgaggatgtccatcgtttggcaagtgcgagcgtagatgggcggatatttgtgtggaggatagatgaagggcccgatgaggaaaacaaaccacaaattactggaaagattgaaatcgccatccagattgtaggtgaagctgaagcttaccatccaaggatatgttggcactcacataagcaagagattctttttgttgggattgggaactgtgtcttaagaatagacacaactaaagtgggtagaggaaaagactttactgtggaaggacctgtaaaatgtcatcttgaaaagcttattgatggtgtccgcttagttggtaagcatgatggtggtgtgactgatttgtccatatctcaatggatgagcacccgcctggcttccggatccaaggatggcacggttaaaatctgggatgatcgcaagcaagtgccattatctatttttaagccccatgatggtcaagcggtttattcagttgcttttcttacagcgcctgaacgaccaaatcatattaatctaataactgcgggtcctgttaaccgagaagttaaaatttgggcttctactaatgaagatggctggttgttgccaagtgattctgagacttggaagtgcactcagactttggaacttgttagctctctggaacctagagttgaagaggcatttttcaaccaggttgcagtgctgcatcaagctagcctgattttgcttgcgaatgctaaaaagaattctatttatgccgtgcatgttgagtatggcccagatcctgcctctactcgattagactatatagctgatttcacagttgcaatgcctattttaagcctaactggaacacacgaaagccaacctgatggtgaacaagttgttcaagtctattgtgttcaaactatggccattcagcaatatggtctagagttatcactctgttcgcctcctacagctgatagtactgggtttggtagagatcctgctatttcccgtgtttatgaggcagctctggaaatggcaggaacagagccatctataggaactagttgcacagactcttactctgtcactgctttgagtaaacaaccaaatgttgaccagtctgcagagcttgatctgaaaccatcagctccaccgcttgcatactcagaaggtgatagttccatgcctcttccatttacagctcttgcacctaagattgaggttcctggatcaggaccagcacctggaactcgtgatatagagcaatcagcttttaactatacgaatacgacaaacagaaacatggagcgtgatgctctgaaaagacaagataccccgatgcccattagaaaggatatcttaggaaaagatgagccaagagatggtcaaagtaatgttccaatgcttccaaatccccatatggtgtttcaagttggagggaatgctacacgcttggttactccatctgaaataatatcgggtactctctcatctgctgaaaacaatgatgtttctgaatctggtggggaaaatcgagatgtttccagcggaagttcttgggttgcagaagtggaaccaaagcatattgatgagagtaaaccagatcaaaacttgggacttgaagcagtcaaggaaactcagattgtttgtgagaacatggcgaaaacttccatggagcaaactgttgaaatgatcactaagcgctcagttacaactgataagcacagtgtggaagaatcacagtcatcatctgatcgaccagcatcagatcagacttgtggcactgatgaaaatgttctgaagaagtttgtggaaatgcctgagaaaattgattactctgcttccagggagcaaccatctttgtttacaaaagagaaagttttgcaccctcaaacatctggtcagccatctcctcctgtgagtgctttcaattcaactgagccacatgagcctttgagctctacatacctacctgtcagctccttcccagaagatgctgccacacaaggaatgctgcaacagaaattgttaaacattttagtgcaacattgttcgctgcagcttgcagccacagcaggtatcttgtacattttttagttcaacaagctgcagcgaacaggccctaattttactgtaatttcatcttttgagctgggaatctgggaggttatacatcagtcatttttaattcgaagaaataaataatgttc

SEQ ID NO: 119756 - DNA, 4690 bp, Zea Mays
cacaaattcaggtaaattttacaactcaatcacattgtataaaagtgttattttttcttaatttcgtttcaaacattttatacttactgtgtattatatattaacttatacataatatttatgtatatttaaaatcttagatacgaatttgatatcgcgcatagtatgtgaaaaaaccaataaaaaatgaccataacggtagggtgcaacgcgaaatgacaagcacctccactccaactgaatttacccccttccacggcacctccagtccacttcgtcttcctctcttccccagttcagatctactccattgccaccttcctctcccggccgcttctcatgacgtctccgagcgaaaaccctaaccctaatcctaatacaccatttgagatcgggaagcttttcaggccaacgaatcccatgcccaacgccacccccaaccccatcttccccggcgtcgctggaggcccggcgccatccggcccctactcctaccctccggtgaccccgcccttccaccgcggaccctacatccactacccgcaggacccccacgccatgacccgcccagttgtctccttccccatgccaaacccaaacctcaaccccaacccgaacgctaaccccaacgccgtcgccccgggccccaaccccggcgcgcgcctcatgcagctgctcgggaactccgggccgacacaattcgagaccgccgtctccatgcccccgcccacatcggaattcgcacaactgcagttgctcccagcgatgccatccgcgccgccggccaggatgctgagcagcaccagcagcaaggtgcccaggggggcggttacttggcaccggggaacgagcggtgcacgatgttgactcgaggctgcccggggaagcgcagccaccgcagctggaggtaacaccgattaccaagtacacatcggatcccgggctcgtgctgggcagacagatcgctgtgaaccggacgtacatcgtgtatggcctcaagctcggtaacatccgtgtgctgaacatcaacaccgcactccgttcactcctccgtggtcacacacagagggtgacagacatggctttctttgctgaggatgtccatcgtttggcaagtgcgagcgtagatgggcggatatttgtgtggaggatagatgaagggcccgatgaggaaaacaaaccacaaattactggaaagattgaaatcgccatccagattgtaggtgaagctgaagcttaccatccaaggatatgttggcactcacataagcaagagattctttttgttgggattgggaactgtgtcttaagaatagacacaactaaagtgggtagaggaaaagactttactgtggaaggacctgtaaaatgtcatcttgaaaagcttattgatggtgtccgcttagttggtaagcatgatggtggtgtgactgatttgtccatatctcaatggatgagcacccgcctggcttccggatccaaggatggcacggttaaaatctgggatgatcgcaagcaagtgccattatctatttttaagccccatgatggtcaagcggtttattcagttgcttttcttacagcgcctgaacgaccaaatcatattaatctaataactgcgggtcctgttaaccgagaagttaaaatttgggcttctactaatgaagatggctggttgttgccaagtgattctgagacttggaagtgcactcagactttggaacttgttagctctctggaacctagagttgaagaggcatttttcaaccaggttgcagtgctgcatcaagctagcctgattttgcttgcgaatgctaaaaagaattctatttatgccgtgcatgttgagtatggcccagatcctgcctctactcgattagactatatagctgatttcacagttgcaatgcctattttaagcctaactggaacacacgaaagccaacctgatggtgaacaagttgttcaagtctattgtgttcaaactatggccattcagcaatatggtctagagttatcactctgttcgcctcctacagctgatagtactgggtttggtagagatcctgctatttcccgtgtttatgaggcagctctggaaatggcaggaacagagccatctataggaactagttgcacagactcttactctgtcactgctttgagtaaacaaccaaatgttgaccagtctgcagagcttgatctgaaaccatcagctccaccgcttgcatactcagaaggtgatagttccatgcctcttccatttacagctcttgcacctaagattgaggttcctggatcaggaccagcacctggaactcgtgatatagagcaatcagcttttaactatacgaatacgacaaacagaaacatggagcgtgatgctctgaaaagacaagataccccgatgcccattagaaaggatatcttaggaaaagatgagccaagagatggtcaaagtaatgttccaatgcttccaaatccccatatggtgtttcaagttggagggaatgctacacgcttggttactccatctgaaataatatcgggtactctctcatctgctgaaaacaatgatgtttctgaatctggtggggaaaatcgagatgtttccagcggaagttcttgggttgcagaagtggaaccaaagcatattgatgagagtaaaccagatcaaaacttgggacttgaagcagtcaaggaaactcagattgtttgtgagaacatggcgaaaacttccatggagcaaactgttgaaatgatcactaagcgctcagttacaactgataagcacagtgtggaagaatcacagtcatcatctgatcgaccagcatcagatcagacttgtggcactgatgaaaatgttctgaagaagtttgtggaaatgcctgagaaaattgattactctgcttccagggagcaaccatctttgtttacaaaagagaaagttttgcaccctcaaacatctggtcagccatctcctcctgtgagtgctttcaattcaactgagccacatgagcctttgagctctacatacctacctgtcagctccttcccagaagatgctgccacacaaggaatgctgcaacagctcttggatcaccagaaggacatggaaaagcagctgagtactgtggttcctgtgtccatcgcaaaggagggcaaaagacttgagacattattagggcgcactgtagagaaatcattcaaggctaatattgatgcgttttgggttcgtctccaggaggaaaacactaagcgtgaaaaggctgatagagagcgaatgcagcaactgtgtactctcattacaagctcaataaataaggacttaccttctaatctggagaagtcacttaagaaagaaatttcttcactcgggcctgttgttgctcgcgcaattacacctgttgttgagaagtccataacctctgttgtttctgattcagttcagaaaggggtgggtgacaaggtgtgcaatcagctggagaagtctattactggaaaacttgaagctacgcttgccaagcaaatccaaatgcagttccatacatctggaagacaggctcttcaggatgctttgcgtactagctttgaatcattgcttgttccagcatttgagcaagcatgcaagacaatgtttgagcaagtagatggtgcatttcaaaagggaatgtctgagcactccaatgctattcagcagcaagttgaggctgcacatactccgttagcgctaactctaaaagaaaccatcaattctgcttcatcaatcacccagagtttttcatcggagttacttgatggcaatcgcaagctattggcacttgttacttctgggaatgccaaggcacataataccagtgctttgcagcccattaatggtcctatgggtggtccccaagaggttgaggctccgttagatccgatgagagagctgagcagactgatatctgaacgcaagtttgacgaagcatttacaatggctcttcaaaggagtgatgtttccatagtgtcgtggctgtgctcccaggttgatttgcgggcactatgtgcaatggttccagtacctcttaaccagggggtccttctggccttattgcagcagctagcaattgacattcacaatgagacatcacggaaggttcaatggatgacagatgttgccatggcaatcaacccagcagaccagatcatcgcggtgcatgtgcgaccaatctttgagcaagtctacagccaattggcccaccaacggacactccccaccacgaccgcatcagatggcaccagtatccgtgtgatcatgcatgtaattaactcggttctgcttagctacaagtgattgcagctatgcaactgtgggaagtatggcctatttgatatcttgtatagagaaattttgaatggcaaatagaacacaacccacgagagtatacttggaagagggtggaggttactctctagtgtaaattttgcctttgaaattaaaatatttgtagtaattgggcatcctctaattttctaggtcatgttcatttgtcgtatgatcaatgggtcttgtatttcagtcataacttgtagctcggacagtttggaaccaacagcagctgcttggtgttggttggtccacacaaaattttgaagtcccatgtggacattgtttctggtggcaactgcaaaattggtgttattctaa

SEQ ID NO: 119757 - DNA, 993 bp, Zea Mays
atgtcaccaaggttgcaggttggctacagaaataggagaagaatagtatgtgagccccatataatcctccccacgtcgtcgtgctcgttttgcgcgtcaaccagcccgccccccaaccccacccagcgcgacgaagccggggggcgatcgctccagcgccgccgcgccagcgacctcaccccccgggagccgccggcggtacccccctccctatcacgcctcatcgaatcctcagatctaagttttttttggttttgtgagttatccaaagttggaccgcaaagatgagtactgctaatcactatcagcacatcaagtcaaccaagcctgttgtaggcaaagcaagaaaattgaaggatctcatgataaaaagtgataataggatatgcgctgactgtggtgcacctgatcccaaatgggcatctactaatattggagtgtttctttgcttaaaatgtggagatgttcatagggcacttggacctgacatttcaaaggttttatctgtaactttggatgattggtctgacagtgatatcgactccatggttgaggttggtggaaactcatatgcaaattcaatttatgaggcttttcttccaaaagatcacccaaaacccaaaccagattcaacgatggaatataggacgaaatttataaggtctactaactgttccattccgtactctgtaatgtcgccaatatttcctatataataaccccttactttttttatacagagctaagtatgagacacaagattttttgaagccaagtttgcgcatttcatcaagatcatcttttaaatctaccaattctgtgaagagtgtagatagcaatttctctagcacttcaaggaaggatatctctgtaagttgtgctgagaaatagatgttacatttttttatatgtatctcctagaaagaagctgacatgatttctgcatagcaattgcatgtctgtgatggagcatgttcattgaaattttgtatg

SEQ ID NO: 119758 - DNA, 2026 bp, Zea Mays
atgtcaccaaggttgcaggttggctacagaaataggagaagaatagtatgtgagccccatataatcctccccacgtcgtcgtgctcgttttgcgcgtcaaccagcccgccccccaaccccacccagcgcgacgaagccggggggcgatcgctccagcgccgccgcgccagcgacctcaccccccgggagccgccggcggtacccccctccctatcacgcctcatcgaatcctcagatctaagttttttttggttttgtgagttatccaaagttggaccgcaaagatgagtactgctaatcactatcagcacatcaagtcaaccaagcctgttgtaggcaaagcaagaaaattgaaggatctcatgataaaaagtgataataggatatgcgctgactgtggtgcacctgatcccaaatgggcatctactaatattggagtgtttctttgcttaaaatgtggagatgttcatagggcacttggacctgacatttcaaaggttttatctgtaactttggatgattggtctgacagtgatatcgactccatggttgaggttggtggaaactcatatgcaaattcaatttatgaggcttttcttccaaaagatcacccaaaacccaaaccagattcaacgatggaatataggacgaaatttataagagctaagtatgagacacaagattttttgaagccaagtttgcgcatttcatcaagatcatcttttaaatctaccaattctgtgaagagtgtagatagcaatttctctagcacttcaaggaaggatatctctgaagatacaagagaatttgttggagagctgaatattacagtcgtgaaaggtactaacttggccgttagagacatgctaacaagtgatccatatgttgttttaacactcggagggcaggtatgtttatatacataaaacattttatttgtcaattgtcattctagttttgctctaaaacaatcaacgatcgctcctaactgcagaaagctcaatcgacagttaaaaaaagtgatcttaatccggtatggaatgaaatgcttaagatttctgttcctcgaaattacggacctctaaaacttgtaagtttttatcattagaacctttaaattaatttctttatatccaaaggattctagttcaaagaagagtataatatgctaagtgtcatgaattatggcaaagttcttagggtgtttccttgaattcagtcacataatactccctacatcccaaaataactgtgcatctcacttttctggaagtcaaacttattaaagattaactaaatctgtttaaaatatttttaacatctttatcttctaatatatttattacgaaattaatctaaccatacttagtgtacatcataagtattagtatatttatgtatatatttagtcaaattttaaaaagtttgtcaaaggagtgcacagttattttggggtggagggagtaacagactaactggtagtatggaatgactcaaacacttaaacatacacataatgcttcaagaaaagggcagtgtgatgagaaagtagcgaagacaaaagctgctggccaatgcgacatgaaagtaatacacataatttcaatgtccaggaagtgtatgaccatgatacgttctcagccgatgatatcatgggtgaagcagagatagatctccaaccaatgatcacagccgccatggcctttggagatacttcacgtcttggtgacatgcaaattgggcggtggttcacgaccaaagacaacgccctgatgaaagatagcacagtgaatgtcgttgcaggcaaggtaaaacaggaggtgcacttaaagctgcagaacgtagaatctggtgagctggagttagagctagaatgggttccgatcctctagactatgataactcccctgatccttttgtctaaaaaactatcctcaagatgcatcaaaattttcaagctgtccactttgatgatcttggacatttttgctggatggcttgaatttgttaaaaaaatgtcattgtt

SEQ ID NO: 119759 - DNA, 1848 bp, Zea Mays
atgtcaccaaggttgcaggttggctacagaaataggagaagaatagtatgtgagccccatataatcctccccacgtcgtcgtgctcgttttgcgcgtcaaccagcccgccccccaaccccacccagcgcgacgaagccggggggcgatcgctccagcgccgccgcgccagcgacctcaccccccgggagccgccggcggtacccccctccctatcacgcctcatcgaatcctcagatctaagttttttttggttttgtgagttatccaaagttggaccgcaaagatgagtactgctaatcactatcagcacatcaagtcaaccaagcctgttgtaggcaaagcaagaaaattgaaggatctcatgataaaaagtgataataggatatgcgctgactgtggtgcacctgatcccaaatgggcgtaagtgaagtcattgtttctcattaaacttttattattatgtttaccatttcagaagatagctacttgtgtgacttctctacagaaagatccttccttagttgataaactagatcatcaatttcttttatgtgaagacagaatgcaatggagcgtgcacgtgcacacacagagctttgctgctatatccatgccattgattacatattttatttttcgtctcattatgcacagtactttattttattttttcgtctcattatacataatttgtaaaaggtatttgctttttgtgcatttcagatctactaatattggagtgtttctttgcttaaaatgtggagatgttcatagggcacttggacctgacatttcaaagtgatatcgactccatggttgaggttggtggaaactcatatgcaaattcaatttatgaggcttttcttccaaaagatcacccaaaacccaaaccagattcaacgatggaatataggacgaaatttataagagctaagtatgagacacaagattttttgaagccaagtttgcgcatttcatcaagatcatcttttaaatctaccaattctgtgaagagtgtagatagcaatttctctagcacttcaaggaaggatatctctgaagatacaagagaatttgttggagagctgaatattacagtcgtgaaaggtactaacttggccgttagagacatgctaacaagtgatccatatgttgttttaacactcggagggcagaaagctcaatcgacagttaaaaaaagtgatcttaatccggtatggaatgaaatgcttaagatttctgttcctcgaaattacggacctctaaaacttgaagtgtatgaccatgatacgttctcagccgatgatatcatgggtgaagcagagatagatctccaaccaatgatcacagccgccatggcctttggagatacttcacgtcttggtgacatgcaaattgggcggtggttcacgaccaaagacaacgccctgatgaaagatagcacagtgaatgtcgttgcaggcaaggtaaaacaggaggtgcacttaaagctgcagaacgtagaatctggtgagctggagttagagctagaatgggttccgatcctctagactatgataactcccctgatccttttgtctaaaaaactatcctcaagatgcatcaaaattttcaagctgtccactttgatgatcttggacatttttgctggatggcttgaatttgttaaaaaaatgtcattgttaaatatcctggtgtaactgtcagctataatcacagcctttcattttcccccctttggttgtcatgccttgtaactactcgccgtctcttgattgttgttgtattgtcccattgaaaggacatgtgtattataagagatgggcaattatagctagtgaactctt

SEQ ID NO: 119760 - DNA, 1633 bp, Zea Mays
atgtcaccaaggttgcaggttggctacagaaataggagaagaatagtatgtgagccccatataatcctccccacgtcgtcgtgctcgttttgcgcgtcaaccagcccgccccccaaccccacccagcgcgacgaagccggggggcgatcgctccagcgccgccgcgccagcgacctcaccccccgggagccgccggcggtacccccctccctatcacgcctcatcgaatcctcagatctaagttttttttggttttgtgagttatccaaagttggaccgcaaagatgagtactgctaatcactatcagcacatcaagtcaaccaagcctgttgtaggcaaagcaagaaaattgaaggatctcatgataaaaagtgataataggatatgcgctgactgtggtgcacctgatcccaaatgggcatctactaatattggagtgtttctttgcttaaaatgtggagatgttcatagggcacttggacctgacatttcaaaggttttatctgtaactttggatgattggtctgacagtgatatcgactccatggttgaggttggtggaaactcatatgcaaattcaatttatgaggcttttcttccaaaagatcacccaaaacccaaaccagattcaacgatggaatataggacgaaatttataagagctaagtatgagacacaagattttttgaagccaagtttgcgcatttcatcaagatcatcttttaaatctaccaattctgtgaagagtgtagatagcaatttctctagcacttcaaggaaggatatctctgaagatacaagagaatttgttggagagctgaatattacagtcgtgaaaggtactaacttggccgttagagacatgctaacaagtgatccatatgttgttttaacactcggagggcagaaagctcaatcgacagttaaaaaaagtgatcttaatccggtatggaatgaaatgcttaagatttctgttcctcgaaattacggacctctaaaacttgaagtgtatgaccatgatacgttctcagccgatgatatcatgggtgaagcagagatagatctccaaccaatgatcacagccgccatggcctttggagatacttcacgtcttggtgacatgcaaattgggcggtggttcacgaccaaagacaacgccctgatgaaagatagcacagtgaatgtcgttgcaggcaaggtaaaacaggaggtgcacttaaagctgcagaacgtagaatctggtgagctggagttagagctagaatgggttccgatcctctagactatgataactcccctgatccttttgtctaaaaaactatcctcaagatgcatcaaaattttcaagctgtccactttgatgatcttggacatttttgctggatggcttgaatttgttaaaaaaatgtcattgttaaatatcctggtgtaactgtcagctataatcacagcctttcattttcccccctttggttgtcatgccttgtaactactcgccgtctcttgattgttgttgtattgtcccattgaaaggacatgtgtattataagagatgggcaattatagctagtgaactctttatgctgattcctttttggcgcgcgctgcagtagctatcgtgttattggtttt

SEQ ID NO: 119761 - DNA, 1459 bp, Zea Mays
acagaaataggagaagaatagtatgtgagccccatataatcctccccacgtcgtcgtgctcgttttgcgcgtcaaccagcccgccccccaaccccacccagcgcgacgaagccggggggcgatcgctccagcgccgccgcgccagcgacctcaccccccgggagccgccggcggtacccccctccctatcacgcctcatcgaatcctcagatctaagttttttttggttttgtgagttatccaaagttggaccgcaaagatgagtactgctaatcactatcagcacatcaagtcaaccaagcctgttgtaggcaaagcaagaaaattgaaggatctcatgataaaaagtgataataggatatgcgctgactgtggtgcacctgatcccaaatgggcatctactaatattggagtgtttctttgcttaaaatgtggagatgttcatagggcacttggacctgacatttcaaaggttttatctgtaactttggatgattggtctgacagtgatatcgactccatggttgaggttggtggaaactcatatgcaaattcaatttatgaggcttttcttccaaaagatcacccaaaacccaaaccagattcaacgatggaatataggacgaaatttataagagctaagtatgagacacaagattttttgaagccaagtttgcgcatttcatcaagatcatcttttaaatctaccaattctgtgaagagtgtagatagcaatttctctagcacttcaaggaaggatatctctgaagatacaagagaatttgttggagagctgaatattacagtcgtgaaaggtactaacttggccgttagagacatgctaacaagtgatccatatgttgttttaacactcggagggcaggaagtgtatgaccatgatacgttctcagccgatgatatcatgggtgaagcagagatagatctccaaccaatgatcacagccgccatggcctttggagatacttcacgtcttggtgacatgcaaattgggcggtggttcacgaccaaagacaacgccctgatgaaagatagcacagtgaatgtcgttgcaggcaaggtaaaacaggaggtgcacttaaagctgcagaacgtagaatctggtgagctggagttagagctagaatgggttccgatcctctagactatgataactcccctgatccttttgtctaaaaaactatcctcaagatgcatcaaaattttcaagctgtccactttgatgatcttggacatttttgctggatggcttgaatttgttaaaaaaatgtcattgttaaatatcctggtgtaactgtcagctataatcacagcctttcattttcccccctttggttgtcatgccttgtaactactcgccgtctcttgattgttgttgtattgtcccattgaaaggacatgtgtattataagagatgggcaattatagctagtgaactctt

SEQ ID NO: 119762 - DNA, 1481 bp, Zea Mays
acagaaataggagaagaatagtatgtgagccccatataatcctccccacgtcgtcgtgctcgttttgcgcgtcaaccagcccgccccccaaccccacccagcgcgacgaagccggggggcgatcgctccagcgccgccgcgccagcgacctcaccccccgggagccgccggcggtacccccctccctatcacgcctcatcgaatcctcagatctaagttttttttggttttgtgagttatccaaagttggaccgcaaagatgagtactgctaatcactatcagcacatcaagtcaaccaagcctgttgtaggcaaagcaagaaaattgaaggatctcatgataaaaagtgataataggatatgcgctgactgtggtgcacctgatcccaaatgggcatctactaatattggagtgtttctttgcttaaaatgtggagatgttcatagggcacttggacctgacatttcaaaggttttatctgtaactttggatgattggtctgacagtgatatcgactccatggttgagagctaagtatgagacacaagattttttgaagccaagtttgcgcatttcatcaagatcatcttttaaatctaccaattctgtgaagagtgtagatagcaatttctctagcacttcaaggaaggatatctctgaagatacaagagaatttgttggagagctgaatattacagtcgtgaaaggtactaacttggccgttagagacatgctaacaagtgatccatatgttgttttaacactcggagggcagaaagctcaatcgacagttaaaaaaagtgatcttaatccggtatggaatgaaatgcttaagatttctgttcctcgaaattacggacctctaaaacttgaagtgtatgaccatgatacgttctcagccgatgatatcatgggtgaagcagagatagatctccaaccaatgatcacagccgccatggcctttggagatacttcacgtcttggtgacatgcaaattgggcggtggttcacgaccaaagacaacgccctgatgaaagatagcacagtgaatgtcgttgcaggcaaggtaaaacaggaggtgcacttaaagctgcagaacgtagaatctggtgagctggagttagagctagaatgggttccgatcctctagactatgataactcccctgatccttttgtctaaaaaactatcctcaagatgcatcaaaattttcaagctgtccactttgatgatcttggacatttttgctggatggcttgaatttgttaaaaaaatgtcattgttaaatatcctggtgtaactgtcagctataatcacagcctttcattttcccccctttggttgtcatgccttgtaactactcgccgtctcttgattgttgttgtattgtcccattgaaaggacatgtgtattataagagatgggcaattatagctagtgaactctttatgctgattcctttttggcgcgcgctgcagta

SEQ ID NO: 119763 - DNA, 2470 bp, Zea Mays
tttatgtcagtgttcgggctgccgtatgcaatgaatcagtgatcgggcagagtaacgcaaagagggagggcctgatcatttgagctgcttttgttgacaatgtcagagggtaatatatggataacatcgaaatatctgtcagtaatgatgagaggaggaataggacagatgccgatatctcggaggacgagccgaggcacaccaggatgcggtcgctgaggaagaaagccctgcatgcatcgtcaaggctgacacactcgctgaagaagagagggaagagaaaagtggactgcagagtgccaagaatagctatagaggatgtcagggatgctgaagaagagcaggctgtgagctcgtttcgggaggttttgtttgctaggggcttgttaccaatcaagcatgatggttaccatatgatgcttagatttttgaaagcgaggaagttcgattttggaaaagctgcacagatgtgggcagacatgctgcggtggagaaaggagtttggtacagacacaatttttgaagattttgaatttcatgagctagaggaggtcctgcagtattaccctcatggttaccatggggttgacaaggaaggaaggcctgtgtacattgagttgcttgggaaagttgaacccaacaaacttatgcaaattacgacagttgagcgctatattaagtatcatgtacaagagtttgagagagttttccgggagaaattccctgcatgctcaatttctgccaaaaggcatatagatactacaactacgatattggatgtccacggtgtgggctggaagaactttagcaagatcgcgagggatttggtgcgttgtatgcaaaaaatagatggtgactattatcctgagacattacatcaaatgtttattgtaaatgctggacctggtttcaagctgatatggagcactgttaagggacttcttgacccaaaaacgtcatctaaaatacacgttctaggaacaagataccaaagcagacttcttgaagctattgatgcaagccaattgccggattactttggtggttcatgcacatgttctaaccatggagggtgcctgaggtctaacaaaggtccctggagtgatccttcaataatgaagcttgtacatagcatggaattgttgaaggaagttgcgcacatatctgatatagaagaaacaattacaggctctgtgagattgcgtgctctcaagttacccgaacaaattagtgacacatcaaatgctgaatcaggctcagatgttgatgaccttggatcccctgtggctcctgaagatgttgaatatcctagtttggccccagttcgagaggaagtgagggaatcatggtctacaacgtacagtggttcgattggcatgtctcgtatggcggataaagttgtaggatccaacaggagatacaactctactggaaatgaaattaggcagttcaatacagaacaagattccctgacaaatgggggtttacctgcaccagcaggttggcgtgcccaaaatgatggtgaaggcaatgatgatgggttcttgaaatatatatcaagaagagtcattgctatatttcttaaagtactctcttttttgcggttcttcattcgtcgacgacaacacttggccaatgatcatccacatactgcaactgcacccagtaatctggcagatcttcagacatttaaggaagatcgtgtaaatccttgcctggaacggcttgataggcttgagttaatcagctgagcagaacttagtaggactttacttcacccagtaatcagctgagcagaaagcctccagagcttccacaggataaggatcgggccatacaagattcttttgacaggataaagtccattgagtttgatctggagaagacaaagaaggtattgcatgcaacagttatcaaacaaatgcagatggcagaaaccttggaagcagtaacggagcctgatcttaggcggaggaaattttgtacataatacacttacctgcaatgtacagaaacaaaagggctatttactaacgtctgctgcctgacagaattgaactagatcgcttggtacttgtacatggcccgatggccgccctttgcgattatctttctcactattctcagtctactatagagatgagtgccatggcatggtagcctcaataacaacagatatagtttacttgtgataaactgaagagatagtcatgaacagcgtcctggaaaatcaccagatactgcccaatctgaatctatagagctaagggaattctgtctgtgttatgctcctctaagtgctgagcctcctgatctgatgtatgtatctcaatgctccgtgcgttttcttttccttcttttttcagaacatttagtttcacccggaattcaatcgatttttttggttggtggatactgtatgaacatctgattgaacatggatttcttagaactttgcaactaaccaaaa

SEQ ID NO: 119764 - DNA, 2970 bp, Zea Mays
tttatgtcagtgttcgggctgccgtatgcaatgaatcagtgatcgggcagagtaacgcaaagagggagggcctgatcatttgagctgcttttgttgacaatgtcagagggtaatatatggataacatcgaaatatctgtcagtaatgatgagaggaggaataggacagatgccgatatctcggaggacgagccgaggcacaccaggatgcggtcgctgaggaagaaagccctgcatgcatcgtcaaggctgacacactcgctgaagaagagagggaagagaaaagtggactgcagagtgccaagaatagctatagaggatgtcagggatgctgaagaagagcaggctgtgagctcgtttcgggaggttttgtttgctaggggcttgttaccaatcaagcatgatggttaccatatgatgcttagatttttgaaagcgaggaagttcgattttggaaaagctgcacagatgtgggcagacatgctgcggtggagaaaggagtttggtacagacacaatttttgaagattttgaatttcatgagctagaggaggtcctgcagtattaccctcatggttaccatggggttgacaaggaaggaaggcctgtgtacattgagttgcttgggaaagttgaacccaacaaacttatgcaaattacgacagttgagcgctatattaagtatcatgtacaagagtttgagagagttttccgggagaaattccctgcatgctcaatttctgccaaaaggcatatagatactacaactacgatattggatgtccacggtgtgggctggaagaactttagcaagatcgcgagggatttggtgcgttgtatgcaaaaaatagatggtgactattatcctgagacattacatcaaatgtttattgtaaatgctggacctggtttcaagctgatatggagcactgttaagggacttcttgacccaaaaacgtcatctaaaatacacgttctaggaacaagataccaaagcagacttcttgaagctattgatgcaagccaattgccggattactttggtggttcatgcacatgttctaaccatggagggtgcctgaggtctaacaaaggtccctggagtgatccttcaataatgaagcttgtacatagcatggaattgttgaaggaagttgcgcacatatctgatatagaagaaacaattacaggctctgtgagattgcgtgctctcaagttacccgaacaaattagtgacacatcaaatgctgaatcaggctcagatgttgatgaccttggatcccctgtggctcctgaagatgttgaatatcctagtttggccccagttcgagaggaagtgagggaatcatggtctacaacgtacagtggttcgattggcatgtctcgtatggcggataaagttgtaggatccaacaggagatacaactctactggaaatgaaattaggcagttcaatacagaacaagattccctgacaaatgggggtttacctgcaccagcctatctcatgctcaaatatgggttcaaaccagcaggttggcgtgcccaaaatgatggtgaaggcaatgatgatgggttcttgaaatatatatcaagaagagtcattgctatatttcttaaagtactctcttttttgcggttcttcattcgtcgacgacaacacttggccaatgatcatccacatactgcaactgcacccagtaatctggcagatcttcagacatttaaggaagatcgtgtaaatccttgcctggaacggcttgataggcttgagttaatcagctgagcagaacttagtaggactttacttcacccagtaatcagctgagcagaaagcctccagagcttccacaggataaggatcgggccatacaagattcttttgacaggataaagtccattgagtttgatctggagaagacaaagaaggtattgcatgcaacagttatcaaacaaatgcagatggcagaaaccttggaagcagtaacggagcctgatcttaggcggaggaaattttgtacataatacacttacctgcaatgtacagaaacaaaagggctatttactaacgtctgctgcctgacagaattgaactagatcgcttggtacttgtacatggcccgatggccgccctttgcgattatctttctcactattctcagtctactatagagatgagtgccatggcatggtagcctcaataacaacagatatagtttacttgtgataaactgaagagatagtcatgaacagcgtcctggaaaatcaccagatactgcccaatctgaatctatagagctaagggaattctgtctgtgttatgctcctctaagtgctgagcctcctgatctgatgttgccccgtgaactttgagttccaaaactacacaatcatcacaagcaagtgcaaagggccaaagtttccagccggcccatgctgtgccgcactcaaggagttcgcgtgcccttactatacgtacctcaatgacgagagcaacgactgtgcatcgacaatgttcagctacatcaacctgtatggtaagtatccaccgggcctgttctccagcgagtgcaaagaaggcaagcaggggctctcttgcgcagatgtcctcgagagagacagtgccactgcaagcagtggtcatcacgctcaaatcagcttgcttgcgttgattactgtcttgagtgtggtagtagcgttgttccactgaactatatatgcattctccccaaatatggtgtgttacaactaatgaggtttgaattgcaccttttggtgctcatggtgggtgggattctaggttcttcctttttgtgtgtaaagtctcacataatgttattcatggcctattgcatacttttttaattcaatttaatatcgcagcgggtctgattaaggctatgactagtagatcgtccgtatgactgtacaaaatattgtttacattatagactattgttttacattgtgta

SEQ ID NO: 119765 - DNA, 1416 bp, Zea Mays
cagctacaggcctacagctagcgtgccctgccccctgccaacctcgccaccgtcacatagcgggagaggaaacagggaatcaccaaacaaaccgcgtttgctccgcgcctccactccaccccgcgacgctaattaactcctccagctgtaaacctgcaacacttgggttggaggctagagcttgcaaacaccaccagcgaagacgtcgtggcgcgcatgtgggcggtctctgcacccggcgtcccaccgccaccgctactgtcgtagtcctagatccgaccgcctcacgagctacattccctcgaggccggccttcctggtgtctcagcagcggcggcgcatggcgatggctgcggggcgtgggctcttggccctcttctcggtcgtcgtagtggctgggctcacctctgcggcgaatggtcctttcctgtccgatagcgtcttccagccgagcgccggatctacagggaggagcttactgcaggccaagaacagttgccccgtgaactttgagttccaaaactacacaatcatcacaagcaagtgcaaagggccaaagtttccagccggcccatgctgtgccgcactcaaggagttcgcgtgcccttactatacgtacctcaatgacgagagcaacgactgtgcatcgacaatgttcagctacatcaacctgtatggtaagtatccaccgggcctgttctccagcgagtgcaaagaaggcaagcaggggctctcttgcgcagatgtcctcgagagagacagtgccactgcaagcagtggtcatcacgctcaaatcagcttgcttgcgttgattactgtcttgagtgtggtagtagcgttgttccactgaactatatatgcattctccccaaatatggtgtgttacaactaatgaggtttgaattgcaccttttggtgctcatggtgggtgggattctaggttcttcctttttgtgtgtaaagtctcacataatgttattcatggcctattgcatacttttttaattcaatttaatatcgcagcgggtctgattaaggctatgactagtagatcgtccgtatgactgtacaaaatattgtttacattatagactattgttttacattgtgtactttgaaatgagagataattgtttacattatagactattgttttacattgtgtactttgaaatgagagataaagacgaggatgagtaaactgttggagtggagatagcttaagaggtgggtaaagcatttactcatatgtcccatgacaattcatccttctctatcaactagtacaatatttgtgtgtgcgatgtcatatcaatcatattggacggtatagtggtacaatggttgtatgacgtgatggtctagtggtaagacaatgtgatgtacccttttcacaaaaaataaatttaaaattaa

SEQ ID NO: 119766 - DNA, 158 bp, Zea Mays
ttctttctttttttttcttttcttgtttttattttctactaggctagaatgggcctacaagaaggctttactgttgtgctacttgcttattagcctctaattagtaatatataactaatatttggtctaacttttataattatcaatataattaaggc

SEQ ID NO: 119767 - DNA, 1763 bp, Zea Mays
acgattcaggagtcaggacccttgtttgcctatacgctgccagcctgccttttctaagttcttcttccatcgctccacccccacccccttctctctcgtagcaacgtttggggcgccgtcgctgccgctctactcgggtgcccaggtcttgttcgggcccttcgccggcgagccaggggacactttctttggtatgagaggatcaatgtccaattattatgatgattacgacgacattgatgagattgaggatgactatgatatggatgatcctgctgatgacatggtagacgagcagcgaggggttagggattctgatgcggaggataatgattatggacaaccaaatgacaagatcccagatacttcatcagcagatgcaagaaatggaagggacattcaaggaataccctgggagcagctaaacataacccgtaaaaaatatagacagtccagattagaacagtacaaaaattatgagaatgtacctaactctggagaagaagctatgaaggattgcaagccaacagagaaaggtggaatgtactatgagttcagacgaaatactcgatcgattaagtcaactattctacattttcagcttcgaaatttggtatgggctacgtccaagcatgacatctacctagtatcacattactcaattcgtcattggtcagcattgagtggtgtcgatactgaacttatcaacgtccaaggacacgtggcaccaagggagaagcatgcaggaagtttatcagagggtttttatcagactcaagttagtaccttggcagtcaaggacaatttactggtagctggtgggtttcaaggagagctgatctgtaaacaccttgatcgggaaggtattagtttttgctgtcgaacaacttatgatgataatgctattacaaatgcggttgagatatttaatacctctagtggcgctgttcacttcatcgcatcaaataacgattctggtgtgagatactatgacatggagagattccagctattcaagcatttgcagtttgaatggccagtgaatcatgcttctttgagtcctgacagaaaggtcgttgttattgtcggtgatgatcctgatggtctacttattgatgccaactctggaaagacactccattccataaaaggacatcgggactactcatttgcatcggcttggagccctgatgggcgaacatttgctactggcaaccaagacaagacatgccgaatctgggacgcgaggaatctctcaaaatccgtccatgtgttgaggggtaaccttggagccatccggtccatccgcttcacctcggatggccagttcatgtccatggctgaacctgctgactttgtgcacgtctacgacgtgaagagtgactacaacaaaaggcaggagctggacttctttggcgagatatccggcacatcgttcagcccagacactgacgcgcttttcgttggcgtgtgggataggatgtatggcagcctgcttcagtttggccgcctgtacaactactcgtatcttgactccgtgttttgatgtggaaccaaacggatgttggactgttgggtttggtgtgccgcggttctctgaatgttgtcagcatgattaggcggttatccttatatcaggattttaagttgacaaagataattgaattaataaatgttgtaccgtgcccgatgtgtatatataaaagaaatgtatacatatgcctattcagataccgagttgagatgtgacttggtctactcca

SEQ ID NO: 119768 - DNA, 915 bp, Zea Mays
caccaacccctgcctccgccgcagtgcctgccatcaccgtcgtgcgccattcccaatcttgctggcgtttcttatccacgagttttcttctctagtgactactttcttccatgctgtgctgtgtctaaccccggccgagctttcttcattgattctctccatgccgagctgacattgttgggccctgcgacatcatctttttcctaccactgctggttgttccctggttcaaaggacgacactggtggccgcgctctacccaagttcggcgagtgggacgtgaacaacccggcgtccgcggacgggttcacggtcatcttcagcaaggccagggacgagaagaaagctcccccgacccaaggccacatcaggaacaacaggtcggtgtcggctgacagcaaggactccagggccgagaagatgacctcctacaacgccaggaccaacgcgtcgaagaaatggttctgctgtgtctcgcccagccccacacaatcttgaggaagctaacgacagagaaatggtccattgcatcgctgcggctggcagaccggccgcgagtgaactctccggatacttgccagtgacagtgtatagccgccgttgcaaatgacagtgtatagcgttcttagctgcctgtgcataccgtcagttcaggttgatgtctgcttgtaatttttcttttctcgcctcttctctacggtgtgtaacccttcctcagcgttaatcctcctgctgcattttgctgtaacttgggcgagggtggatttgtttcggctctgaccaaaaccaggtcacagcgaattctcagattgctgcagtgaccgccaccaacctgacaaacaaaaatgctgcgacgttttcagagctgtagaggatgttctcatggaaatacgttatatattcatataattctta

SEQ ID NO: 119769 - DNA, 825 bp, Zea Mays
gcgcccgagcagagagagcctgactctgcagctatacgagctcagactccctctcctccctcctttctcttaccttcctcgtgagacatcaccgccgtctcggtacgtggcagcaaccaaccgttcgcttctctctcctggagcgtcgcgcggggcccggcgggggaccgtacgtacctgtgcgcgaagacggggacggtggcggagttcgagatggaggcggcgccgatgcgaaaggcgtcgtcgcaggcgtcgctggcggacccagacgacttcgacctgacgcgcctgctgaaccacaagccgcggatcaacgtggacaggcagcggtcgttcgacgaccgctccctcggcgagatatcgctcgccggcgcgggcacggccagccgcggtggctggggctacggcggcggggggatggagagctacgagagcatgtactcccccggcggcgggctgcggtcctactgcggcacgccggcctcgtccacgcggctctcgttcgagccccacccgctcatcggcgaggcctgggacgcgctgcgccgctccatggtgtccttccgcggccagccgctcggcaccatcgccgccgtcgaccactcctccggcgaagtgctcaactacgaccaggtagcatgatataaaacgacaacggcatgctgctgccttgctcggacacactttcttgctctgtgtctgcgtcgttgttgcttcttgggttgtcagactctgttactaccttgatcgagattcgatcttttttggaaagtaaggggattatggtgatcaagatagacatttcagactatatggttacttgga

SEQ ID NO: 119770 - DNA, 2236 bp, Zea Mays
gcgcccgagcagagagagcctgactctgcagctatacgagctcagactccctctcctccctcctttctcttaccttcctcgtgagacatcaccgccgtctcggtacgtggcagcaaccaaccgttcgcttctctctcctggagcgtcgcgcggggcccggcgggggaccgtacgtacctgtgcgcgaagacggggacggtggcggagttcgagatggaggcggcgccgatgcgaaaggcgtcgtcgcaggcgtcgctggcggacccagacgacttcgacctgacgcgcctgctgaaccacaagccgcggatcaacgtggacaggcagcggtcgttcgacgaccgctccctcggcgagatatcgctcgccggcgcgggcacggccagccgcggtggctggggctacggcggcggggggatggagagctacgagagcatgtactcccccggcggcgggctgcggtcctactgcggcacgccggcctcgtccacgcggctctcgttcgagccccacccgctcatcggcgaggcctgggacgcgctgcgccgctccatggtgtccttccgcggccagccgctcggcaccatcgccgccgtcgaccactcctccggcgaagtgctcaactacgaccaggtgttcgttagggacttcgtcccgagcgcgttggcgttcctgatgaacggggagccggagatcgttcggaacttcctgctgaagacgctgctgctgcaggggtgggagaagcggatcgaccgcttcaagctcggcgagggcgccatgccggcgagcttcaaggtgctcaaggacccgaagcgcggcgtcgacaagctggtggccgacttcggggagagcgccatcggccgcgtggcgccggtggattccgggttctggtggatcatcatcctgagggcctacaccaagtccaccggcgacatgaccctcgccgagacgcccatgtgccagaagggcatccggctcatcatgaaccagtgcctcgccgagggcttcgacaccttccccaccctgctctgcgccgacggctgctgcatgatcgatcgcaggatgggtgtgtatgggtacccgatcgagatccaggccctgttcttcatggcgctgcggtgcgcgctcctcatgctgaagccggatgcggaggggaaggagatcatggagcggatcgtgacgcggctgacggcgctgagctaccacatgcggagctacttctggctggacttccagcagctcaacgacatctacaggttcaagacggaggagtactcgcacacggccgtcaacaagttcaacgtgaacccggagtccatcccggactggctcttcgacttcatgcccacccgcggcggctacttcgtcggcaacgtcagccccgcccggatggacttccgctggttcgcgctcggcaactgcgtcgccatcctcgcctcgctcgccacgcccgaccaggccgccgccatcatggacctcatcgaggagcgctgggaggacctcgtcggcgagatgcccgtcaagatatgctacccggccatcgaggggcacgagtggcagatagtcacgggctgcgaccccaagaacacaagatggagctaccacaacgggggatcttggccaggtcagtagatcgatcaaactgcagcgttctgcctgccccatggttttcagaaacaactgccgcaaacaagttcagcagttgagctcacatctgaatgcacctctcactcacctttcctgcagtgctgctgtggctgctcaccgcggcatgcatcaagaccgggaggctgaagatcgctcggcgcgcgatcgacctagccgaggcgaggctcgcgagggacggctggccagagtactacgacggcaagctgggtcgctacatcggcaagcaggcgaggaagctccagacgtggtccatcgcggggtacctagtggccaagatgatggtggaggatccgtcccacctcggcatgatctccctggaggaggagaagccgaccaagccggtgctcaggaggtcggcctcttggacagggtaaggtagtggcggccacaaagacggcagcaggacccgagttctggttctttgagctaacatctcgaatttctctgcaacttcttgctttacggctggggaagtaggcgtgtccaatgttttggtgggtcttccatgtatgaatctttatacgtcccgtcggtgaaataaggaaacaacgaaaagatttttcgtgtt

SEQ ID NO: 119771 - DNA, 2206 bp, Zea Mays
gcgcccgagcagagagagcctgactctgcagctatacgagctcagactccctctcctccctcctttctcttaccttcctcgtgagacatcaccgccgtctcggtacgtggcagcaaccaaccgttcgcttctctctcctggagcgtcgcgcggggcccggcgggggaccgtacgtacctgtgcgcgaagacggggacggtggcggagttcgagatggaggcggcgccgatgcgaaaggcgtcgtcgcaggcgtcgctggcggacccagacgacttcgacctgacgcgcctgctgaaccacaagccgcggatcaacgtggacaggcagcggtcgttcgacgaccgctccctcggcgagatatcgctcgccggcgcgggcacggccagccgcggtggctggggctacggcggcggggggatggagagctacgagagcatgtactcccccggcggcgggctgcggtcctactgcggcacgccggcctcgtccacgcggctctcgttcgagccccacccgctcatcggcgaggcctgggacgcgctgcgccgctccatggtgtccttccgcggccagccgctcggcaccatcgccgccgtcgaccactcctccggcgaagtgctcaactacgaccaggtgttcgttagggacttcgtcccgagcgcgttggcgttcctgatgaacggggagccggagatcgttcggaacttcctgctgaagacgctgctgctgcaggggtgggagaagcggatcgaccgcttcaagctcggcgagggcgccatgccggcgagcttcaaggtgctcaaggacccgaagcgcggcgtcgacaagctggtggccgacttcggggagagcgccatcggccgcgtggcgccggtggattccgggttctggtggatcatcatcctgagggcctacaccaagtccaccggcgacatgaccctcgccgagacgcccatgtgccagaagggcatccggctcatcatgaaccagtgcctcgccgagggcttcgacaccttccccaccctgctctgcgccgacggctgctgcatgatcgatcgcaggatgggtgtgtatgggtacccgatcgagatccaggccctgttcttcatggcgctgcggtgcgcgctcctcatgctgaagccggatgcggaggggaaggagatcatggagcggatcgtgacgcggctgacggcgctgagctaccacatgcggagctacttctggctggacttccagcagctcaacgacatctacaggttcaagacggaggagtactcgcacacggccgtcaacaagttcaacgtgaacccggagtccatcccggactggctcttcgacttcatgcccacccgcggcggctacttcgtcggcaacgtcagccccgcccggatggacttccgctggttcgcgctcggcaactgcgtcgccatcctcgcctcgctcgccacgcccgaccaggccgccgccatcatggacctcatcgaggagcgctgggaggacctcgtcggcgagatgcccgtcaagatatgctacccggccatcgaggggcacgagtggcagatagtcacgggctgcgaccccaagaacacaagatggagctaccacaacgggggatcttggccagtgctgctgtggctgctcaccgcggcatgcatcaagaccgggaggctgaagatcgctcggcgcgcgatcgacctagccgaggcgaggctcgcgagggacggctggccagagtactacgacggcaagctgggtcgctacatcggcaagcaggcgaggaagctccagacgtggtccatcgcggggtacctagtggccaagatgatggtggaggatccgtcccacctcggcatgatctccctggaggaggagaagccgaccaagccggtgctcaggaggtcggcctcttggacagggtaaggtagtggcggccacaaagacggcagcaggacccgagttctggttctttgagctaacatctcgaatttctctgcaacttcttgctttacggctggggaagtaggcgtgtccaatgttttggtgggtcttccatgtatgaatctttatacgtcccgtcggtgaaataaggaaacaacgaaaagatttttcgtgttatttccagggcaacaagatgcgagctttatctattttatatctatttgctacagctcaactttaataataaaatgtttaaaaaaatataaaa

SEQ ID NO: 119772 - DNA, 213 bp, Zea Mays
atgaaagtcttcgatcgcctagggctagcgcttgatgctgctcctgaccttgccccatgccttcttgtacgactcgctgttcgccttgatgcccttcaacgctgcggtcttgaggtgcctaagctccttgggtctgctctttcacctgctgatcgaacccgctcgctcgtgctctcatggagagagatgggtgagatgggaatcggaaaatga

SEQ ID NO: 119773 - DNA, 90 bp, Zea Mays
cgtcagggatcatcgacggtcttgatgcgcgctgccaccagccgggacacgcaaccgcgtgcaggagagcgcagccacgagcgaggctcg

SEQ ID NO: 119774 - DNA, 1073 bp, Zea Mays
ctgtcctgtgcaccggacatgtcactattcactgtcctgtgcaccggacacagctactattcactgcctgtgcaccggacgcagctactattcactgtcctatgcaccggacacaactactattcactgtcctgtgcaccggacaggtcactattcactgtcctgtgcaccggacagctactattcactgtcctgtgcaccagccaacagcacactaagtgatttttcctccgttctttctccgtttgacttcaacttttgggaggattttcctgagacttaaacaaacacatttagagtataatccaattgatttagtcctagaaacttacatctttcttgttcttctcctagcttttctgtttctcctccagcagagctcagaatggtactttctctacagaaagagttagagagcaaaccaaagcaccaaacttgtagtaagaggtgtatgcaacatggttgaacacttaaaccttacatacttcacctttttcatcgttttacccaatttggcatgtttgaggtcgatgttggactctaaaccattaagtcaacttgacttgatctagattgacatatctgagctccaactcccttgttcatttctcgagcttgatcttgagccttatgacttacaccacataattgtagatgttacctcattggttgtaagtcatgtccttatgtagtgatccttgatgcaccataactcttaactcgatcaaccttgactttgcaagtcttcttcttcacccttggctttgggttcctggtctccttgaccttctcccgtgcactcggtacctcgaagctcttcttgcctccatccttggcttgatcggttgtctctgagttacgcacaccgagtctcacttaagcaatgtccatcttacttgtgatgtccattatctatagataatccagtctttggaccatcacacttgttcacttgtgttgaaccctgttagctttgcattaagcacctgttcaacacttagcacacttgttagtcctttaattgggttgtcatccaaaccaccaaaacccacaagagagctttcaagttcatc

SEQ ID NO: 119775 - DNA, 1076 bp, Zea Mays
atcttatcatttttactgaaaattaaaaaacttgaaaacgaagttgtgctaaattaacgatgttatatataattaacttattaatgtaatgatatatgtaagtcgttcaaattaattcttcgtgatagtatgtgatactataggtgtgattagctcaacgactttttcacatttttcacatctgaatcaacgcaccctgtgcccggtgccgccgacccaaatggcatccacctcgccggaacccgccgccgccgacgaaactatcgacaccatccacatccgtcgcctagagtgttccgaccacgagaggggcttcgtcgcccttctctcccagctctccccctgcccggacctcaccacatccgtgttcgccacgcgcttcgccgagctcgcggcgcagggcgacgaccacatcatcctcgtggccgaggacccctccgcctcggaccggcggatcctcgcgacagggtgcctcttcgtggagcgtaagttcctgcgaggctgcggcaaggtggggcacgtggaggacgtggtggtcgatgccgccgcgcgcggcaggggtctcgggctccgcatcgtgcgccgcctcgtggagatctccagggacgccggctgctacaaggtcatcctcgactgcacccccgagctgcgtgcctactatgccaagtgcggattcgtggagaagggtgtccagatggccgtctacttctgagttctgatctagagattcattgctaaggagtgatggcatatgcgctcgttctgcttaaagaccccatctaaatttgccgtgaattttggcaattgagaagcttccttagaactgtattaatcctttataagaaccgatagatgttcatttttgtcttctaattatgtttggcgaggccattatgaataatgttccccacttctgttcccgtttgcatcatcaaacgagatattagcctgtttgttccggattccaaacgcttcggctgaactcgcttatttgaatcatttaaatcaatgtgaatataaaatttgctgagtcatcgtgataaaagaaatttgttgctttctagaccctaaaatct

SEQ ID NO: 119776 - DNA, 867 bp, Zea Mays
cgtcaaaaaatcttaaaacacatggctacatcagtcatatcaggttgtacaagcaaaaattgatgagtctgtctcagcataataaatacagatgctcggaatgtgtaaagataacacagacttggcatggcatatagtcaaaatttcaaaacttgaaaggagcaacgtctcgaaacttctatcacacgtcatccggcatagataacaagctgaagcagcattatcaaacttgctctcatggtatgcatttaagtgctagatgattgaacccttcgacttaatcctcatcctcaacaaccttagttcccaaacctttgagaccctccggagggatctcagctactgtgaccagagagtactgcccctccttggcgtcttcctcgtcgttcctcttgcgggcaatcctgacacggactcgcctcggcacactccggataccgctgctccagacgtgcttgttgagcttcacatcgatccggacatcggtggtacccatggtcttctgggcgaacttcctgatctccttgatggcattcggtgccttcttcttgaagtaccatccgtggaggcgcttgtggaggttgatggtgtactcgcgggtcaccacctcatccttgcgggtgccggtgccggcgccggcgccgcgcctcctctcggacatctccgctccgccgccggcagagcaccctcctttcttcttcgctcgggctagagggaggttgcggagtcgagataaaccctgatcgccagagtcgccattttatagcggcgcgagttagggctacctaatgttccgggccaccccgcgcacatacatggccagcccatgtgtaataattaggcccatctaggtaggccctctactcc

SEQ ID NO: 119777 - DNA, 104 bp, Zea Mays
ctttattttacagctgtttatcgcacaaaaccagttcacaaatgttaataacaatgtcaaatcatgtcagtgcgaaaacaaaccgcagtccatgtgataatgaa

SEQ ID NO: 119778 - DNA, 1026 bp, Zea Mays
gacctttcctcgtcaggcttgcagcgttgttgcaggctccgcctccgatggcgctctcgcgcctctcccaccgcctcctgagcccaacggctgtcgccgccgcgcacttccccatacctaaaacattcacccatggccgcgaccccttcatcctcctgaatcccggccgccgcttcttctccgcgccctcaaaccccagccccaacccctcctccacgacatcagagcccagccaaggcgccccatccgcgcccgcgtcgccggatgagatgcggcaccaggagatcgagggccccacggtggagcgcgatacgtcgccgctggccgacgaaacgcggcgggagctcgacgcgctccgccgcaccgtgcagcgcctcagcggctcgctcgcgctcctcggaggagcgcacctcgccgccggcgcgtggatatcttacggtgctccgcctctcggtgtcggatccgccgcggcagtgcagggagtggcggcgttcgcgttccccttcgcggtcgccctggtgctacgccgcgccatcaagcccatcgccttcttccagaagatggaggccaacgcgaggctgcaggtgctcacgttgtgcctccaggctacgaagaacgttaacctcatgctgctccggacacgggtgatggccatctcttgcgctctgggagtgtctgtcgcgtcagttgctgcggtgtttattagatgattttaagttcagacctctgccggaaggatacttagttttcagtatcaaaaggaataaaaatgcactgctaataggcaagtagacttcgaactaaagatattttggtgcttttggatgttggattatgcttagttttggtgattgtacacgggagaggggagattaaaatatgattgttcgagacatttctattacaatgatattaatcttcagcttgtagaaccaattggtaaaatgtagtatcttccttttaaatgaaccagctccataccgatatcctgtttgttaataaattggctacaaccacaattcttta

SEQ ID NO: 119779 - DNA, 682 bp, Zea Mays
tattaaggcataacaaaccggcaatcccctcaccatgagggtaatgtaataatgtttatccaaagcacacatatacgtgatggttaaatcgaattgttgaactggtccagacaaatggcaagcaatggtacaggtgtcgatccctcactcgagggaaagaacaaataacagggcaccaaattaaactggtgcatcagcgataccaattcgttaaatgaaaatcaagtagaaagaggaaggaaaaaaaacaaacaaaaggaagacgaaggtgtgccactgccaccgccgtgcccaatcagagcacgcccacgcatcgggaatgcgcgggagcagcagagcagcgcagcgcagccaagtctctccccccaccttggtctcttccctccggctccggctcctcgtccggcggctcagtgaatgtagtacgcgaagaaggaggccacggcggccccgacgatggcgggtgcgaccgcggaggagccgctggtgggagacggagccggcgcctccgcggccagcgccacggtggccgaggcggcgacgaggacggcgcaggcgatcttcttcatctccatccctggatgcggcggcttattagcgaccgtagagacggcggcggcgggatgggatggaggcgaggaagtctctctctgctccgacgatcgcttgcctgggtagtacg

SEQ ID NO: 119780 - DNA, 762 bp, Zea Mays
cggacactgtccggtgcaccaccggacactgtccggtgcaccaccggacagtccggtgctccagaccgaagcagtcttttggctgtacacagccaactcttcttctttcttcttctttctagagcccttcacatggtgcggtgctggcatcgttgttggcgacctctgcgcggtcggatctgcaaaggttgcagctagcgcgcctacagtacgtcaacatggtgcggcatctctttttgcagatccccaacttgctacgccgccggccgccgcatcggaactccttgcaccgcttgcctttcttctcccattcaaccggcaagcgttccctggctcaataacgcaactgggggatgtctgtcgctatctccatataggaaacgacaggtgcgacagatttagattttcaggtgatgcgtggtcgggatcgccggatcaatcaaaataagtgtgaaatttgagaggccgtggaacttccagatcgagtagtatccatccagatcgatatcccagaagaccaagcctggccatgaaacgcgtgctaccccgatctcttcgagctttttggaaccaaggtatcaccaggactgggcttctaaaaataggtatcccgaacaccggaattggaattttagtattataatcctttcaacttcggaattttgctatcggggtgtgatttagccgatccgcagtcgctgttacggcagtccatctcactgtcccgtttcttagaacggatcggcgctcgagctggagttc

SEQ ID NO: 119781 - DNA, 549 bp, Zea Mays
atgaagcttgacattcttgctcagactcgcagtggcggtagctgggagagcttgggactggccagacgcgaccaactcaccactgtaataagacgacttttatacatagctgacagtacgcaacctcagttcaggcgcaagattggaccgcagattgtgagatccaatccaatccaacaaccgaatccaatccaatccaatcagagaaaaagaaagacggcgaaaggctcatgtatgtgtggcaccacatcttgccatcagggaaaatggggctgtcaatctcgtacccaccggacgactacctgccagcagtggaggacgacatggggcggctgttcatctggtctctcagcttcgacgatatggaggctgccgccgattcgccttcgtattcgccttcggcattgcccccccgcctttggctccgggaagctgatcatggagggctccctgggcttcttcgaaagaagagaaactgacagcgtccagatgcagaacgtgctgtccatcaggaatcctaaacctcctaatagagaagcctgcagcagc

SEQ ID NO: 119782 - DNA, 417 bp, Zea Mays
tttttttggacttgttatgtatttccctgcacatacatttagaaaaatattatataagtactgcaatctccaatatttatatctcatgcatctcattttggaagttttgtgtttttggttttttttggacttgttatgtatttccctgcacatacatttagaaaaatattatataagtactgcaatctccaatatttatatctcatgcatctcattttggaaaaactcatacgaaaagcagatttcaggtggaatttggtcttcagtgcatatacacctgcaatttgttgtttctatgtgaattttttgtttgagtctgaacatcaacaatttgtggcgatgtatagctgtaccatgcactatggaggtgtgttgtttcaaatttatcttaaattcctaggcatgtttttctagggg

SEQ ID NO: 119783 - DNA, 969 bp, Zea Mays
atacgcggccgctagaccgcctactctccccatccctcgccgcctcgcttcaccccacctatggtcgccgctgctcgcatcgccctgcggcccccacctctctctccctttctcctcgcaacgccgcccccgtttgtccaccaagtcaccacgcgcctgggagatggatcaaggggcgcgcagcagtccggtcaagacacgctcaacgaaagcttcaagatagcacgggagatggaagccccaccatcggctaggaatcgttgcatcacgtcatccgattcctctcccttccgttcctttgctttcgtggtggatgagaagaaagcggcgaagggcgcatcggaaaagagagcctggaggaggaggcacaccatccttcctcttgcacacggagtcctcaagctttctcctcaccttgctggaattccgggtgccatacatcatctctgtcggcaggcatgttgcccttctgcctcgctcgcagttcttccaagggctgcccgtctgtgtggtctggtttggtttggtgatgctaataccccttttgttagttcgtcacctcccaacctgctacacgaagggataaaatttcattcccaagctgctaaatggggcataagtggtttcatctcagaataaaaaacgagtgctgctggagtattatgatgcctttctaggcacatggtcttattctacgggctacctgctatgggatttgactaaaacacacatttaccttgcttgtggtgagctctttggtgggaaacgtttgatgaagccatgtttccatgtttagagaatcacatcacagtcggacctggaactctggaagagaatacctaagggctagcaggatcaacaattgattacatggtttctgtaattttttgtactgaactgaatttaagcatttatgttatattataaagttcaatttagaaggtaaaaacaaaattgttttgtgctaaa

SEQ ID NO: 119784 - DNA, 737 bp, Zea Mays
ccgtccccgtctcaccaccccacgccgccccttcctcttcctctcctctgcctcgctttagcttagccgccgccgccgccactacgcgctctcgcggtccgtgttgtcgcctcgatctgcccacgatggcgtcccgcgccgcagcgctgctcgtggccgtggccgtggcggcagtgctgttcgccgcggcgtcggcgcaggagacggacctgggagtgccgcccgcgccggcgcccgtcacgggcgcggcagcgggggccgcggcgtcggccctggatgtggcttgctctgtcgtcttatccgtcctcgtcgccggtggcctcatgcagtaggcgctgccgtggacgtgccggttcgctgctgaaccggggttgggttggaccctgttcgttttcgtcttagctagcactagaagtagcggtgatggggtgtgtgtggttgtgtccctgtccctggtggccgttgcgatctgtgggcgtgttcggctggctgcaagccgacactgttgcagctgtttggattgctgcagctgcaatccatagagagaaaaatactgtagaagccgcagccgcagccggattgcagccgcagcaagccgcagcgaacaagctgtgtgtgtgctattatcgcttattcttttgtaccatatacgtacccacatactgcattgttcgtatgtataccttgtgtggagaggcgcctgttctatgaataaacacgatggatctcgttcgtca

SEQ ID NO: 119785 - DNA, 585 bp, Zea Mays
gtctcaccaccccacgccgccccttcctcttcctctcctctgcctcgctttagcttagccgccgccgccgccactacgcgctctcgcggtccgtgttgtcgcctcgatctgcccacgatggcgtcccgcgccgcagcgctgctcgtggccgtggccgtggcggcagtgctgttcgccgcggcgtcggcgcaggagacggacctgggagtgccgcccgcgccggcgcccgtcacgggcgcggcagcgggggccgcggcgtcggccctggatgtggcttgctctgtcgtcttatccgtcctcgtcgccggtggcctcatgcagtaggcgctgccgtggacgtgccggttcgctgctgaaccggggttgggttggaccctgttcgttttcgtcttagctagcactagaagtagcggtgatggggtgtgtgtggttgtgtccctgtccctggtggccgttgcgatctgtgtgtgctattatcgcttattcttttgtaccatatacgtacccacatactgcattgttcgtatgtataccttgtgtggagaggcgcctgttctatgaataaacacgatggatctcgttcgt

SEQ ID NO: 119786 - DNA, 1865 bp, Zea Mays
gcatatggcccagcgcgccgggaagacgcggatccaccggtcccgcccgatcggacggccggcccgggcgcgaggagccactaggcgtggtggcggcgtcgcggagataaaaaggctttacccaggaaggcatcgccctctctttctcaaagttcggagtcgaggccgccgcccagaccgcctccccttccccgcctccggtgcccaaggccaggccaacagttttgaggtggtaatggcggaccaggctaaccaacccactgtccttcataagctaggtggccagttccacctgagctccagcttctctgaaggtgtacgggcccgtaacatctgcccttctttctcaccttatgaaaggagatttgccacgaggaactacatgacccagagcctttggggcccttcaatgtctgttagcggtggcatcaatgttccagtgatgccgactccgctttttgccaatgctccagccgagaaaggtggcaaaaacttcatgattgatttcatgatgggcggtgtttcagctgctgtttcgaagactgcagctgctcccattgaacgagtgaagctgcttattcagaatcaggatgagatgatcaagtctggtaggctatcagagccgtacaagggtattgctgattgcttcaaacgtaccatcaaggatgagggtttctcttccttgtggaggggtaacactgctaatgttattcgttacttccctactcaggctttgaactttgcgtttaaggactacttcaagaggctgttcaacttcaagaaggacagggatggttactggaagtggtttgctggcaacctggcctctggtggtgctgctggtgcttcctctttgttttttgtgtactccctggattatgcgaggacaaggttggccaatgatgccaaggctgccaagggaggaggcgatagacaattcaatggtcttgtggatgtctaccgcaagacactcaaatctgatggtattgctgggctttaccgtggatttaacatatcttgtgttggaattattgtttatcgtggcctgtatttcggactttacgattctatcaagccagttgtcctcactggcagcctccaggtttgcataatgtctctctctctctcaatgtattttgcttttgcctgtgtgagctataagatgtttctctcttttgcaggacaacttctttgccagttttgctctgggttggctgatcaccaacggtgctggtcttgcatcttaccccattgatactgtccgcagaaggatgatgatgacttctggtgaggctgtcaagtacaagagctcattggacgcattccagcagatccttaagaaggaaggccccaagtccctgttcaagggtgctggtgctaacattcttcgtgccattgctggcgctggtgtgctttctggctacgaccagctccagatcctcttcttcggaaagaagtacggctccggcggtgcttaaatggagaaaaatgatgacgaacaagagcagttcgctcccggtccagcccagtcaggatctggtcaagtttttgcctttcatatcgaagaaattaataatttatgtaggagaatttttccaacattcgttttgggcggagacattgatctcaaaacactcgtaactgtcctactaggtggtggcatgggtccccaaaacatggtcatagggtgtgtctagtctgcccttcgttgcagccgggcaattttccttacatatattgcctttaatcaagtatcagatgagtgtcaagtcgctgcggttaattgtttgtttttcttatgctttgcttgattgtgatagcatttttattatgactgggtttcttgagaatggtgcatttggttt

SEQ ID NO: 119787 - DNA, 1789 bp, Zea Mays
gcatatggcccagcgcgccgggaagacgcggatccaccggtcccgcccgatcggacggccggcccgggcgcgaggagccactaggcgtggtggcggcgtcgcggagataaaaaggctttacccaggaaggcatcgccctctctttctcaaagttcggagtcgaggccgccgcccagaccgcctccccttccccgcctccggtgcccaaggccaggccaacagttttgaggtggtaatggcggaccaggctaaccaacccactgtccttcataagctaggtggccagttccacctgagctccagcttctctgaaggtgtacgggcccgtaacatctgcccttctttctcaccttatgaaaggagatttgccacgaggaactacatgacccagagcctttggggcccttcaatgtctgttagcggtggcatcaatgttccagtgatgccgactccgctttttgccaatgctccagccgagaaaggtggcaaaaacttcatgattgatttcatgatgggcggtgtttcagctgctgtttcgaagactgcagctgctcccattgaacgagtgaagctgcttattcagaatcaggatgagatgatcaagtctggtaggctatcagagccgtacaagggtattgctgattgcttcaaacgtaccatcaaggatgagggtttctcttccttgtggaggggtaacactgctaatgttattcgttacttccctactcaggctttgaactttgcgtttaaggactacttcaagaggctgttcaacttcaagaaggacagggatggttactggaagtggtttgctggcaacctggcctctggtggtgctgctggtgcttcctctttgttttttgtgtactccctggattatgcgaggacaaggttggccaatgatgccaaggctgccaagggaggaggcgatagacaattcaatggtcttgtggatgtctaccgcaagacactcaaatctgatggtattgctgggctttaccgtggatttaacatatcttgtgttggaattattgtttatcgtggcctgtatttcggactttacgattctatcaagccagttgtcctcactggcagcctccaggacaacttctttgccagttttgctctgggttggctgatcaccaacggtgctggtcttgcatcttaccccattgatactgtccgcagaaggatgatgatgacttctggtgaggctgtcaagtacaagagctcattggacgcattccagcagatccttaagaaggaaggccccaagtccctgttcaagggtgctggtgctaacattcttcgtgccattgctggcgctggtgtgctttctggctacgaccagctccagatcctcttcttcggaaagaagtacggctccggcggtgcttaaatggagaaaaatgatgacgaacaagagcagttcgctcccggtccagcccagtcaggatctggtcaagtttttgcctttcatatcgaagaaattaataatttatgtaggagaatttttccaacattcgttttgggcggagacattgatctcaaaacactcgtaactgtcctactaggtggtggcatgggtccccaaaacatggtcatagggtgtgtctagtctgcccttcgttgcagccgggcaattttccttacatatattgcctttaatcaagtatcagatgagtgtcaagtcgctgcggttaattgtttgtttttcttatgctttgcttgattgtgatagcatttttattatgactgggtttcttgagaatggtgcatttggtttaca

SEQ ID NO: 119788 - DNA, 1736 bp, Zea Mays
gtagatcgattatttccggtttaggcttggattgtttgtggtagcctcggcctttggagttcattcagatcggtgattcctgcgtcggccaacagttttgaggtggtaatggcggaccaggctaaccaacccactgtccttcataagctaggtggccagttccacctgagctccagcttctctgaaggtgtacgggcccgtaacatctgcccttctttctcaccttatgaaaggagatttgccacgaggaactacatgacccagagcctttggggcccttcaatgtctgttagcggtggcatcaatgttccagtgatgccgactccgctttttgccaatgctccagccgagaaaggtggcaaaaacttcatgattgatttcatgatgggcggtgtttcagctgctgtttcgaagactgcagctgctcccattgaacgagtgaagctgcttattcagaatcaggatgagatgatcaagtctggtaggctatcagagccgtacaagggtattgctgattgcttcaaacgtaccatcaaggatgagggtttctcttccttgtggaggggtaacactgctaatgttattcgttacttccctactcaggctttgaactttgcgtttaaggactacttcaagaggctgttcaacttcaagaaggacagggatggttactggaagtggtttgctggcaacctggcctctggtggtgctgctggtgcttcctctttgttttttgtgtactccctggattatgcgaggacaaggttggccaatgatgccaaggctgccaagggaggaggcgatagacaattcaatggtcttgtggatgtctaccgcaagacactcaaatctgatggtattgctgggctttaccgtggatttaacatatcttgtgttggaattattgtttatcgtggcctgtatttcggactttacgattctatcaagccagttgtcctcactggcagcctccaggacaacttctttgccagttttgctctgggttggctgatcaccaacggtgctggtcttgcatcttaccccattgatactgtccgcagaaggatgatgatgacttctggtgaggctgtcaagtacaagagctcattggacgcattccagcagatccttaagaaggaaggccccaagtccctgttcaagggtgctggtgctaacattcttcgtgccattgctggcgctggtgtgctttctggctacgaccagctccagatcctcttcttcggaaagaagtacggctccggcggtgcttaaatggagaaaaatgatgacgaacaagagcagttcgctcccggtccagcccagtcaggatctggtcaagtttttgcctttcatatcgaagaaattaataatttatgtaggagaatttttccaacattcgttttgggcggagacattgatctcaaaacactcgtaactgtcctactaggtggtggcatgggtccccaaaacatggtcatagggtgtgtctagtctgcccttcgttgcagccgggcaattttccttacatatattgcctttaatcaagtatcagatgagtgtcaagtcgctgcggttaattgtttgtttttcttatgctttgcttgattgtgatagcatttttattatgactgggtttcttgagaatggtgcatttggtttacatgtgcgtcagaaagactttgtaccagccgttgggattgctgcagccgcaatgtagaaaaaatagaagccgtttt

SEQ ID NO: 119789 - DNA, 1660 bp, Zea Mays
ggaggtcttattttgtttctctttatgtaatgtcctaagttttgtgtgttgacattatgttgcagccaacagttttgaggtggtaatggcggaccaggctaaccaacccactgtccttcataagctaggtggccagttccacctgagctccagcttctctgaaggtgtacgggcccgtaacatctgcccttctttctcaccttatgaaaggagatttgccacgaggaactacatgacccagagcctttggggcccttcaatgtctgttagcggtggcatcaatgttccagtgatgccgactccgctttttgccaatgctccagccgagaaaggtggcaaaaacttcatgattgatttcatgatgggcggtgtttcagctgctgtttcgaagactgcagctgctcccattgaacgagtgaagctgcttattcagaatcaggatgagatgatcaagtctggtaggctatcagagccgtacaagggtattgctgattgcttcaaacgtaccatcaaggatgagggtttctcttccttgtggaggggtaacactgctaatgttattcgttacttccctactcaggctttgaactttgcgtttaaggactacttcaagaggctgttcaacttcaagaaggacagggatggttactggaagtggtttgctggcaacctggcctctggtggtgctgctggtgcttcctctttgttttttgtgtactccctggattatgcgaggacaaggttggccaatgatgccaaggctgccaagggaggaggcgatagacaattcaatggtcttgtggatgtctaccgcaagacactcaaatctgatggtattgctgggctttaccgtggatttaacatatcttgtgttggaattattgtttatcgtggcctgtatttcggactttacgattctatcaagccagttgtcctcactggcagcctccaggacaacttctttgccagttttgctctgggttggctgatcaccaacggtgctggtcttgcatcttaccccattgatactgtccgcagaaggatgatgatgacttctggtgaggctgtcaagtacaagagctcattggacgcattccagcagatccttaagaaggaaggccccaagtccctgttcaagggtgctggtgctaacattcttcgtgccattgctggcgctggtgtgctttctggctacgaccagctccagatcctcttcttcggaaagaagtacggctccggcggtgcttaaatggagaaaaatgatgacgaacaagagcagttcgctcccggtccagcccagtcaggatctggtcaagtttttgcctttcatatcgaagaaattaataatttatgtaggagaatttttccaacattcgttttgggcggagacattgatctcaaaacactcgtaactgtcctactaggtggtggcatgggtccccaaaacatggtcatagggtgtgtctagtctgcccttcgttgcagccgggcaattttccttacatatattgcctttaatcaagtatcagatgagtgtcaagtcgctgcggttaattgtttgtttttcttatgctttgcttgattgtgatagcatttttattatgactgggtttcttgagaatggtgcatttggtttacatgtgcgtcagaaagactttgt

SEQ ID NO: 119790 - DNA, 693 bp, Zea Mays
ggaaggaaaaaaactcctctgccctcgcgtttctcgttcccgtcgcgtcagtctcgtctcgtccgtctctctctcagcagccatggcgcctagggtttgtgccaccagcgccagccatggccgctcactccattcgtaggaaacatgtccccattctgagatccattgctgccctccatccccacgcgcccacggatcaggagtggtcgttctcagccatttacaaccgcgtttcaggagccgtatttcgagatcgtatagcgaagaatcgctcgttctcagccacagatcaggagtgatcgttctcagccacggtgcatggatgtagagtggtcattcaccaaaggccgacatacccctactaccctccattccgagattggcagcagatcaggagcgaacgacgtttgtagccagtcatcactccactcaacgcggtctgcagtcgatcaagagcgtagcagaagtttcaggcctaatctacatttttggcttctttgtatcgtggctgctgatggttcttacaagctgatggctactgatggtgcttacattttccgcttctttgtatttggattttgaatattgtagtgaaggttcacatgaggaactcttgtatgaactttggaatggttaactttggtgtaccttgtggcaattagccttttatgaactttggaatgttttcattca

SEQ ID NO: 119791 - DNA, 1332 bp, Zea Mays
ctacgtcgcttggggcccgcggggggagaattaaagtctccttatcctctccgccaccggcgcctgtcatcgctgatcgtcggatccaaaccatcccacctcgccgtccggcgtccgctctgccttgcgccgcggtccgttcccccttgtccgaatccgcctcggcgtgtccgccctccctctcccctcccctcccctcccctcccctcccctcgtgtcgtgtgcgctctcctttagtccttttggtgtgctcttggtatctgtgctcgcctctcctcgtcttccttccttcctttccgtccccaccgcccctgcgactccccgcgtgcagcgtgcgcgctcattcgcccgccgctccctgctcgtacgacccgctcttgtctgtctgtctgacgccacgcgagagcagtgccccgatgtcgtcggcggtggagcccgtctcctgctccaaggtcgacgtccccgccgccggcccggatccggaggacgcagcggcgcccgcggggcacggcgaggcggctccgtgttgccacgaggaggaggaggaggaggaggaggagaaggccccccaggccatcgacctcggccccatggtcagcatcaaggagcagctcgagaaggacaaggacgacgagagcctgcggcgatggaaggagcagctcctcggcggcgtggacttgaattccgtgggagagacgctggagccggacgtgaggataacgagcctgtccatcctgtcgcccgggcggcgcgacatcgtcctgccgctgccggtggacgccaccaagggcgtgtggttcacgctcaaggaaggctccccgtaccggctcaagttcaccttctccgtcagcagcaacatcgtctccggcctgcgctacaccaacaccgtctggaagacaggcctcaaagttgacagagccaaggagatgctcggcacgttcagcccccagccggagccctacacgtacgtgacgccggaggacaccaccccgtcgggaatgttcgcccgggggtcctactccgccaggacgaagttcctcgacgacgaccggaagtgctacctggagatcaactacgccttcgacatccgccgggagtggccgtcggcgagctgaccgatcggccttcgccggggcgccggagcagatcgataatcgtttcgctgctctgtgtcttcgcttctctgtgttggctcgtcttgtcctgtcctgttctatgcctaggtttcgttcaccatgttgctgcgcgcgcgcgcgtgtgtgtgtgaatacacccccgttccacgtgacaattgaatgctttgttgagcttttgtcaggctctcgttttttt

SEQ ID NO: 119792 - DNA, 1462 bp, Zea Mays
ctgatcgtcggatccaaaccatcccacctcgccgtccggcgtccgctctgccttgcgccgcggtccgttcccccttgtccgaatccgcctcggcgtgtccgccctccctctcccctcccctcccctcccctcccctcccctcgtgtcgtgtgcgctctcctttagtccttttggtgtgctcttggtatctgtgctcgcctctcctcgtcttccttccttcctttccgtccccaccgcccctgcgactccccgcgtgcagcgtgcgcgctcattcgcccgccgctccctgctcgtacgacccgctcttgtctgtctgtctgacgccacgcgagagcagtgccccgatgtcgtcggcggtggagcccgtctcctgctccaaggtcgacgtccccgccgccggcccggatccggaggacgcagcggcgcccgcggggcacggcgaggcggctccgtgttgccacgaggaggaggaggaggaggaggaggagaaggccccccaggccatcgacctcggccccatggtcagcatcaaggagcagctcgagaaggacaaggacgacgagagcctgcggcgatggaaggagcagctcctcggcggcgtggacttgaattccgtgggagagacgctggagccggacgtgaggataacgagcctgtccatcctgtcgcccgggcggcgcgacatcgtcctgccgctgccggtggacgccaccaagggcgtgtggttcacgctcaaggaaggctccccgtaccggctcaagttcaccttctccgtcagcagcaacatcgtctccggcctgcgctacaccaacaccgtctggaagacaggcctcaaaggtgagactgagacacccgccggacgaagaaaggctgaaagccaccgtttgttatttgtacgcacgagaacgaccacgtcccctacttgagctcacggtccgctggctgtcgcgcgcggtgcggtggcgcgtgcaatgcagttgacagagccaaggagatgctcggcacgttcagcccccagccggagccctacacgtacgtgacgccggaggacaccaccccgtcgggaatgttcgcccgggggtcctactccgccaggacgaaggtacgtacgtacctggattcagaacgagtcagtcagttcagaacccttagcttcagtcttgagagctgagttgacgaggtcgtctggcatcttgttttgacagttcctcgacgacgaccggaagtgctacctggagatcaactacgccttcgacatccgccgggagtggccgtcggcgagctgaccgatcggccttcgccggggcgccggagcagatcgataatcgtttcgctgctctgtgtcttcgcttctctgtgttggctcgtcttgtcctgtcctgttctatgcctaggtttcgttcaccatgttgctgcgcgcgcgcgcgtgtgtgtgtgaatacacccccgttccacgtgacaa

SEQ ID NO: 119793 - DNA, 2864 bp, Zea Mays
tgcgcctcggcccccacgaaatctggaaagcctggacgccattgctcacctttttccgtccagcgcaaagacaccgcgcgccagagagggtgagggattgccgtgaccgattcgaaagccgcttcgggcgcgggtgggatcggcccgtggccggcggagatgtccggattcgtcggtgtcgtcgtgtccgacccctcgctgcaggggcagttcacgcaggtcgagctccgatcgctcaaggccaagttcgtgtctctgaagagagattccggccatgtcaccactaagaatctcccggtgatgatgaagaagctgagggggctcaatgaggtggtctctgtggaggagatcgcggccttcctgtccgagtcgtaccccgacagcgatcaggagattgaattcgaatccttcctccgggagtatctgaatctgcaggcgcgggtgagtgccaaggagggtggtgccggcggtggccggggtggcaagtcgtcgttcctcaagtccagcaccactacgctgctgcacaacctcaatcaggcagagaaatcttcgtatgtggcgcacatcaatacttacctccgtgaagacccattcctgaagaagtacttgcccatggacccgtctggaaaccagctgttcgatctcatccgggatggtgttctgctctgcaaactgatcaatgtagctgtacctgggaccattgatgagagggcaataaataagaaaagagttcttaacccatgggagagaaatgaaaatcacacgctctgcctcaattccgccaaggccattggatgcactgttgtcaacattggcacacaggatttggtggagggaaggcctcatttagttcttggattgatatcacaaatcataaagattcaacttttagctgatcttaacctcaagaagacaccacagctggtggagctatttgatgacagcaaggatatagacgaggttttgagtttgtcgccagaaaagatgctacttcggtggatgaaccatcatctgaaaaaagctggctacaagaaaactgttaacaatttctcttcagatgtgaaggatggtgaagcgtatgcttaccttctgaaagctcttgctccagagcattcccctgaaactacattggacaccaaggatccgaatgagagggcaaaactagtacttgaacaagcggcgaagttggactgtaagagatacttgaccccgaaggatatcactgagggatctgccaatttaaatcttgcatttgttgcacaaatattccagcataggaatggtctcaccagtgacaccaaacaagttactctcacacagaccgcaacacctgatgatgttctagtatctagagaagaaagagcctttcggatgtggatcaacagccttggggttgaatcatatgtaaacaatgtctttgaagatgttcgcaatggatgggtacttcttgaagtgcttgacaaggtgtctcctggatctgtcaattggaagctggcaacaaaacctccaattaaattgccatttagaaaactggagaattgcaatcaagttgtaaaaattgggaagcagttgaagttttctttagtaaatctggctggaaacgatattgttcagggaaataagaaattgattgttgcacttctgtggcaattgatgagattcaatatcctccagctgttaaacaaactgagattccactcccaaggagggtcccaaggaaaagaaatttctgatgctgatattctagactgggccaacagcaaagtgaaagcgtccggaagaacatctcgaatggaaagtttcaaggacaagagcttatcaaatggattgttcttcctcgagcttcttagcacagtacagccaagggttgtgaactggaaagttgttactaaaggggaaactgatgaggacaagaagctgaatgctacgtacatcattagtgttgcaaggaagattggatgctctgtgttcctgttgccagaggacatcgtcgaggtgaatcagaagatgattctaacacttaccgctagcattatgtattggagcctacagaatcagcatcagtcacagtctgaaatgccagagcaatcagaaccatctagcatggcttcagacgcagcctctgacattgcctcggaggacggtgcttcaacgacagcaccatctgagttggatgaggtgaactcgctgtctgatagcgtatccaatttgacaacggatgatgctacttcaaacgccccatccactgaaaacggaaatggtgtggcagggtcctgatggttatagttatgcagacccagttctttttcccacacacagtgctgttttttttatacagggaacagtgcttttcatggtgctcaaagtcgtcgctaccagaagtggtttttttaatacttctgcttcatgagtatggtagcttgatagatacagcaagtgcagatagatatagatgccctttgttcatggaatctgcttagactatagggggcggggcgggaaagatagtatatgtcgctggccgggtagtttctgtatttgtggcacacgcacccatgcaaggttttacctctttatgtatcttgtcggtcaattcgttcatatgtttattggactggtcatcgcttgtaatgctgttgctgctctgaaccgtgcctgtacataacatacactcaaaagtgtttttgccttgtccctaagtttctgtttatactgcttttttattttccttctttacattggatgtgttatcatgaggtttcaatttgatttgattgccttccctccctgacggcatttcaaatcccatccaatccccgtttcatatcattccagattatcaggagccaaaacgataaaaaaaa

SEQ ID NO: 119794 - DNA, 795 bp, Zea Mays
cttgctgctgctcccctactgggctactgctactgagctgtatcatatatcgtcccttctctccgactctccctcccttctccacggcccagtgcgcacctctccctccacccctcgtcgcaaggcccaggcaccgagctaggcacgacgatgcaagtcaagccggaagctacggttccttcgccgtctccgccattgccggcagctccgtctttccatcaccgaagaacggaggaggagaacagcggcgtcgaaattccgcggcggtaaccggcggcctacacgtatcggcgtcgcggcatacaagggcaggccaggcattcgatctcgcattctcgctcacattacttattactccccagttgcagcaagcaatcatcttcttgctcttgctctctcgttcagtgagattttttgaattctagacatcttgtttggctattcatcttattcaagtttttttacataggtattatttattttattacgacttattttattactatacatagatttatttaatttattatttataaaaaaacaatataagtagctaaatatggtatctaaaaataaaaaaacgttatctattttggaaccgaaggagagagcgagtagtttttgctccctcgcctgcaatcatttccttcgtacgtagtactatattactcccagcttgcagagggctgtggataatctcacggtttccagatcatggtgtgcacgtttgtgcttgggttgatctgtgtgtgtttttcccttgtcagctgtgacgattttttctcgacctgtttt

SEQ ID NO: 119795 - DNA, 805 bp, Zea Mays
aggtacccatgggatcccatgaccactacacctccgcctcgcaattcgtcttcgccgccgtcgattccaaccccaaccccaggcccagccacagccacaagcccaagaccaccgtgcaaatccccatcacgtctctaccagaacgggctcgggcgggaccgcccgacgcggcggcggcggccgctaagatccaggcggccttgcggggctacctggtcaggcggcacgccgcggccgtgcgcggggccgacgccgaggcgacgcggctcgagcggctgctccggcggcaggagaccgtggacgccgtccgcggcgacgagcgcgagcgggcccggttctccgaggcgctcatggccgtgctgctccgcctggacgccgtgccggggcgctacccggccgtgcgggacgcgcggcgcgccgtgagccgccgcgtcgtcggcctgcaggaggtgttcgacgctgttgtcgcggcacctgcagcgcagacttgcggggttccggctagcctggagcaggtcctcgaagggatctggggcgtcggagaggcgcctgttccggtgcctccgtcgccggcgatggcggcggcggaggaggaagtgaggaggggcgggtcatactgggcaaggttttttggtggagtgtaggctggctgtgtagcgaggaggctcaggagggtagctgggtactagaatggctatagtctactgctgtgccgtactcggctgtacctgtacatgtattttgtgatgtgtataccaaagtgccatgttgcggttattgaacgtgagaaaaaaaaactgtaagt

SEQ ID NO: 119796 - DNA, 900 bp, Zea Mays
atcgcccgtgccctgcggtgttctactcactcccagctgcgacaatccccctcatcgcccgccccccctggtctcgtctctccttcgcgcatctcaccgccatctcactcccgaaccccccttcctttgcttcccgcgtctaatttagcgccagaacatttgaattccccgcaacttccgcttccagcggcttctcgaaccttccggaggcgccgccgatcgaccccggctccatccccttgcccccctagggtttcgcgttcccctcggggatgggggacgccgccaccgccgcagcggcggcggcagcgtcgcccgcttgcgccgcgcggaagcggcggcgcggcgacgacagcgcggggctgaggcgggtggcggagatcgtgatggtcctggccgcggccggggaggtacgcggcgggaggcagcccacggccgcggagcgcgcgctggcggccgaggcgcgggagactctggccaccgccgtcgccgagagggccgtgcggcccaaggatctgttcccgggggaagcggtgcgcgcggtcgtcgaggatctcgggctcaaccgctccaaggacccagctgccatggggtttcgcccgcccaaggcctccatcgccgataggctcatgcttactaagcgcaaggttttgccaactctctcgtttgcacccattcccgcacagtttactagccattgtggtggctttgaaattcttaactggggtgataaatgtgatgtgagaacgcttgtgtgactattggactgtattagtttgtatggtatgacactgctgtttgcatggcacaaggtattgcttctgaatgatacattagcgaataatgattcccagggattcttgtatcacactgcttgtatatggatatgctctgttcttc

SEQ ID NO: 119797 - DNA, 3385 bp, Zea Mays
ctcactcccagctgcgacaatccccctcatcgcccgccccccctggtctcgtctctccttcgcgcatctcaccgccatctcactcccgaaccccccttcctttgcttcccgcgtctaatttagcgccagaacatttgaattccccgcaacttccgcttccagcggcttctcgaaccttccggaggcgccgccgatcgaccccggctccatccccttgcccccctagggtttcgcgttcccctcggggatgggggacgccgccaccgccgcagcggcggcggcagcgtcgcccgcttgcgccgcgcggaagcggcggcgcggcgacgacagcgcggggctgaggcgggtggcggagatcgtgatggtcctggccgcggccggggaggtacgcggcgggaggcagcccacggccgcggagcgcgcgctggcggccgaggcgcgggagactctggccaccgccgtcgccgagagggccgtgcggcccaaggatctgttcccgggggaagcggtgcgcgcggtcgtcgaggatctcgggctcaaccgctccaaggacccagctgccatggggtttcgcccgcccaaggcctccatcgccgataggctcatgcttactaagcgcaagatggaagaagtcaaggaagctccagtggttagcgcacctcaaacagtcgtctcaagtggaacgtctgagttccatggtttgaatggggctaccaagtttggtgttggagttcctaggaacccaccagttccatctttagctgctactggcccattaacctctacatccccagttaccttgaagccaccaggatcatctcctgtaaaaccagttgccaactcatcagttgttcctctagtcaatactggtccatcaaaccttaaattggacaaaaatgttagtggtcctctgaatttagcattcagtggagcaacggtcgtccactcaaacaagtcaactttagacacatctgctaggcccgatgtaaatgctgtacagagttccaatcagacggtgaaaaaccatgacacaaaaccagtggcagttcaagccgcgacaggtaaccctgttatgggtcatcgtgctacaccaggcgtggcatttgctccaccaaaacctactttcatcaatcacaatgagatagcaaagaatgttctacaatttcttcaccaacctgcaaaccatcctagctggactccaccatcaactgagtacatgcattctcgtttgtgctgtcaaatatgcaaagttgatatcattggtacagacaatttacttgtttgtgatgcttgcgagaggggagtacacttgaaatgccttcatcagtatggcaataagggcgtccccaaagctgagtggcattgttctgcatgcctgactcagagtaagggaaaacccttgccaccaaaatatggcaaggttacaaggactgtagttgcatcaaagactgctccacctggtggtggagcacagctttctttgcaggaatcagcagaaaacatggctgcaaaggaaaatcaccaaaagttggctgcaaatggaaatcttatgaagccattctccattcatggtggcagcacagtacccgacagtaatgtattggcactgagtgctgtcatggctggttcacaatcacaattagtttctaccttgagaccatcaatagtcgttaaagctgaaacaccctctaatggaaaggaaggaactgggcaaccatgcaatactgcaatacaacctaatgtgcgatcatcttctcttaacaacagattgagaagtgattcctgtttgaaccctgctgattcagcaaatgaaatcatgcatggtaagcatgctgcagaaatttctggtgttgaagcaaaggtcaagtctgaagcaaactctgaggttgttgtgagtacagatgaggaattggttcatagcagtggaacatcaatcgaaactgaacgagccaaggttgtcgctattgaagaaaacagggcacaatcaacctttgagacagataaaatgaaagttggggaaacaactatcaacacaggaacaacagatcaatgcatcaatactgaagaaaagctccccagtttagcaacttctgaggcacacacaatcactgacgtgaagatgactagcaatacaggaataccagtacagcaacacaacattgctactattgaagagaagacccagattgatgcagtgtctgatccacatccacatgcaatccaagatattcaagatatggaaatgggcaccaacaatggaccacccatagatcaaacaagcagtcttgttgaagaaaacccccctggacaatcctcttcaattgctgatgcgtgtgtcactgctaatactggaataccaacagatcaaacacagcatccaaatgagtcaactgaaaatgcagtaaagaaatctcccaacagagaactatataaagaaaaaccgggctgcaacataacctcagatattacccaaaaagtaacttcaaatggcatcatgtgccctgaggacaaaactttatgtgttcatgaagataaagcagtgggttgtgacacagaagcaaaagaagaaaactaatttagtagcaggttgcatccaattttcattttccaggtgtgtttgtaatcaaactagttattagaagtcttatgtctgaaaatcttgcctattttgatttatgctgatagtgattcttttaaagtacattatttgaaactgatgtttgtagttattctttacttattatagatatgtcaatcacattagcttatttgaactcatggtaataagtatgcttaagtgacctttaaggcctgtattttattgcagcacatgcttttcccccaactctggaaactgaaaccttgtatggccttttggattgaacatttgtatcttaccttaccttaaatctttccacagatggaactgttctgaatctaccattattttaccaacgtcagtgattgactgtgttctctacattctcttggacagcattatacatttagccattgccaaccatttttccaggaggtttgttctgtgccccttggaaacatgctcaccaggcttactccattcgtaatttactggtacaccacatttttacaaaaaaaataaaaataatattggtgttcctgctgacatgaggtttactaaactctgcaggtatccattgcctcctggtgtagtttagagaatcccagaacacaggaaatataatcgtgatgttgtactttatgtagattgataatcttgagttcctgactattgaattccatttccccctttatttgttccgtgctcatctggaatgctgtaactagatagggtttagctgagttaggactggattatcaagtcataataatgatacgtgccttc

SEQ ID NO: 119798 - DNA, 2934 bp, Zea Mays
atgggggacgccgccaccgccgcagcggcggcggcagcgtcgcccgcttgcgccgcgcggaagcggcggcgcggcgacgacagcgcggggctgaggcgggtggcggagatcgtgatggtcctggccgcggccggggaggtacgcggcgggaggcagcccacggccgcggagcgcgcgctggcggccgaggcgcgggagactctggccaccgccgtcgccgagagggccgtgcggcccaaggatctgttcccgggggaagcggtgcgcgcggtcgtcgaggatctcgggctcaaccgctccaaggacccagctgccatggggtttcgcccgcccaaggcctccatcgccgataggctcatgcttactaagcgcaaggttttgccaactctctcgtttgcacccattcccgcacagtttactagccattgtggtggctttgaaattcttaactggggtgataaatgtgatatggaagaagtcaaggaagctccagtggttagcgcacctcaaacagtcgtctcaagtggaacgtctgagttccatggtttgaatggggctaccaagtttggtgttggagttcctaggaacccaccagttccatctttagctgctactggcccattaacctctacatccccagttaccttgaagccaccaggatcatctcctgtaaaaccagttgccaactcatcagttgttcctctagtcaatactggtccatcaaaccttaaattggacaaaaatgttagtggtcctctgaatttagcattcagtggagcaacggtcgtccactcaaacaagtcaactttagacacatctgctaggcccgatgtaaatgctgtacagagttccaatcagacggtgaaaaaccatgacacaaaaccagtggcagttcaagccgcgacaggtaaccctgttatgggtcatcgtgctacaccaggcgtggcatttgctccaccaaaacctactttcatcaatcacaatgagatagcaaagaatgttctacaatttcttcaccaacctgcaaaccatcctagctggactccaccatcaactgagtacatgcattctcgtttgtgctgtcaaatatgcaaagttgatatcattggtacagacaatttacttgtttgtgatgcttgcgagaggggagtacacttgaaatgccttcatcagtatggcaataagggcgtccccaaagctgagtggcattgttctgcatgcctgactcagagtaagggaaaacccttgccaccaaaatatggcaaggttacaaggactgtagttgcatcaaagactgctccacctggtggtggagcacagctttctttgcaggaatcagcagaaaacatggctgcaaaggaaaatcaccaaaagttggctgcaaatggaaatcttatgaagccattctccattcatggtggcagcacagtacccgacagtaatgtattggcactgagtgctgtcatggctggttcacaatcacaattagtttctaccttgagaccatcaatagtcgttaaagctgaaacaccctctaatggaaaggaaggaactgggcaaccatgcaatactgcaatacaacctaatgtgcgatcatcttctcttaacaacagattgagaagtgattcctgtttgaaccctgctgattcagcaaatgaaatcatgcatggtaagcatgctgcagaaatttctggtgttgaagcaaaggtcaagtctgaagcaaactctgaggttgttgtgagtacagatgaggaattggttcatagcagtggaacatcaatcgaaactgaacgagccaaggttgtcgctattgaagaaaacagggcacaatcaacctttgagacagataaaatgaaagttggggaaacaactatcaacacaggaacaacagatcaatgcatcaatactgaagaaaagctccccagtttagcaacttctgaggcacacacaatcactgacgtgaagatgactagcaatacaggaataccagtacagcaacacaacattgctactattgaagagaagacccagattgatgcagtgtctgatccacatccacatgcaatccaagatattcaagatatggaaatgggcaccaacaatggaccacccatagatcaaacaagcagtcttgttgaagaaaacccccctggacaatcctcttcaattgctgatgcgtgtgtcactgctaatactggaataccaacagatcaaacacagcatccaaatgagtcaactgaaaatgcagtaaagaaatctcccaacagagaactatataaagaaaaaccgggctgcaacataacctcagatattacccaaaaagtaacttcaaatggcatcatgtgccctgaggacaaaactttatgtgttcatgaagataaagcagtgggttgtgacacagaagcaaaagaagaaaactaatttagtagcaggttgcatccaattttcattttccagcattatacatttagccattgccaaccatttttccaggaggtttgttctgtgccccttggaaacatgctcaccaggcttactccattcgtaatttactggtatccattgcctcctggtgtagtttagagaatcccagaacacaggaaatataatcgtgatgttgtactttatgtagattgataatcttgagttcctgactattgaattccatttccccctttatttgttccgtgctcatctggaatgctgtaactagatagggtttagctgagttaggactggattatcaagtcataataatgatacgtgccttcgccatcccttcggaccatgttccaatgtgatacaatctactaccatgcaatatatcaccatcagcctgctaacgcacgccactagctttaagtttccaatccttctgtcagtttgtaatgtttgcagctacttcatccgtttcaatttacacttcctatgtcc

SEQ ID NO: 119799 - DNA, 3034 bp, Zea Mays
atgggggacgccgccaccgccgcagcggcggcggcagcgtcgcccgcttgcgccgcgcggaagcggcggcgcggcgacgacagcgcggggctgaggcgggtggcggagatcgtgatggtcctggccgcggccggggaggtacgcggcgggaggcagcccacggccgcggagcgcgcgctggcggccgaggcgcgggagactctggccaccgccgtcgccgagagggccgtgcggcccaaggatctgttcccgggggaagcggtgcgcgcggtcgtcgaggatctcgggctcaaccgctccaaggacccagctgccatggggtttcgcccgcccaaggcctccatcgccgataggctcatgcttactaagcgcaaggttttgccaactctctcgtttgcacccattcccgcacagtttactagccattgtggtggctttgaaattcttaactggggtgataaatgtgatatggaagaagtcaaggaagctccagtggttagcgcacctcaaacagtcgtctcaagtggaacgtctgagttccatggtttgaatggggctaccaagtttggtgttggagttcctaggaacccaccagttccatctttagctgctactggcccattaacctctacatccccagttaccttgaagccaccaggatcatctcctgtaaaaccagttgccaactcatcagttgttcctctagtcaatactggtccatcaaaccttaaattggacaaaaatgttagtggtcctctgaatttagcattcagtggagcaacggtcgtccactcaaacaagtcaactttagacacatctgctaggcccgatgtaaatgctgtacagagttccaatcagacggtgaaaaaccatgacacaaaaccagtggcagttcaagccgcgacaggtaaccctgttatgggtcatcgtgctacaccaggcgtggcatttgctccaccaaaacctactttcatcaatcacaatgagatagcaaagaatgttctacaatttcttcaccaacctgcaaaccatcctagctggactccaccatcaactgagtacatgcattctcgtttgtgctgtcaaatatgcaaagttgatatcattggtacagacaatttacttgtttgtgatgcttgcgagaggggagtacacttgaaatgccttcatcagtatggcaataagggcgtccccaaagctgagtggcattgttctgcatgcctgactcagagtaagggaaaacccttgccaccaaaatatggcaaggttacaaggactgtagttgcatcaaagactgctccacctggtggtggagcacagctttctttgcaggaatcagcagaaaacatggctgcaaaggaaaatcaccaaaagttggctgcaaatggaaatcttatgaagccattctccattcatggtggcagcacagtacccgacagtaatgtattggcactgagtgctgtcatggctggttcacaatcacaattagtttctaccttgagaccatcaatagtcgttaaagctgaaacaccctctaatggaaaggaaggaactgggcaaccatgcaatactgcaatacaacctaatgtgcgatcatcttctcttaacaacagattgagaagtgattcctgtttgaaccctgctgattcagcaaatgaaatcatgcatggtaagcatgctgcagaaatttctggtgttgaagcaaaggtcaagtctgaagcaaactctgaggttgttgtgagtacagatgaggaattggttcatagcagtggaacatcaatcgaaactgaacgagccaaggttgtcgctattgaagaaaacagggcacaatcaacctttgagacagataaaatgaaagttggggaaacaactatcaacacaggaacaacagatcaatgcatcaatactgaagaaaagctccccagtttagcaacttctgaggcacacacaatcactgacgtgaagatgactagcaatacaggaataccagtacagcaacacaacattgctactattgaagagaagacccagattgatgcagtgtctgatccacatccacatgcaatccaagatattcaagatatggaaatgggcaccaacaatggaccacccatagatcaaacaagcagtcttgttgaagaaaacccccctggacaatcctcttcaattgctgatgcgtgtgtcactgctaatactggaataccaacagatcaaacacagcatccaaatgagtcaactgaaaatgcagtaaagaaatctcccaacagagaactatataaagaaaaaccgggctgcaacataacctcagatattacccaaaaagtaacttcaaatggcatcatgtgccctgaggacaaaactttatgtgttcatgaagataaagcagtgggttgtgacacagaagcaaaagaagaaaactaatttagtagcaggttgcatccaattttcattttccagatggaactgttctgaatctaccattattttaccaacgtcagtgattgactgtgttctctacattctcttggacagcattatacatttagccattgccaaccatttttccaggaggtttgttctgtgccccttggaaacatgctcaccaggcttactccattcgtaatttactggtatccattgcctcctggtgtagtttagagaatcccagaacacaggaaatataatcgtgatgttgtactttatgtagattgataatcttgagttcctgactattgaattccatttccccctttatttgttccgtgctcatctggaatgctgtaactagatagggtttagctgagttaggactggattatcaagtcataataatgatacgtgccttcgccatcccttcggaccatgttccaatgtgatacaatctactaccatgcaatatatcaccatcagcctgctaacgcacgccactagctttaagtttccaatccttctgtcagtttgtaatgtttgcagctacttcatccgtttcaatttacacttcctatgtccaatctaatggtgtgtttggttgaaa

SEQ ID NO: 119800 - DNA, 1414 bp, Zea Mays
acagcacaaccgtcgtggaactacacgccaatcgccaagtagggcaggccgagtttgcaacagccggcacaaacaaccacccacacacccatacaattggtgcttcacgttccaccaaccgaggccttgatcagcgcagcaatcggcgtggtgacaatggagttcttcccgggtgcgtacaagaaggcaacagcggcgctcgacgaggcggcgagggcgcggctacggggcccgttcatcagcgacaccgtcgcgccatcgccggcgccgtccggcggcgctgcggacgccgacgacgatctgatggattcggtcgacgagttctacaacggatacggcgagcacggcacggacggcggcgccgtcgccaaggatgccgtggcgtcccgggctacggagtggaaggaagctttgcgattgacgctggcggatgcggcggccgacgcggcagccgtacggatccgcgccgaggcggagcgcattgtccgagacgccgggccagccgccgttggcggcggcggcgggattaggaagcaccttgtggagcggctccgtgcgaggggttacgacgcccgtctctgcagatcgtcgtggggaagaaccagcagcatcgccgcgccgggcacgtacgagtacgtggacgtgacagtgggctcgccgccgccgctgccgtcagctcgctacatcgtggaggtaaacgtggcagccgaattcgaggtcgcgaggccgagcgccgagtaccaggacctcctctcctccctgccgccagtgctcgtgtcgagtccaccagctctgaaggaactcgccgcggcaatgtgcgccgcagcggcggagtccatccgcggcgcgggcatgcacgtgccgccgtggaggcgcgcgtcgtacgtgcaggccaaatggtccgcgcggttcgagagaacggaagccgcggcaccggtggcggcggcgacggggccacgcgctgaaggaggaccgagggcagcagcgcgtgcccggcggcctggcgtggggaagaattgcggaatggagatgggacgccggcagggggtcatggggcgggaggcactggtgagagtgaggcccttgttcagaggattctgagttgtgacgtggcaggaaggatcgcgggagggaggattgttcaggctttcagaggcctctttgttttcggtagcagtattctcttgggccatgaattatgtagaattcgtatgactcatattttggcgtgagggttaaaaaatcatattgaacttactgtatatggctgtacattttggttccatgattgaattcgtaggtagtaccaacatgtatatgggatatggtaagacatctttatgtcatcctattaaattgtaacagatgctgtgataaaaaaaactaatgatactattttctattatgttatttc

SEQ ID NO: 119801 - DNA, 312 bp, Zea Mays
atggacacccgcgccagcgtccaggctctagatcgacaaggagaagtggctaatcagcaaggttgccctctagatcgacaggtagaagtggctaatcagccaggttcccactgcaagataccaaccgtctatcgtcaagaggccactaatgttacagttggttggcttagtagcctctcctttggtccattcatggacctaccactagatgtgatggtctataataagggtcaaatgctccaaactagcctcacactcagggctggccctagggccatgcagcggaggcgaccgccgggggcctacgaataa

SEQ ID NO: 119802 - DNA, 1653 bp, Zea Mays
tccgagccgaaccaaggcgccatgggctcccccgtggtgcggcacgcgctcctcttgtcactcctctgcgccggagcactcggtttcttgctctgctgccatggcgccgcggtagcgccggcctacgtcaccgtctccgccgccagcttcgcgccgtcctcaacgtgcagcgcctccgacccagttgcgccgcagcagaacgacacgttcaccgtgctgcggctgacgcaccggcacgggccgtgcgcccccttgcgggcgtcctccctggcggccccgtcggtcgctgacacgctgcgcgcggaccagcgccgggcggagcacatactgaggagggtgtcggggcgcggcgcgcctcagctgtgggactataaggcggcggcggcgacggtgccggcgaactgggggtacgacatcggcacgtccaactacgtggtgacggcgagcctcggcacgccgggcatggcgcagacgctggaggtggacaccggcagcgacctgtcgtgggtgcagtgcaagccgtgcgcggccccgtcgtgctacaggcagaaggacccgctcttcgaccccgcccagtcgtcgtcctacgccgccgtgccgtgcggtaggtccgcgtgcgcggggctgggcatctacgcgtccgcctgctcggcggcgcagtgcggctacgtggtcagctacggcgacgggtcgaacaccacgggcgtgtacagctccgacacgctgactctggcggcgaacgccacggtgcagggcttcttgttcggctgcgggcacgcgcagagcggcgggctgttcaccggcatcgacgggcttctcggattcggccgcgagcagccgtcgctcgtgcagcagacggcgggcgcgtacggcggggtcttctcctactgcctcccgacgaagtcgtccaccacggggtacctgacgctgggcgggccgtccggcgtagcgccgggcttctccacgacgcagctgctgccgtcgccgaacgcgccgacatactacgttgtgatgctgacgggcatcagcgtcggcgggcagccgctgagcgtgcccgcgtcggcgttcgccgccgggacggtggtggacaccggcacggtcatcacccgcctgcccccggccgcgtacgcggcgctgcggtccgcgttccgcagcggcatggcctcgtacccgtccgcgccgccgatcgggatcctggacacgtgctacagcttcgctgggtacggcaccgtgaacctcacgagtgtggcgctcacgttcagcagcggcgcgaccatgacgctgggcgccgacgggatcatgtcgttcggctgcctcgcgttcgcgtccagcggcagtgacggtagcatggccatcctcggcaacgttcagcagcgttcgttcgaggtgcgaatcgacggctcctccgtcgggttcagacccagctcttgctgatccatctactcaccgattaacagccgtcgacttctgattacacattactgctagttgtaagtacagcaagtatatgcgtgtacgcacgtaagtacacgaacgtatagatatatgtacatgacagtacagacaatacatgtgagtatataccgtacactgtcactgatacatagtagcggtgaaagttctttagttgctggaattaagaggcttaagggg

SEQ ID NO: 119803 - DNA, 634 bp, Zea Mays
gaaagcttataaagcagcagtaagacatgcctttggttgattattctttgtgtttgctaccgaacaaggagaagaagcgttctaggcaaaagtgttccaattgaattaattctggactagaaagagcgaaagagtcggatgcactaaatccaatcctgaaacagttcctggcttggaactgttcctatgctgccgaacggggccgagctatttccaaatatatattatctattgctattccttcacatatcattactttatgtgttcttgctggttacatttggcaccattgttggaagcttgattacgttgatggagtttgtcccaccaatgtcgttgtaccgcataatctatgagctctctccaccttcatcatcatgacttttctcaaacttctctggtgtacacttgggagacttgagtgatcctgaaactttccactaccttcagcatgctcaagctcgccaaggaggccagcaggtggcaacatcctgttcgactacctcatcccaccgatggggatggacaagtgcaacacgaatggacaagtgtagtgcgaacagcgtggacagcggcaacatacacaaggagggcatggtgatgaacgggttgcccatcagtgtgtacacatcgg

SEQ ID NO: 119804 - DNA, 384 bp, Zea Mays
atggagagttggattatagttgggtttaaaaatattgacaggatcttcatgtcagtttcccttcccaaattagctgggggaccccaaggtttggttgctgagtgggccacaaggcatagatcgtggtgcacagcaggaagcgtggaggcctggagggtgaaggggataattcagatggtctttctcgaggacaccgtcgcaactgaggtggcgcgggccaagggcctctggatgtccaagtgccagaccgtgaacgagaaggaaatggggctacttgagattaaacatggactgctacaagttgcaaagacgttagattttcttcatacaagaagcaggcgggtagcgatggttatcctaggtggaaacctgactcaagggtaa

SEQ ID NO: 119805 - DNA, 2037 bp, Zea Mays
ctcgccgtccgatttggtacggcggcggtcgtgcccccatgtatgcacgccaccgttacctagtccaccacgagtcgatcgccgccgtcgtcctggttggctggttgcgtcggttccggggcatgcacccccggttcatcttgctccctgcctccgtctctctatataagcagcaggtgcattctgaagcggcaactcactgcatatctgacatctcagttgctgaacgcctgaaccgcaagtcatccatgacctcttctattccgaagctgcttctcctcctcttctttctcagccatcgctctcccattgctcgcgcaggcgatgatggcagctacaaggttctgtccatgggctctccgagaactgactccgtctgttcccagtccaaagcggttccttcgtcgtccgccggtgccgccacggtgcccttgcatcaccgtcacggcccatgctcgccgttgccgaccaagaagatgccgacgttggaggagacgctccaccgcgatcagctccgagctgcctacatccagcggaagttctcaggcggcggtggcgctggtggtgacgtccagcgatcggacgccaccgtgccgacggccctgggcacctccctgaacacgctggagtacctgatcaccgtaggcctgggctcgccggccacgtcccagaccatgctcatcgacaccggcagcgacgtgtcgtgggtgcagtgcaagccgtgctcgcagtgccactcccaggcggacccactcttcgaccccagctcgtcgagcacgtactccccgttctcctgcggctccgccgactgcgcgcagctcggccaggaaggcaacggctgctcctccagctcccagtgccagtacattgtcacgtacggcgacggctccagcaccacggggacctacagctccgacacgctcgccctgggctccagcgccgtcaggagcttccagttcgggtgcagcaacgtggagtcgggcttcaacgaccagaccgacgggctcatggggctcggcggcggcgcgcagtcgctggtgtcacagacggcggggacgctcggcagggccttctcgtactgcctcccgccgacaccgagctcctccgggttcctcacgctcggcgctgctggcggtagcggaacctcgggcttcgtcaagacgccgatgctcaggagcagccaggtccccacgttctacggcgtgcgcctccaggccatcagggtgggcgggaggcagctcagcatacccgcctcggtcttctccgctgggacggtcatggactcgggcacggtcatcacgcggctgccgccgaccgcctactcggcgctgtcgtcggcgttcaaggccgggatgaagcagtacccgccggcgcagccgagcggcatcctcgacacctgctttgacttcagcggccagtccagcgtcagcataccgtccgtcgcgctagtcttctccgggggcgccgttgtcagcctcgacgccagcggcatcatcctcagcaactgcctcgccttcgcgggcaacagcgacgacagctccttgggcatcatcggcaacgtgcagcagcggacgttcgaggtgctgtacgacgttggccggggcgtcgtggggttcagggctggggcgtgctgatcgatcgtgatcggcgcaaggacattgacaataccggccgggagtacgtactgtgctcgtttgggttgcgagtgcaacgtaaatggaagaagtgcaaaacatatacatactacttcgattttaattatctttgcgatagcatgcaataacgtcatgcatgcaagtgtgcaaactactaaaagctaaaagataatcttaatgtcacctgattgatgactataaaagattaatgatatattattgtattgcgcttggtgcgatgattaattatggtgtatacagccttttgggcgagctaatgttccttatatattactcactccgtctcaaaatatagttctcttgtagtccattttttctgttcacatttatgataatgaatatagatatatatataaactac

SEQ ID NO: 119806 - DNA, 1778 bp, Zea Mays
gcaactcactgcatatctgacatctcagttgctgaacgcctgaaccgcaagtcatccatgacctcttctattccgaagctgcttctcctcctcttctttctcagccatcgctctcccattgctcgcgcaggcgatgatggcagctacaaggttctgtccatgggctctccgagaactgactccgtctgttcccagtccaaaggtgtagtactgtccgtccgtgcacggttaattaattattctgtgcgcagttgtaatgatatctggcaaccgtttcccttgctttgacgacggtttcagcggttccttcgtcgtccgccggtgccgccacggtgcccttgcatcaccgtcacggcccatgctcgccgttgccgaccaagaagatgccgacgttggaggagacgctccaccgcgatcagctccgagctgcctacatccagcggaagttctcaggcggcggtggcgctggtggtgacgtccagcgatcggacgccaccgtgccgacggccctgggcacctccctgaacacgctggagtacctgatcaccgtaggcctgggctcgccggccacgtcccagaccatgctcatcgacaccggcagcgacgtgtcgtgggtgcagtgcaagccgtgctcgcagtgccactcccaggcggacccactcttcgaccccagctcgtcgagcacgtactccccgttctcctgcggctccgccgactgcgcgcagctcggccaggaaggcaacggctgctcctccagctcccagtgccagtacattgtcacgtacggcgacggctccagcaccacggggacctacagctccgacacgctcgccctgggctccagcgccgtcaggagcttccagttcgggtgcagcaacgtggagtcgggcttcaacgaccagaccgacgggctcatggggctcggcggcggcgcgcagtcgctggtgtcacagacggcggggacgctcggcagggccttctcgtactgcctcccgccgacaccgagctcctccgggttcctcacgctcggcgctgctggcggtagcggaacctcgggcttcgtcaagacgccgatgctcaggagcagccaggtccccacgttctacggcgtgcgcctccaggccatcagggtgggcgggaggcagctcagcatacccgcctcggtcttctccgctgggacggtcatggactcgggcacggtcatcacgcggctgccgccgaccgcctactcggcgctgtcgtcggcgttcaaggccgggatgaagcagtacccgccggcgcagccgagcggcatcctcgacacctgctttgacttcagcggccagtccagcgtcagcataccgtccgtcgcgctagtcttctccgggggcgccgttgtcagcctcgacgccagcggcatcatcctcagcaactgcctcgccttcgcgggcaacagcgacgacagctccttgggcatcatcggcaacgtgcagcagcggacgttcgaggtgctgtacgacgttggccggggcgtcgtggggttcagggctggggcgtgctgatcgatcgtgatcggcgcaaggacattgacaataccggccgggagtacgtactgtgctcgtttgggttgcgagtgcaacgtaaatggaagaagtgcaaaacatatacatactacttcgattttaattatctttgcgatagcatgcaataacgtcatgcatgcaagtgtgcaaactactaaaagctaaaagataatcttaatgtcacctgattgatgactataaaagattaatgatata

SEQ ID NO: 119807 - DNA, 1108 bp, Zea Mays
gaagccacaaatcaccaataaacaaacacaagatcgacgctgcagaggaaggcatccggcgggtggagcgtggacatataatatactagtagggagacgtagctcgtggtcgtcgtcgtttaataagaagcacttaattaaccacggcttaaccttaatcaagcgatcgtgacaagtacctaaaacaaacagcctagggtagcaggtacatcatcatgctcgggtccggcacgtccgtccagcagctcccggcgttccagtacgccgccgcggccgacgcgtcctcgccgatctcgaacatcccagcggcgtccagggacgcgaacggtgccatgtcctcggatactgaggagtacggcgccgcgaagccagcgggggtggaggacgtttcctccttagcctgcgccgccacgaagctgaacgccgggagcggcggcggaggcgcgaagagagacgccagcgccgccgcctgatcggcgaatatcggcgccggcggcggcgccaccacgtcggccgtggaggagaaggcgaagccgttgggcgtggggctcgcgctgccgctgccgctgctgatggagccgcggggcgaggacgccgaggcgcggcgcgggctcttggcgtcgcccaccgccgacgtgggcgtgggcgtgggcgtggacggcgccgacgagcgcttggccttgcggcagcccccgcccacgggcacgttgcgcaggacgccgcccttggtccagtaccgccggcagcccttgcagaagtggcgcggctgcgacaggttgtagttgttgtagtagcagaacttggtgttggtggactcgcaccgcgggcacttcacggccgccgcggccgaggcacccccgccgccgcactgcccctgcgcgcgccggaggccggcggccgctgccccgccgaacagccgccccgccagccccgggatggattggaactcctgcatggcgtcaagcgtcggcgtctacggcgtgctgggaaggatatggcctcggcgggcgtgagctagcttagctggtgctgtgtgtttgccgaggagcccggagcgtggcaactggcaaagtggcaagacgcaagagctccactcgctcgggatcgc

SEQ ID NO: 119808 - DNA, 616 bp, Zea Mays
cttcggtttggtaccacaatagaatagctttgcttattaattatggtggaccaatcaacagaatagataagttgagtatcagccatataccattcatattttggtgattgcttgcaggtgctccttacaatgccaaccacaccaacatatcggatgaaggaaattgcacaagctccacaagaatttctttatattgtgagtgtcgagaagatcaacagtatctttggtttatctcatggatttcttctagaacatttgtaattgctcgaacttgattttccaaagaacatgagtgtgattgttatatgccccaacggaatgcgtccttctgtcacatgctttatggatagggcaaaaaagtcaatggtgctagcatcaactctagctttgatgtgcaccaggcatgcttaaagctttttgtgcttatcaatgtttctgttttcatttttctttctctggtcttttgaaaaacatattccagatgtgtttggtgatagatgtgctttattcttttactaatgttttttcattgtgtaggatgctgacgggagggctactgatgttgcttaacatggttagttcacctggttcccccttcgccagagctactactttg

SEQ ID NO: 119809 - DNA, 179 bp, Zea Mays
tttttaatggtggggttagtggaaaatctggacgtatccgcgaatggtggagaagcacacaaaacaacaattatatgcaaaaactaaactatgttttctttgtttctatggtatatgaatttagtaccttgataatcacaatgattagagtccgtttgtatttatattaaaacataact

SEQ ID NO: 119810 - DNA, 1867 bp, Zea Mays
tactgtttatagagttaaatttgaaatagtagatgacataaaaagtctgatagagatggcctaatcaaactttttttgtgctatatctctctgtataaacgaattactaaaaacataaaaaatctcaatgaaatatattttattatattctctacaaatatatcaaatttaagttatatcctatgtttaaaagttttcaaaatacatccaatataaataatttaaaaataatataactagatggattaaaatttagtatatataatagagtgtacgtatatttgtttacaaattttgatttcacgaccctaaacagtaaacatcccgttctttaaagaacacccctccagtcaggccgtcccgcgccgacgtcaacggagacgtgtcaacggcggcggtgataagacccataaccttctagatttttttccgctgcctcaatggatctctgggagagggcccgggccttcgccggcgaggcggcgaagcggtcgcaggaactctccgcggaggcggccaagcgctcgtcggcgctggtctcggagacggcgaagaagtccaaggagatcttctccgaaaccgcctccaagtcgcgggagatcgccgctgaggccaccaagcaggccgacctcctcgccggccagatcaagcacctcgcctccgacctccctgtgccttcgatcccgcccatccccgcgatcccgcctatccccgccgctgcctcgtcggtgcccgacgcggccgagcttgagtgctacggcatcaccgacgacctccgcgagttcgtcaagggcatgaccataaacaccttccgcgacttcccactgcaagatgagcctgaggtgtctgatgtgccaactgtgtcgaatgtgcgtcaggatctgaacgagtggcaggccagacacggcacacttgtcctctcggcagtcaaggaaatatcaaagttcagatatgagctatgcccaagatacatgaaagagcgcaaattctggcgggtatattttttgctagtaaacagctatatagctccgtttgagaagaaatacttcgaggagctgaaagtgaaagcagaggaagagaaaaaggattcccagaaggaagcatcccaagcatctacaactgcagaaccgaaagacacaaaagtgccaagcaagacctcttcgacaaatccagaacatgacctggatgtatttctgctgggggatctgggtagcgatgatgaggcttctgttggtggtgatgatgggctagatgatgactttgataagattgatgcgacctcgggattggaaagtgatgacgatgacaaaaaggcagcaacagggaaggcagaaggtgtgtagtagtagactatggttttgagagatgacgccaatgatagcgaacttcaggattccatgatgatattgtatattagttgatcgcatgccgtatgttcatttgttatctcccaatgaaggaatgctaagcacttgttattacaattttcgattttttttactaaactgagacacctatctatggatggtgttactcttttcttattagaagtgttctgtgaactgtctctacgaaattgaactccgactgctcgagactgtaattcacatgatgcacccgtgtgtgaagataatagatttggtatatggtgcgatttttcaagcctgacgtacgtttttacacctgattacctgaaataatggggtctcattggaccacggtaaaatttctcgcctgagatttggcgaaattcggtaaaatttactatttctggtactgatcaggaaatggttttcaaacctatttcgttcaattttgtatttttttttgaaatttctgtaaaatcagaaaaatatgataaaaatac

SEQ ID NO: 119811 - DNA, 2975 bp, Zea Mays
gatgtagtcatgttatcagtagctaccaccaatggcagccaagggaactccatggaaacagtcatggcaacaatggagcgtcaaacagctcgcaggacccagactaatgtgacacagatgatggaatctatttttgccagtgtcagtcttgctaaagatctttctgctaggtgcaaaagcagagcattgcaagtcacggatgatgagatacaaagcacagcacaagacctggagaatgtcttgcagaatatatatgatgatctttgcaggataccagcttcagcatttggcagtagtgcttacatggatgtgcctattaaatcacagccaatgagggattgctgtaaggctgatatacccataaatgtaatgggcaacagacctaggacaaggtctctccgagataatgatactccgaggctggtggactttctcaagggaatgtaccatgaatcgcatgaatttagtgggcagatgttcaacactctcctagaggttacagaatacattgagccactgtatgatgcgttcatctgtgcactaacaaatgagataatgactgatcctgtgatgattgagagtggtgtgacatgtgacaggagagccatagaggagtatattgagaggtttgcagacagttctgaacctgtctattgtcctgtcacaaagatgacaatgcaaagtaagacaatggtgagcaatgcttccctgaagtgtgtaattgaagaatggacaatgagaaatgagatcatgcgtgtcaggattgctcgtactgccctttccctgtcaactacagacacaatggtgcttgaagctatacatgagctaaagttgctggccaagttgagggtgaagaacagggagctgatgcacaagatcggagtcaccaagttcttagcacggttgttggacaaccacaatgaccagattcagtttgaagctctcaagcttttgtgcttgttagctcaagatgaagaaggaaaggatatcatcggaaaaactaaggccattgccaggacaataaaattactgtcaagtaattctactgatgaaaggcatgcagccatctctttcttgctggagctttcggagtcacagttactgttggataatattggatcaacacctggaagcattctgatcctcactacaatgaagcttaacagttcagatgatccaattgctgctgcaagagctggagcagtccttaagaacctggagaagtgtccgaagaacatcaagtacatggctgaaagtggctacttagaacctcttcagagtcatctagtggaaggctcagaagagatacagatggagatggtcggctatctatgtgaactagtccaagagcaggagctcaccattgatatcaatagaagcacctcggaaatcctcgtcaagatggtgcgtggctgcaaccccatggtccgcaaggcagcgttgaatgtccttgcccagctttctttgcaccgccccaacaacaagatgcttgtcgacacaggcgctgtccctgtcatgattgaggaactgttcatcagaaaggtcgatgacgagcctgtgaactccatggccaatgccgccactgtccttgctaacattgtcgagtcaggcattgacccagacaccacggtggtgaacaaggaaggccatgtcctcacctcgaagtactccatctacaactttgtgcacatgctcaagtgcttcatgccggacgacctcaacctcagcgtcctccgcatccttctagcgctcaccgcgctcgccaagccactagacactgtggtctcggtcatcagggagaactaccgcggccattctatcatcgagctcatgggctcaccaacggaggtgctcagcctcgccgcgacaaggctgctcatcaccctgtctccacacattggacacaccatcgtagagaggctctgcaagacacaaggacagccacacaagctggtcaaaagcatcagccatgctgggcgcatcacagaacggcaagctacgttggccacgctcctcgcgaagctaccttaccggaacacctccctcaacatcgcgcttgtgaaggatggtgccgtgccagccatgctgagggcgataaaagaggtggagaacggcgctggtagatcaagcaggcaggctgtgccatacatggagggtctcgttggcacgctcgtgcggctcactgcgactctgttcagcccagaagtgttgaaggcggccatggaccacaatctggcctcggtgctcactgagctactcgatggagcagccggaagcgacgaggtgcaacgccttgctgcagtggggctcgagaaccttagttacctatccatcaaactgtcccggccaccgcccgatgagctgcagttcaagaagaagaataccctactgaagctcctgaaggactcaaaggcgcacagcaacaagaagacctcactccaccaggtttgcgtttgcccggtgcaccgaggagtctgttctccagcggcgacattctgcctcctcgaggctggcgccttggagggcctcttgggatgcctcgagaacgacaacatccgggtggtggaggctgccctccgagcgctgtgcactctcctcgacgagagggtggacgtggagaagagcgtagcggcccttgctgagctcgacgttgctcggcgcgtgcttgctgcgctgaggcagcaccggcaaaacgtgctgtggcagaagtgcttctgcgtggtggagaagctcctggaccacggcgacgaccgatgcgtgagggaggtgacaggcgatcggatgctgcccacggcgttagtgagcgccttccacagaggggacgagagcactaagcagacggccgagagcatcctccggagactacacaagatgcctgattactctgcaacctatgtatccatggagttctagtcgttggaatctaaacagtatcgaagtgtgtgcatacactacttttttttacttgcttgttt

SEQ ID NO: 119812 - DNA, 88 bp, Zea Mays
ttatgtttcctttgtatatgaatgctacagcgaactgcattggccagtgttcagagcactactacattatgccatgagaaaatgcctt

SEQ ID NO: 119813 - DNA, 108 bp, Zea Mays
cttctatgtggtttcgataaattcattggtttaccggcgctttcactcacctttgcctgtgctgaaaaatggtctagtttgcatccgtgaatctctaatcaggtaggg

SEQ ID NO: 119814 - DNA, 493 bp, Zea Mays
agaaatgaggctgatgtgcccatggatcgacgaccaagcctctcaaaaaggttgcaggcaagaggaaactactagaaagctttccgtaggtggatacgatgaagaggatggtgctgatgcctgcacagatggtcctgatataccttgatccgatgaagatgccatctagacaaaagataaaggatcttttgcttttgtgctcctagaaattatgcagttgatacttttttatcaacttctaccttccatcctagttgatgaaactttgtgtttttgcgtctgtgaaaacattgtagaggacatgttggtctacttcaaccttatcctctgtagttatgcttgtcttgtgtacctggagcatcttgttgcccccttgactttgggccttcagtgatagtatcaggatcctaacatatcgaccgatttttttgcattttaaacccttgtacaaaaaatcacgtttagacctctaacaatattctcgttttttgga

SEQ ID NO: 119815 - DNA, 181 bp, Zea Mays
tctgttttcctttgtatataaatgtttcagaaagttgcatcggccagtgtttagatggctgctacattatgccaagcaaaagttcctgttttcttttgtgttctggatagcattcggagcacttttggattttgccacaaaatgcctcttttgtgtgtgtgtggagcgggttatggatggt

SEQ ID NO: 119816 - DNA, 1035 bp, Zea Mays
ttccccatcccgtcccctaagggcacctttggtagccgaggatcccaggagaataccgacccattccctgccttccaaacccacgcgctaaattatcacagagcgagaaaaaaattatgtttggtgacccaactccccggcccaatccgtgggagagaacagggctttcgcccccggcctcacaaggtcgggaagggtttcctcgagctcaccctctccactcgtgcacccgccgccacttcctttctctcgcgcacccgacgtcgcatcctctctcgtgcagttggggccagctgttgggccgaggtcgacgacggggtcgacctctccgtggagacagccaaggcggccgtgagccacgccgccacgagccaccacgagcacgacggcgagctcagcgatctggagtcggatctggtggggcggcagaagactggctgctcgtcgtcgccggcggcaacaacgccggctgcagagctgatcgtgccgccagcacagcagatctagcaattccaggtgaagagaagagagccgatttgtgcttgctaatcactggcggagacctacagtgctacttgcatgtgtgcgttgcgtgcagatccagcaattccaggatttttgccacaccatgtgtgcgttgcgtgcttcgaatggattgaaatccaaatccatttcgtcttgccactgcactacacctgcacgcctacacctgcacgcccggccgagctcttgaccggtggtacaaaagggtttttcatcaacaagtggtcaccaaaagaagaactgaaacatcaagatggtgtttgcttctacgttttaccattgaggatatgatggtaaactgaagtcatgtattatgctatgcattcagaagatgatgctaaactgaataagcacattaatctgatttttctatgcattgagactatgtttgtattattgttatgcaatgcaatctatgcactaaaacgttcaactctgtttgatctggatgacatattcagaattataatacgttgctgccaatttgcaaaa

SEQ ID NO: 119817 - DNA, 815 bp, Zea Mays
ttccccatcccgtcccctaagggcacctttggtagccgaggatcccaggagaataccgacccattccctgccttccaaacccacgcgctaaattatcacagagcgagaaaaaaattatgtttggtgacccaactccccggcccaatccgtgggagagaacagggctttcgcccccggcctcacaaggtcgggaagggtttcctcgagctcaccctctccactcgtgcacccgccgccacttcctttctctcgcgcacccgacgtcgcatcctctctcgtgcagttggggccagctgttgggccgaggtcgacgacggggtcgacctctccgtggagacagccaaggcggccgtgagccacgccgccacgagccaccacgagcacgacggcgagctcagcgatctggagtcggatctggtggggcggcagaagactggctgctcgtcgtcgccggcggcaacaacgccggctgcagagctgatcgtgccgccagcacagcagatctagcaattccaggtggtacaaaagggtttttcatcaacaagtggtcaccaaaagaagaactgaaacatcaagatggtgtttgcttctacgttttaccattgaggatatgatggtaaactgaagtcatgtattatgctatgcattcagaagatgatgctaaactgaataagcacattaatctgatttttctatgcattgagactatgtttgtattattgttatgcaatgcaatctatgcactaaaacgttcaactctgtttgatctggatgacatattcagaattataatacgttgctgccaatttgcaaaa

SEQ ID NO: 119818 - DNA, 314 bp, Zea Mays
gatcgattgccaagtgatctcaagcaactgggagtgcatggtcgtagtgaaatcttcatcaccacgataccttcacccctctttattattccacttttacctgctcaccacttttcaactatgatcaacccaactccttatgatttgatcaggaagaagagccacttgccagtttggtaaaggagatcatgggaggcaggaggattttttttatcacgaatatgtatctagaggaagaagctccaatagagaacaccgacatcattgtttttgaaatagacatttcttttagaatacctcttcgaatagatatc

SEQ ID NO: 119819 - DNA, 1276 bp, Zea Mays
cagcgagccgaggcgagcggtctctcttcctcttcttttaccgatggccaacgattccctcgcccaccacctgctgcttcctctcgccggcggctgctggtccgacgtggaggaggaggaggaggaggaggaggcgagcaacgtctccttcccctcgttctggccgcccttccccgctctctcgccggaccccgactccgacgcagacagcttcgtgcgtccgcgcatggaccggccccgggagaccgccgcgtcgtccttcttcgggctcggcttccacgacggggaagacgacgagtgggcaccagccgacgaggatggggagctcgggctgcccctctgctgggactgcctgcagctggaggaccacgacgacgacgaccaccgaaggtgggacgtcggcgtcagcgacgcggacgagtgggagcaggttgccggccgggaggaggaggctgcggcggcggctgcggcgcccgcggttcggagcctgcagtgggaggtgctgctcgccgccaacagcctggggagcctcgtggtggacgacggcgacgacgacctggactcgggaatcgagacgtacttcctcgacgacgccgacgacctactattcgggcagctcgccgcggcggatgcggaccacgagccgccgccgggcaagtgcgggcgaccggccgcgaaggccgcggtggaggcgctcccgacggtggtggtcttagaggccgacgcgcagtgcgcggtatgcaaggacggcgtcgaggccggggaggagcgagcccggaggctgccgtgcgcgcacctctaccacgacgggtgcatcctgccgtggctcgccatccgcaacacgtgcccgctctgccgccacgagctgcccaccgacgacaccgagtacgagaggtggaaggcgaggcgggccgccggcgacggtggcgatgctgccgatgccgatgcagaccggcttggcacggcggcaggtacggtgtcctcgtcaggataccttgacgaatggataggcgaaaggagcaacgggctagtttgattcagcaattagagcgcggtgccgtgttaatgttcggttctgcaaccttgctgcaaattcctttttggtcgggttggagagggatcaaatcagtagtgtggattggttggtgtggtggtggttttcgtagacagcgatgacataacacggcgcattttaattttacaatgtgtgtatttggatgtgagatttaaggttatcggtttcttctgttctttatataaggcggaaagaacagtg

SEQ ID NO: 119820 - DNA, 519 bp, Zea Mays
atggatccgactccgagccttggcgcggcgaaggcaagtgttagcaacacagatcaagaagccgggccaactgcagcaaccaaggccgacgctggagcacgcacgtctgggagaccgccacggcgttctagccggcgttctcacttcttcctctcttctggatccctgtcctatccgaatatccttgctgctaacagtggtatcagattcagcgatcttgaatctcttctcgcgctggattcctctgctcttcatagccacttcactcgtcttcgtcggcgtcaagtactgatgaatccagaaactcagatcattttggatgagatcgctcggcgctttgcggatcacgacgccaagtgggatcggcgagtgtccgagcaggaatcgcgttgggaggcgacgttcgcggagttcactagaggccaggtcgatcgcgttgtggcgctggagacagcgtctaacgtgttcgaggattggcgtcaaggactggaaggagttgtcgatgacctgaagctggag

SEQ ID NO: 119821 - DNA, 720 bp, Zea Mays
atgtaccctgctgcagagatcgctagcgtccgatacctatctcctgctgcaggcgcagcctctctcagacctcattaccgtgacgacttcctcttccagttccagtacagcgacctcctgctggcgcctgcgcacccttcgctctaccaagatgtcgctgatcacctggtcctcggagctagcttcccggctgctggtgacaacaggtccagctcggaggagtcggacgcctacctgcagcgcagcctcgcggaggagcgcaggaagaggaggatggtatccaacagggagtccgcccggcggtcgcgcgtgaggaagcagaagcagctgagcgagctctgggcgcaggtcgtccacctccgcggcaccaaccgccagctccttgaccagctcaagtgctcaaccgtgtcatcagagactgcgaccgtatcctccgtgaaaactcccggctgagagatgaacggaccaggttgcagcagcagctggaggagctccctgcagaggccgcggagagtggtggcatgagtcctcctcctgactcttgaagcatccaggattacaggtgttattagatgagattttaactaggaggcttccttccttccttccttccttctatcctgatgctttcattttttttatcgttgctctatgtttggtatcaaagctagtatgtagctgccatgtggtaaatgatgagttctccattttctttcatca

SEQ ID NO: 119822 - DNA, 1875 bp, Zea Mays
tataagaaaggtccctctccgtttcttcaaactttagttctagagcccaccaaagaaaaaacaaataccggatagatattaaagcattttcctcgtcgacttaaaaaatagaacaaaaaggttcttccttttcgcagctccatcgtccaccaacctcctccgattcggccgtcgtagcgtatagccgaattgccccactccaggactctcgccagcttctccggccgactagaggctgtttccggcgagtgctcggctgatctcctccgcgcggctgaggagatcacgcggtctcgctcgggggggctggggcgtgcatgatgggactttggttgattccgacgatggagactccggcgaggcttctgtggagcaccagcttcttccgccacaaaatcgccgacatgcttgcatcctcctcctgcttcttatagatcccacccctcgacgtcgtcgccggcagctagctcgctagcttctgtacatacgtcgacgccatatctagctagtctcttcatccagtcccgataagtgataactaataattaggagcttgcttcgacgaccttgcattggtccatggagtccggacggctcatcttcaacgcgcccggctccggcgccgggcagatgctcttcctggactgcggcgcaggcggtggtcccggcggcggcttgttgcatcgaggtattagtcccatccaaatctattcctagggctcatcgatcgagcttggaactgttttgtgtactgctgattgcgtcgggggttgccatgtgggagtcatgaaggcgggagaccgatgcttggccttgaagaagggcgcggcgtaaaacggcccttctacacctcgcccgacgagctcctcgaggaggagtactacgacgagcagctgccggagaagaagcgccgcctgacgccggagcaggtgcacctgctggagaggagcttcgaggaggagaacaagctggagccggagcgcaagacggagctggcgcgcaagctgggcctgcagccccggcaggtggccgtgtggttccagaaccggcgcgcccggtggaagaccaagcagctggagcgcgacttcgaccgcctcaaggcctccttcgacgccctccgcgcggaccacgacgcccttctccaggacaaccaccgcctccgctcacaggtggtgtcgttgaccgagaagctgcgagagaaggaggcgacggagggcgacgccaacggcgccgcggcggcgttgccggcggtgggcgttgtcagggcttccgtggccgatgacgtcgaggaaccggagccggagccggagccggaggcagaggcggcggcgttcgaggagcggcaggtgaagtccgaggacaggctgagcacgggcagcggcgggagcgcggtggtggacgcggcggacgcgctgttgtacaacggcaggatcggcggcgcggccgtcgatagcagcgtcgagtcgtacttccccggcgccgaggtccaggaccagtaccacggctgcgggacgatgggtccagtaacccacggcgctggaggcatccagtcggacgacgacgacggcgccggcagcgacgagggatgcagctactacgccgacgaagaagccgccgccgcgttcctctccgaacacacccaccacgcggacggcgacgacgaggacgccggccaggtcagctggtggtggatgtggaactagcagagcaatcttcccgcggggaccgaccgccaaatctcgtgccaaaaaaaaattactgtatgcattttcgcatgtgtaatagctgtgagtgaaagtgaaaccgatagcgcgttctgtccgaattttttgtttttttagctccttttgcgataaaaatttacgtttagacccc

SEQ ID NO: 119823 - DNA, 1779 bp, Zea Mays
tataagaaaggtccctctccgtttcttcaaactttagttctagagcccaccaaagaaaaaacaaataccggatagatattaaagcattttcctcgtcgacttaaaaaatagaacaaaaaggttcttccttttcgcagctccatcgtccaccaacctcctccgattcggccgtcgtagcgtatagccgaattgccccactccaggactctcgccagcttctccggccgactagaggctgtttccggcgagtgctcggctgatctcctccgcgcggctgaggagatcacgcggtctcgctcgggggggctggggcgtgcatgatgggactttggttgattccgacgatggagactccggcgaggcttctgtggagcaccagcttcttccgccacaaaatcgccgacatgcttgcatcctcctcctgcttcttatagatcccacccctcgacgtcgtcgccggcagctagctcgctagcttctgtacatacgtcgacgccatatctagctagtctcttcatccagtcccgataagtgataactaataattaggagcttgcttcgacgaccttgcattggtccatggagtccggacggctcatcttcaacgcgcccggctccggcgccgggcagatgctcttcctggactgcggcgcaggcggtggtcccggcggcggcttgttgcatcgagtcatgaaggcgggagaccgatgcttggccttgaagaagggcgcggcgtaaaacggcccttctacacctcgcccgacgagctcctcgaggaggagtactacgacgagcagctgccggagaagaagcgccgcctgacgccggagcaggtgcacctgctggagaggagcttcgaggaggagaacaagctggagccggagcgcaagacggagctggcgcgcaagctgggcctgcagccccggcaggtggccgtgtggttccagaaccggcgcgcccggtggaagaccaagcagctggagcgcgacttcgaccgcctcaaggcctccttcgacgccctccgcgcggaccacgacgcccttctccaggacaaccaccgcctccgctcacaggtggtgtcgttgaccgagaagctgcgagagaaggaggcgacggagggcgacgccaacggcgccgcggcggcgttgccggcggtgggcgttgtcagggcttccgtggccgatgacgtcgaggaaccggagccggagccggagccggaggcagaggcggcggcgttcgaggagcggcaggtgaagtccgaggacaggctgagcacgggcagcggcgggagcgcggtggtggacgcggcggacgcgctgttgtacaacggcaggatcggcggcgcggccgtcgatagcagcgtcgagtcgtacttccccggcgccgaggtccaggaccagtaccacggctgcgggacgatgggtccagtaacccacggcgctggaggcatccagtcggacgacgacgacggcgccggcagcgacgagggatgcagctactacgccgacgaagaagccgccgccgcgttcctctccgaacacacccaccacgcggacggcgacgacgaggacgccggccaggtcagctggtggtggatgtggaactagcagagcaatcttcccgcggggaccgaccgccaaatctcgtgccaaaaaaaaattactgtatgcattttcgcatgtgtaatagctgtgagtgaaagtgaaaccgatagcgcgttctgtccgaattttttgtttttttagctccttttgcgataaaaatttacgtttagacccc

SEQ ID NO: 119824 - DNA, 1861 bp, Zea Mays
tataagaaaggtccctctccgtttcttcaaactttagttctagagcccaccaaagaaaaaacaaataccggatagatattaaagcattttcctcgtcgacttaaaaaatagaacaaaaaggttcttccttttcgcagctccatcgtccaccaacctcctccgattcggccgtcgtagcgtatagccgaattgccccactccaggactctcgccagcttctccggccgactagaggctgtttccggcgagtgctcggctgatctcctccgcgcggctgaggagatcacgcggtctcgctcgggggggctggggcgtgcatgatgggactttggttgattccgacgatggagactccggcgaggcttctgtggagcaccagcttcttccgccacaaaatcgccgacatgcttgcatcctcctcctgcttcttatagatcccacccctcgacgtcgtcgccggcagctagctcgctagcttctgtacatacgtcgacgccatatctagctagtctcttcatccagtcccgataagtgataactaataattaggagcttgcttcgacgaccttgcattggtccatggagtccggacggctcatcttcaacgcgcccggctccggcgccgggcagatgctcttcctggactgcggcgcaggcggtggtcccggcggcggcttgttgcatcgaggcgggagaccgatgcttggccttgaagaagggcgcggcgtaaaacggcccttctacacctcgcccgacgagctcctcgaggaggagtactacgacgagcagctgccggagaagaagcgccgcctgacgccggagcaggtgcacctgctggagaggagcttcgaggaggagaacaagctggagccggagcgcaagacggagctggcgcgcaagctgggcctgcagccccggcaggtggccgtgtggttccagaaccggcgcgcccggtggaagaccaagcagctggagcgcgacttcgaccgcctcaaggcctccttcgacgccctccgcgcggaccacgacgcccttctccaggacaaccaccgcctccgctcacaggtggtgtcgttgaccgagaagctgcgagagaaggaggcgacggagggcgacgccaacggcgccgcggcggcgttgccggcggtgggcgttgtcagggcttccgtggccgatgacgtcgaggaaccggagccggagccggagccggaggcagaggcggcggcgttcgaggagcggcaggtgaagtccgaggacaggctgagcacgggcagcggcgggagcgcggtggtggacgcggcggacgcgctgttgtacaacggcaggatcggcggcgcggccgtcgatagcagcgtcgagtcgtacttccccggcgccgaggtccaggaccagtaccacggctgcgggacgatgggtccagtaacccacggcgctggaggcatccagtcggacgacgacgacggcgccggcagcgacgagggatgcagctactacgccgacgaagaagccgccgccgcgttcctctccgaacacacccaccacgcggacggcgacgacgaggacgccggccaggtcagctggtggtggatgtggaactagcagagcaatcttcccgcggggaccgaccgccaaatctcgtgccaaaaaaaaattactgtatgcattttcgcatgtgtaatagctgtgagtgaaagtgaaaccgatagcgcgttctgtccgaattttttgtttttttagctccttttgcgataaaaatttacgtttagaccccagaaattttatttgcgagtttagacctgatgctcggcgtcataggctgtggcgccgaggtgtgacgtggcagtaacagctaccttcgcct

SEQ ID NO: 119825 - DNA, 347 bp, Zea Mays
cgttgcagtgtgagtgttggcttaaatgttgattgtaaataaaaccacactagactaatgcctctttggaagtggtcctggggacatgtgtagtctttatatctcggccatttaaaatgttgtctatatgtgcactaattttttttctcacagttagatttgtagttcaggatctaaataaagcgtcatatctacttttaatgttttagttacggttttcctttacgtttcctttactaaacttgaattatcttcccttctagcaataaaatcctgaagcaacatatagcacctataattttgagattactagtcacatactactactgttctcagtcctctaggga

SEQ ID NO: 119826 - DNA, 1428 bp, Zea Mays
gcttcactccactccactctacttcgtccatacagggaaaacaaaggcagcgtggtctggaatccaaaacagggcgagcggcacggcagcggaggggagaccacggtggttggctggctagttgccctctccgcccgccagagacctctcctctcctgtccccaccccctttggcctttgctcgttcgtggcgctcccgtacgcgtccagcgacgagagtttaccgctccggtttcgcttcgtacgggcggttgatacttgatagcggttgataagaggcgcggcggcggggcgagagagcttggttgcgccgaggttgcgcgaaactactagaaggaggggggacgaggaggagtgcggagtgtgtcttgctttgctttgcctcgcctgtccgggctggttggttggtctcccgctcgctacagtccaagccgacgcacaaatctcggtctcggacgcgccgccgcggtaggattccgggtgcctcgattccttgtttctttccgaggtatccacgaggttcgctgccatggagccagcaggcgtggcgcattgaggcgcgcgtgcggggccgtggagtggaggggcatggatctggaagccgcgggcggcgcggaggcggcgcacgggaagcggcgggcgacgctgctgctagcgtaccagagcctcggggttgtgtacggcgacgtggccacgtcgccgctctacgtctacaagagcgccttcgcgggcgacgacatccagcactcggagggcaacgaggagatctacggcgtgctctcattcgtcttctggacgctcaccctcatcaccctcctcaagtacgtggtcattgtcctccgtgccgacgacggcggggagggcggcaccttcgcgctctactccctcatctgccgccacgtccgcgccggcctcctgcccggcggcggcaccagagatgagctcatggaggaagagaaggccaccgggcgtcgtggcgagcggcccgtgtccagggtcagggcggtgcttgagaagtacagagtgctgcagcggctgttgctgctgttcgcactgctcgggacatgcatggtcatcggggacggcgtgctcacccctgcagtctctggttggacttggaccccttgccacagtcttggttttggatggttggtctcaatcgcattatagcattatatttgtttctgacgcgagtgatgtcgctccgtttgcagtgttttctgcggtatctgggcttgagttgtcgttggaaaaggaacagcacaaatgtaggttaaatcctttctttgattgcctgcgtctattgctttatagcacatggtagaatgcatatgggccaatgtttcatttactgtcgaattgtcttagttttagtcagctttatgtattatgctctattataccatgcttatgagatgcttactgcaa

SEQ ID NO: 119827 - DNA, 3185 bp, Zea Mays
gcttcactccactccactctacttcgtccatacagggaaaacaaaggcagcgtggtctggaatccaaaacagggcgagcggcacggcagcggaggggagaccacggtggttggctggctagttgccctctccgcccgccagagacctctcctctcctgtccccaccccctttggcctttgctcgttcgtggcgctcccgtacgcgtccagcgacgagagtttaccgctccggtttcgcttcgtacgggcggttgatacttgatagcggttgataagaggcgcggcggcggggcgagagagcttggttgcgccgaggttgcgcgaaactactagaaggaggggggacgaggaggagtgcggagtgtgtcttgctttgctttgcctcgcctgtccgggctggttggttggtctcccgctcgctacagtccaagccgacgcacaaatctcggtctcggacgcgccgccgcggtaggattccgggtgcctcgattccttgtttctttccgaggtatccacgaggttcgctgccatggagccagcaggcgtggcgcattgaggcgcgcgtgcggggccgtggagtggaggggcatggatctggaagccgcgggcggcgcggaggcggcgcacgggaagcggcgggcgacgctgctgctagcgtaccagagcctcggggttgtgtacggcgacgtggccacgtcgccgctctacgtctacaagagcgccttcgcgggcgacgacatccagcactcggagggcaacgaggagatctacggcgtgctctcattcgtcttctggacgctcaccctcatcaccctcctcaagtacgtggtcattgtcctccgtgccgacgacggcggggagggcggcaccttcgcgctctactccctcatctgccgccacgtccgcgccggcctcctgcccggcggcggcaccagagatgagctcatggaggaagagaaggccaccgggcgtcgtggcgagcggcccgtgtccagggtcagggcggtgcttgagaagtacagagtgctgcagcggctgttgctgctgttcgcactgctcgggacatgcatggtcatcggggacggcgtgctcacccctgcagtctctgtgttttctgcggtatctgggcttgagttgtcgttggaaaaggaacagcacaaatatatagaacttcctgtggcctgtgccatacttatatgcttgtttgcgctgcaacactacggcacacacaaagttgggtttctttttgcaccaatcgtatgcatttggcttctctgcataagtgcaataggcctctacaatatcatccgttgggaccaccatgtttatcgagccctctcgccatattacatgtatcaattcctcaggaagactcaaactggtggctggatgtcactgggtggaatccttctctgtgtaacaggctctgaagctatgtatgcagatcttggacatttttcgcaatcagcaatacagattgcattcatatatgtggtttatcctgcacttgtattggcttacatgggacaagcggcttttatttcacaacatcacaacttcgagagcagttatcatattggattttatgtgtcagtaccagaaacactcagatggcctgttctggtgattgctatactggcagctgtagttgggagtcaggcaattattactggaaccttttcaatcatcaagcagtgctcttcattaagttgtttccctggagtgaagattgtgcacacatcctcgacagtgcatggtcagatatacataccagaaatcaattggatgctgatgatactctgcctggctgttactattggcttcagagacacaaagcacttggcaaatgcacaagggttggcagtaataactgtcatgcttgttaccacttgcttaatgtcactcgttattgtgctttgctggaacaagagtatcttccttgcccttggtttcctgcttttctttggcgcgatcgaagtaatctacttctcagcttcccttgtcaagtttcatgaaggtgcttgggttcctattactctctccttcatatttatggtggtcatgtgtgtctggcactatggcacgataaagaagtacgagttcgatgtgcaaaacaaggtttcagtaaactggctcttaaaccttggtccttcgctgggcattgttcgtgttcgaggcattgggctaatacatacagaactgatgtctggaatcccagctatcttctcccacttcgtcaccaatctgcctgcgtttcaccaggtactggtattcctctgtgtcaaatcagttcctgtgccgcatgtgcaacctgaggaacgatttctggtgggtcgcattggtccgaaagagtataggctatacagggtcattgtcagatacggttatcgcgatgtccagaaagatgacctagagttcgagaaggagctagtcggcaacattgcagagttcatccgcagcagcgcggaatacgacaagaatggcttcgccgaggacacagataagccctccgggaagctgtccaccatcagcactggaattaacatgtgggaagaggatggagaacctgatgcatcctcatcccctcgcaaggagacagacccacgcgacgcagcacccgagcgaaagaaagcgaggttcatgataccaaagagcgcccaggtggacagcgaggtgcggcgcgagctgcaggagctcatggacgccagggaggcgggcatgtccttcatcctgggacgctcgtacatgaaggcgaagagcgggtcgggtttcgtaaagcgggtcgtgataaacttgttgtacgagttcttgaggaagaacagccgtggccctgcgtacgccgcgagcataccccatgcctccactcttgaggtaggaatggtctaccaggtctgacaaacagttagcggggtgtgtaaaggtagaagaaactagaagagatgagacgacgcttgtatatacacccacttgttgctgccgataccgttaacataattacaggataacacagagtagagagacatttgaaaacagctgtggatagcccaaccagaagcatgtgtttagtttcgtgatatgtttgctgctgctgttgacttgctgagtctcagacagtacttgtgagctgtcattgtctgtgagctgtaattgtctgggcgactagcaaaatagcagttttgacgtgc

SEQ ID NO: 119828 - DNA, 739 bp, Zea Mays
agtcatcgccaccggaccaccgtcacgcggagctctctcctactctcctcttcccctctaaaaccccacgaaatcgccgaaaggagtagcggacgcagcccccaccaccacttgttcaatctctctcctctcccgtctcgcctcccggagcgcaagaaaagctcggattcctggtggtttctaccatcctccgtcctcgatctgagcgttgcctgcttccctgcccccccgctcagatgtccgccttccgtgtcctgtaaaatctttcgccgcgcagcaatctccccccacttgtcggctgtcctgctgctgctgctgccaatggcgaccaagggagggaacgcaaggggcgttccggtgggggcgctgctggtggccgcgctcctccttagctccttggttcccacctccgcgtcctcgtaccccgcaagggtcgtgagcgggttcctctccaatgcggcgtcggcggtggtgaagcggctgtggtcgctcaaatccaccaccaagacagcagcgagcgggggaaagtctatggtgaagtacgagggcgggtacactgtggagacggtcttcgacggcagcaagctggggatcgagccctactccgtggaggtcacccagagcggcgaactactcgtcatggactccatgaacagcaacatctacaggatggcgctgccgctgtcccgatgtgagtgcgccctggctgatctccttctagccccccgccccccccccc

SEQ ID NO: 119829 - DNA, 2147 bp, Zea Mays
agtcatcgccaccggaccaccgtcacgcggagctctctcctactctcctcttcccctctaaaaccccacgaaatcgccgaaaggagtagcggacgcagcccccaccaccacttgttcaatctctctcctctcccgtctcgcctcccggagcgcaagaaaagctcggattcctggtggtttctaccatcctccgtcctcgatctgagcgttgcctgcttccctgcccccccgctcagatgtccgccttccgtgtcctgtaaaatctttcgccgcgcagcaatctccccccacttgtcggctgtcctgctgctgctgctgccaatggcgaccaagggagggaacgcaaggggcgttccggtgggggcgctgctggtggccgcgctcctccttagctccttggttcccacctccgcgtcctcgtaccccgcaagggtcgtgagcgggttcctctccaatgcggcgtcggcggtggtgaagcggctgtggtcgctcaaatccaccaccaagacagcgagcgggggaaagtctatggtgaagtacgagggcgggtacactgtggagacggtcttcgacggcagcaagctggggatcgagccctactccgtggaggtcacccagagcggcgaactactcgtcatggactccatgaacagcaacatctacaggatggcgctgccgctgtcccgatatagcaggccaaagcttgttgccggttctcccgaaggatttcctggtcatgttgatgggaagctgcgagaggcgaggatgaaccatccgaagggatttacagtggatgacaagggtaacatctatgtggctgatgccatgaacatggctattagaaagatcagtgatacaggggttacaactattgctgggggaaaatcaggcagaggagggcatgttgacgggccaagtgacgaggcaaaattttctactgattttgaagttcgttacattggcagtagctgctcgcttctggtgattgacagaggaaaccaagcaatccgggagattcagctccactttgatgactgtgtataccagtatgaagctggttttcctctaggagtggcactacttcttgctgccgcattctttggctacatgcttgcactgctccaacgccgagttttagggatgtattcaaatggagatgagcaggaagacgagagtccagtgaaagctaaactatctagcatcccacctccgtaccagaagccactgaagtcttctcttcgccccccgctgattccaaatgatgacgaacccgtgaaacaagaggaggaagggctcttcacgtcgattggcaaactcgtgggtgtagcaagatcatcagtcgcagagatcgtcggcgccacattctccagaaagaagcgagtgaacgttcaccaccaccagctgggcaggccgacctcgtggccagtgcaagagagctacgccatcccgcgggacgagaccccgccgccactggacacgagggcgccgaccccacgcaagagctacgccttcatgtcaaaggagccggagaagatccaccacatccggcacggtcggcctcagtcacacggctggaccggagaagctgctgctgctcctcagcagcaggcggcgtcgctgccgccgcagcagcagcagcagcagcagcaggtgcatcaccagcagtaccacaacaggcagtactcggccgggccgcagaccttctacgagccgagctgcgatgcggcgaaggagatcgtcttcggagccgtgcaggagggggacaccggccgccgccgtcccgtggagatcaagcccgtgaaccacggcgacgtggcgccgttcgagctgaacgggctgcggttccgcagcagttacggcatgggctaaaccagtggcaataagcagtcgaggaagagatctattgttgcctccgtccgtcctagtagtgttttggcgtcctccgttgtactggtagctgcctgtaaagtgtaaggaaaagagagggagcgatatagagatatcagtgcactcgaggggagcatttgacaagtgcaacggagaagttgggagttttggtaggaagagcttggtcatcatcatggttattggactctttactggcggtgatatatataatatatgtatgtatatgcgttttgatctca

SEQ ID NO: 119830 - DNA, 2073 bp, Zea Mays
ggacgcagcccccaccaccacttgttcaatctctctcctctcccgtctcgcctcccggagcgcaagaaaagctcggattcctggtggtttctaccatcctccgtcctcgatctgagcgttgcctgcttccctgcccccccgctcagatgtccgccttccgtgtcctgtaaaatctttcgccgcgcagcaatctccccccacttgtcggctgtcctgctgctgctgctgccaatggcgaccaagggagggaacgcaaggggcgttccggtgggggcgctgctggtggccgcgctcctccttagctccttggttcccacctccgcgtcctcgtaccccgcaagggtcgtgagcgggttcctctccaatgcggcgtcggcggtggtgaagcggctgtggtcgctcaaatccaccaccaagacagcagcgagcgggggaaagtctatggtgaagtacgagggcgggtacactgtggagacggtcttcgacggcagcaagctggggatcgagccctactccgtggaggtcacccagagcggcgaactactcgtcatggactccatgaacagcaacatctacaggatggcgctgccgctgtcccgatatagcaggccaaagcttgttgccggttctcccgaaggatttcctggtcatgttgatgggaagctgcgagaggcgaggatgaaccatccgaagggatttacagtggatgacaagggtaacatctatgtggctgatgccatgaacatggctattagaaagatcagtgatacaggggttacaactattgctgggggaaaatcaggcagaggagggcatgttgacgggccaagtgacgaggcaaaattttctactgattttgaagttcgttacattggcagtagctgctcgcttctggtgattgacagaggaaaccaagcaatccgggagattcagctccactttgatgactgtgtataccagtatgaagctggttttcctctaggagtggcactacttcttgctgccgcattctttggctacatgcttgcactgctccaacgccgagttttagggatgtattcaaatggagatgagcaggaagacgagagtccagtgaaagctaaactatctagcatcccacctccgtaccagaagccactgaagtcttctcttcgccccccgctgattccaaatgatgacgaacccgtgaaacaagaggaggaagggctcttcacgtcgattggcaaactcgtgggtgtagcaagatcatcagtcgcagagatcgtcggcgccacattctccagaaagaagcgagtgaacgttcaccaccaccagctgggcaggccgacctcgtggccagtgcaagagagctacgccatcccgcgggacgagaccccgccgccactggacacgagggcgccgaccccacgcaagagctacgccttcatgtcaaaggagccggagaagatccaccacatccggcacggtcggcctcagtcacacggctggaccggagaagctgctgctgctcctcagcagcaggcggcgtcgctgccgccgcagcagcagcagcagcagcagcaggtgcatcaccagcagtaccacaacaggcagtactcggccgggccgcagaccttctacgagccgagctgcgatgcggcgaaggagatcgtcttcggagccgtgcaggagggggacaccggccgccgccgtcccgtggagatcaagcccgtgaaccacggcgacgtggcgccgttcgagctgaacgggctgcggttccgcagcagttacggcatgggctaaaccagtggcaataagcagtcgaggaagagatctattgttgcctccgtccgtcctagtagtgttttggcgtcctccgttgtactggtagctgcctgtaaagtgtaaggaaaagagagggagcgatatagagatatcagtgcactcgaggggagcatttgacaagtgcaacggagaagttgggagttttggtaggaagagcttggtcatcatcatggttattggactctttactggcggtgatatatataatatatgtatgtatatgcgttttgatctcattcgacgcgaatt

SEQ ID NO: 119831 - DNA, 555 bp, Zea Mays
atgtggttggattggggcaccaacacgccaaactcgccggttggattgggacatcaacacggcacaacactcaccgcctatagaatgcacaaacatccccgacaacgggagcccctcacacacaacccatccagagttatcgttgccgagctcgacccaagggacaagcagctccgactccgcaaaacggcccccacatggccaaagaaaacacgacgacgcctacaaccaaacacaccatcacagaaggagaaagatcacagtgcgccgtcgttgccaagcctcaacacactccacgtgagacagctccgattcttcaccaatgagcttgaacctccgtcctaccccagtagatgcacgacccttcgtaacaatccagtccacgaagaagggggctcgtcagctgtcatcgttgccgagctacaacccttgatgcagcagcttcgacttcaccttgcaaagccccatcttcacccgcataccagacgccgagaatcgaaagcaaccattgaaggcgaagctgaggccgagacaaacttcaatgcgacgcattga

SEQ ID NO: 119832 - DNA, 1815 bp, Zea Mays
acagcagtacgcagcaacaacctagctatagctagccaagtcgcaagagccagtacgtgtgtgctgctgtgctagtcggtgcgatcgaaatggctcctcatggtgacatcgaccttgccaaggcctaccatcacgtcactgtgtcaatgagggagcacacggagaaagtgatggtgaagctcaccgcgccccacaccggcaagggcgacacggcgccgctcgacatcgtggttgtcctggacatcagcgggagcatgcgtgggacgaagctcgagcacatgaagcacgccatgaccaggttcataatcgagaagctcggcatccgcggtgaccgcctcgccatcatcacattcgaatcgaaggcacataaagtgttcgatctgtcgtccatgctcccggaccaagtgaagaaggcggtggccgttgtggaaggtctgaaagccggtggagacaccaacatcaaggccggcctcgaggctggcctcgatgtgctcaagacccgtagggggcattcgcataatgcttcctgtatcttcctcatgtccgatgggcatgagaacgtggacaaggcgaggaccctccttgaccgtgtcggcgagcactccgtggtcacgtttggttttggtgagaagagcgacgaacagttgctgtacgacatcgcataccacagccatgcaggcacgtaccaccatgtccgggagaaggaggatgagaaccagctgatgaaggccttcgcgttcctggctatctaccgctccatctccatgttggatctcaaggtgacagtgagtgcccacaaagaagctgcaggagccatcatacggggagtggatccttgccgctacagggtcgacggtccgcacggtgacgggtctttcacagtccatttcggtgatctcgcccgcgaggagagccgaaggatactggtggacgtgcagctccctcaagtacagcatgagcaaaaagataagccggtcattcatgtcaaatatgaatatagttctcccaagaaggtgaaggtcaccaacaccctggacatcaagatgaaccgcgtccagaatccgggacaggctgccatgaatccaaatgtgagccgggagctggcccgtcgcgcacaggtggagcacctgagaaaggtgatggatctggccaacaagaaaaaccttggtgcggccaaagatgaggtggagagagccaggaacgccttgaactctatcacccacgacacagatgacgccgtcgattccctcttcaacgagctggacaatatcgaagaatttctggagacgtacgacatctacaacaagctcggccgctcctacctgctggcctgcatctcctcgcatgaacgccagcgctacgcagagagaggcggtgccgctcccgtcgacctctacctcacgcagcgcatgaacaagtacttggatcaagcccacaaagttcacaagaatcccaaaaccaaaatctgatctcatgcatgcgatgatcagctagcaagacgatgattcatccgcaccgcgtgcactcgcatcgatcatccaccaataattcccctttactttctttgcttatataataacaggcccagttctatatgttctagtaggccctggattatttactgctgcatgctgctactaaagtttgcttttgcttcttaatttcccttgttcgacattttcattttatcctgtatctttgtaataactgctctgacgagatggctagcgcgctgcccaagtgtccaatattgtatctgctagccaactaaccagagggggttatggcattttaattaattttctttgatttcca

SEQ ID NO: 119833 - DNA, 84 bp, Zea Mays
gaaatgaggaacacaaaagataattatggtgctaatctagtggaaccaagcatttctacagatgtgcctaatttcttgcagggg

SEQ ID NO: 119834 - DNA, 851 bp, Zea Mays
ctcaagctagctaattaactgtgcaattagttgagtcagtagataagctgttccgtcttagcttatctaccgatcgagcccggcaatggcgatgatgccatgcaataacactcgaccccgcaagctgtcgctgccatgccgcacccgtactttccaagccttactaagcacagcagtcttcctggctgcttccacggccgtcgtcgtcggcaaggagccacaaccaccgtcctcctccggcggcggctgtcactaccgcttcgagctcacccacgtagctagatgccaacctcaaccttaccagcgacgagttgatgcgtcgtgcctatgacaggagccgcctccgcgcggcgagcttggccgccgactcggacggccgacacgaagggcacgttagcattcatgacgcctcgtacatcatgcatcacgttttacttgggcaaccagcggcccaaggacaacatctccgccgtcgtggacaccggcagcaacatattttggacgaccgagaaggagtgtagccggtccaagacaaggtccatgctgccttgctgcagccccaagtgcgagcagcgcgccagctgcgggtgccgacgaagcgagctcaaggccgaagccgagaaggagacgaagtgcacgtacgctatcaaatacggcggcaacgcgaacgacagtactgcaggcgtcctgtacgaggacaagctcaccattgtcgccgtggcaagcaaggcggtgcctggctcccaaagctttgaggaagtcgccatcggctgctccacctccgccacgctcaagttcaaagaccccagcatcaagggggtcttcgggcttggccgtagcgccacgtcgtt

SEQ ID NO: 119835 - DNA, 1482 bp, Zea Mays
atggcgatgatgccatgcaataacactcgaccccgcaagctgtcgctgccatgccgcacccgtactttccaagccttactaagcacagcagtcttcctggctgcttccacggccgtcgtcgtcggcaaggagccacaaccaccgtcctcctccggcggcggctgtcactaccgcttcgagctcacccaccggcccaaggacaacatctccgccgtcgtggacaccggcagcaacatattttggacgaccgagaaggagtgtagccggtccaagacaaggtccatgctgccttgctgcagccccaagtgcgagcagcgcgccagctgcgggtgccgacgaagcgagctcaaggccgaagccgagaaggagacgaagtgcacgtacgctatcaaatacggcggcaacgcgaacgacagtactgcaggcgtcctgtacgaggacaagctcaccattgtcgccgtggcaagcaaggcggtgcctggctcccaaagctttgaggaagtcgccatcggctgctccacctccgccacgctcaagttcaaagaccccagcatcaagggggtcttcgggcttggccgtagcgccacgtcgttgccgaggcagctcaacttcagcaagttctcctactgcctcagcagctaccagaagcccgacctgcccagctatctcctgctcacagccgccccggacatggccaccggcgccgtgggcggcgccgccgccgtggccaccactgcgctgcagccaaacagcgactacaagacccgctactttgtcgacctgcagggcatatccatcggcggaactcggcttccagctgtctccacgaaaagcggcgggaacatgttcgtcgacacaggcacctccttcactcgattggaaggcactgttttcgctaaactggtgacggaactagacagaatcatgaaggaaagaaagtacgtcaaggagcaaccgggcagaaacaacggccaaatttgctactcgccgccgtcgaccgctgccgatgagagcagcaaactgccagacatggtactgcacttcgccgactccgctaacatggtgctgccctgggacagctatttgtggaagacgacgtccaaactgtgcctggccattgataagtcaaacataaagggcgggatctcggtcctgggcaatttccagatgcagaacacccacatgctcctcgacaccggaaatgaaaagctttccttcgtgcgggccgactgcagcaaggtgatctgaagtatgcagcatgcaacacacagctaataataataagcgtcgcatgaagtaacaactatatatttatctgcttatatatgcagcatgcaatatccgtatgtaataagagaatgcatgtgcttgccgctatatatatactgccatgcatgtgtgcatgcagcaggtactgtaagctgcttcgatcctgtattattgtgagattttctgcgaaataaaagcatattatatgttaaa

SEQ ID NO: 119836 - DNA, 311 bp, Zea Mays
gaaaattatgtaatacttccttttggttactcccaagttgagattaagagaaccataccaaaaggatcagtgtattctacctctaaggatttcaagactaaaaagatatttgctggtgggcttccctcaacactaacagaagaagatttcaatagattctttgcaagatatgggactgtggtagaccactagattatgtttgatcatgagaccaaacattctcgagactttggatctatagtttttcaatctgagcaagttgtagatgatttgttacaaatggaaatatgattcaccttgttggttcgaag

SEQ ID NO: 119837 - DNA, 312 bp, Zea Mays
gctgctcgaggtggaagccggtttgaatggaaaggtttgtattctggattagctggaaatctcactggtgtccttccggcctctgcaatatttgtccgggtgtatgagccaactaaaagaaaattaatggagacacttcctaaaaatctgagtgcagttgcccattttgtaagttagacaatagtgttgtactgcatccaagttagatctcactgcattcaggtggtcaaacaaaggatgcaaactggtcaattcaagtctgtgcctgttgttgttcgtctcattgttgctaaagaaggatttaaaggactg

SEQ ID NO: 119838 - DNA, 864 bp, Zea Mays
agaggcagaggcgcaggatacgcgggggaaaaaaaaggaggctcactgtacaccgagctcacgcagggcgtagcaaatcaggtaggcgaaatcggagcagaggccagggacgcgccagcgcgagcgataaggcacactgacatggccgccacggcgtactccaccgcgctccccggcggggcgcgcctccccgctgccggagccgccgcaccgccctctgccctcctcctcccgcggcgtaataaactgtctccgctccctctccggctccaagatgcgccgaggctgtcgttgctccgggtgaaggcctcctccgacgactcctcggccgcgagcggggacgagctcatcgccgacttgaaagccaagtgggacgccgtcgagaacaagagcactgtcctcacctacgccggcggcgctgtcgtcgctctctggctgacgtccgtcatcgtcggcgccatcaactccgtgcctctgctccccaagatcatggagcttgtcggcctcggctacaccggatggttcgtctaccgctaccttctcttcaaggaaagcaggaaagagctcgccgacgacatcgagtcgctcaagaaaaaaattgctgggacagagtaaaacatgttgttctcgtgaaactttttttggacgattctttcgggaacacgttgcctcttgtctagactccagatcagtgctacatgtctttgcacttttttttttgttgcataccttatgtcctcgtctctctggagagctttgtacgacgatggagaacaacagtgtacgatcgaactggacgccatcctcggggattgttttcttaaaatgaaatagggtatgtatccgggttttcttttcatcact

SEQ ID NO: 119839 - DNA, 928 bp, Zea Mays
aggatacgcgggggaaaaaaaaggaggctcactgtacaccgagctcacgcagggcgtagcaaatcaggtaggcgaaatcggagcagaggccagggacgcgccagcgcgagcgataaggcacactgacatggccgccacggcgtactccaccgcgctccccggcggggcgcgcctccccgctgccggagccgccgcaccgccctctgccctcctcctcccgcggcgtaataaactgtctccgctccctctccggctccaagatgcgccgaggctgtcgttgctccgggtgaaggcctcctccgacgactcctcggccgcgagcggggacgagctcatcgccgacttgaaagccaagtgggacgccgtcgagaacaagagcactgtcctcacctacgccggcggcgctgtcgtcgctctctggctgacgtccgtcatcgtcggcgccatcaactccgtgcctctgctccccaagatcatggagcttgtcggcctcggctacaccggatggttcgtctaccgctaccttctcttcaaggccggcatctatctgttcactcgattgcaggaaagcaggaaagagctcgccgacgacatcgagtcgctcaagaaaaaaattgctgggacagagtaaaacatgttgttctcgtgaaactttttttggacgattctttcgggaacacgttgcctcttgtctagactccagatcagtgctacatgtctttgcacttttttttttgttgcataccttatgtcctcgtctctctggagagctttgtacgacgatggagaacaacagtgtacgatcgaactggacgccatcctcggggattgttttcttaaaatgaaatagggtatgtatccgggttttcttttcatcacttcattttgcaatccgtatgtctgtcaggacctggcacccagttcgtaa

SEQ ID NO: 119840 - DNA, 1922 bp, Zea Mays
atcactgcctctcctcgtctcgctttaaattctccctgcctctcctccatctcgcttcagtaatcactcctcagtgctcactagcccaagtcgccctaaacctagcccgggcacccgccagaccagccagcccaacaacgcaaaacgcgacgcggccaccgccttgtccatgggctcctcggcgcagctcaggcggctgaagcctctgtaccagctggtggtgaacaacatcctgaccatcgtggccgtgccgctcgccgccgcggtcctgctcaaggcggcggagctggggcccgaggagatcctggcccgggcccgcgcgctccggccggcgcacatgctcctggcggggttcctgccggccgtggcgacggttctgtacctgacgctccggccgcgcgcggtgtacctggtggactacgcgtgcttccgcaccaaccccaactgccgcgtcccgttcgcgacgttcctggagcactcccgcgtgtggccgggcttcgacgagcgcagcgtccggttcatgacgcgcctgctggagcggtcggggctgggggaggagacgtgcctgccgtacgcgcagcactacatcccgccgtcgcgcgacctggagtcctcccgcgccgaggccgagctcgtcatcttctcggccatcgacgacctgctcgccaagacgggcgtgtccccgcaggacatcgacatcctggtggtgaactgcagcctgttcgcgccgacgccgtcgttcgcggacatggtcatgcgccggtacgggctccgcggggacgtgcgcagcgtgcacctcgccgggatgggctgcagcgcggggctcatctccgtggagctggcccggaacctgctgcaggtggcgccgcggggcgcgcgcgcgctggtggtgtccacggagaccatcacgcccaactactacatgggcaaggagcgcgcgatgctgctccccaactgcctgttccgcatgggcggcgccgcggcgctgctgtccaccgacggcgccggcgcgcggttccggctggcgcgcgtggtgcgcacgctgcgcggcgcctcggacgccgcgtaccgctgcgtgtaccaggaggaggacgagcgcggcaacgtgggcatcaacctgtccaaggacctgatgagcatcgcgggcgacgcgctgaaggcgaacatcacggcgatggggcccctggtgctgccggcgtcggagcagctgctgttcgcgctgtccttcatcgcgcgcaaggtgctgaacgaccgggtgaagccctacatcccggacttccgcacggcgttcgagcacttctgcatccacgcgggcgggcgcgccgtgatcgacgagctccagcgaagcctgacgctgtcggacgagcaggtggaggcgtcgcggatgacgctgcaccggttcggcaacacctccagcagctccctctggtacgagctcgcctacatcgaggccaagggccgcatgcgcaggggcgaccgcgtctggatgatcggattcggctccggcttcaagtgcaacagcgccgcctgggagtgcatccgccccgccgccaacgccgacgacgggccgtgggccaactgcatccaccgctaccccgtccacattcccgacgtgctcaagcactgacccgactacaagcctgcgtaccgtaccgtacgtacgtccacattcccgacgtgctccagcggctcccgtacatgtgcgcccggggaacgggtgtgttgtggtccggagcgttgtatacacgtacactcgtttcgtcttgtgtccagatttctttatctatcatgtaatatgtttttcccatttctttaaaatccatgtacactttctatgtaatacagctacaagtctcacgtaccggttaaaacggttttcaagtttttaataaatattattcatatttattgctttaaatcaa

SEQ ID NO: 119841 - DNA, 828 bp, Zea Mays
cgcccgggaatcactccgcacgcgaaccgcagtcgcggacaccccacgcccagctcagctcggcacgaccaccaccaccaccaccaccagtcctccctcgccctccctccgttgtccgttccatccccgcgccgcgccgcgccgcgccggatgcctggagagctggagtccatcgagcagcggccggcacggcactcggcctttctttaatccgggacccgccctgagctcccccgcactacactgcatcgcgctcgcggctcgcgcgacgttgacattgggcatggccccttccccaccaccgccaccatcaccaccacctcgtcgtccactccctcccctccccctccacgcggagcggtgagctgtctcccccccccccccccctctgggagagcacaggcggcaacaacggggagtctcgtcgaaatggcggcggcggcggcggcggagatcgtgcgggagatcgcagcggtgggcgccgccgacctggccgccgccgccgatccgctgcgcgcggactgcctccgcctcgcgcggaaggtgtccctgctctcgcacctcgtggccgaggtcgccgacgccggggccggggccggggcgggcgatgcggcggcggaggcgtggctgcgcgacctcgtcagggcgctcgaggctgcccggaggtttgtcgcgctcggacggacgccggccgctgcgggggcgtcagatcaggtgaggaggtgctgggatggactcgtatggttacatggacccgtccgttcaacctgcattgcgttcttccctggctggtgcgtctcccttcgggggattttgtcgaacgcctaa

SEQ ID NO: 119842 - DNA, 767 bp, Zea Mays
atgtggatacgagatttgcagctggcatttggaaatctgtctgtaattgcagccctcaaatttagttgcattaatgttttggatgccatctgcaagaatactggtcttcagttcaagtatgtgacctggcagttgcaagctgctctggcaaacctgccacatagctgttttgagatatcagacgaagttcaagaagaggttgacttagtgcgagctcagcttagaagagaaatggaaaagaatggaggtcttgatgtaaccgtatttatgaaagttcatgatatcttagctcaaattgacaatgctgcaccacaatctcaacagccgcatcaacaaccagagcagccacagatggagaaattcagtaatgatgacctggagttgcgaaatgtcgtattgctagtttctgaaataagcgggttatccaaacctgacatgtcaaaaatagtatcagatctaattcaaggacttgaaaatgttgaaactcctgagtctccgaaaccagacaacgttgatcgccaaccaccaagtgatgaaacaaaaggctcatctgaggaagttaagaagtcggactctgtagctattcctgaagatttccgttgcccaatatctctcgagctgatgagagatccagtaattgtttcaacgggacaggtgaggcttcacactatcaccctttcattggtcctttaaactgtcatgtataatttgccggctgctgacgagctgctcacgaattctgtagacctatgagcgcgctttcattc

SEQ ID NO: 119843 - DNA, 2098 bp, Zea Mays
atgtggatacgagatttgcagctggcatttggaaatctgtctgtaattgcagccctcaaatttagttgcattaatgttttggatgccatctgcaagaatactggtcttcagttcaagtatgtgacctggcagttgcaagctgctctggcaaacctgccacatagctgttttgagatatcagacgaagttcaagaagaggttgacttagtgcgagctcagcttagaagagaaatggaaaagaatggaggtcttgatgtaaccgtatttatgaaagttcatgatatcttagctcaaattgacaatgctgcaccacaatctcaacagccgcatcaacaaccagagcagccacagatggagaaattcagtaatgatgacctggagttgcgaaatgtcgtattgctagtttctgaaataagcgggttatccaaacctgacatgtcaaaaatagtatcagatctaattcaaggacttgaaaatgttgaaactcctgagtctccgaaaccagacaacgttgatcgccaaccaccaagtgatgaaacaaaaggctcatctgaggaagttaagaagtcggactctgtagctattcctgaagatttccgttgcccaatatctctcgagctgatgagagatccagtaattgtttcaacgggacagacctatgagcgcgctttcattcagaggtggattgactgtggaaaccgaacctgcccaaaaactcagcagaagctccagaacctttcgttgaccccaaactacgtgcttagaagcttaatactgcagtggtgcgaggaaaaggggatggaaccacctagcaggtctaaaagcgacggttctcctcttgaggttgctggcaacagattagcaattgaagcgttagtccgcaacctctcgagcagttcattagatgatcggaaatctgctgcggctgaaataagatccttggccaagaaaagcacagacaaccgtatacttctagcggaatctagcgctataccggctctggtgaaactcctgtcgtccaaggacccgaaaacccaagagcacgcagtgacagctctcctgaacctctccatatacgatcagaacaaggagctggtagtggttgccggtgccatcgtcccaatcacacaggtgctgaggacgggtagcatggaagcaagagagaacgcagccgcggctatcttcagcctgtcactgatggacgacaacaagatcatgatagggagcaccccaggggcaatcgaggcgctggtggagctgctgcagagcggtagctcgaggggcaagaaggacgcggcgacagcgctgttcaacctgtgcatataccaggcgaacaaggtgagggccgtccgagcggggattctggtgccgctgatccggatgctgcaggactcgtccaggagcggagccgtcgacgaggcgctgacgatcctgtcggtcctcgcgagccaccacgagtgcaagaccgccatatccaaggcccacgccatacctttcctgatcgacttgctgcggtcaggccaggcccgcaacagggagaacgctgccgccatcatactcgcgctgtgcaagagagacgccgagaacctcgcctgcgtagggaggctgggcgcccagatcccgctcgccgagctggcgaagaccggcacggaccgagccaagcgcaaggcaacctcgctcctggagcacctcagcaagctgcaggtgctctagtagtcccacccaccactgtccatccacagccacaccactctgtgcgcgcgcgtgcgttttcgacttttccacgccacggtgtatgcgtacaaatgcgagtagtgtagcatcatcatcatcatctgtcgtcgagtgtgatttcggtggggttggtgataagttcgtttcagtcagaggagcaagaccaaacgcttgttcgttctgtcagctcatgtctgcgtgtagtttgattcgagctttttcaaaagctcgcggtgtgggaattacctcggtcgccatcgaaattttctacttatattattattatgactcctttgtcttcaagacatcaacctgacatcaacctggtaccatcagcacttaattcctggggctaccttcagca

SEQ ID NO: 119844 - DNA, 1382 bp, Zea Mays
ctttcacctcctcgagcctccctctcctctcctctcctctgactccgcccccttttaaaattgggaccctcgccgccgcgccccgcagacccgcacacacacagaccacaccttctcgccccctcgcaagtcgcagcagggacagcggcagcgacgccaccgcaccaccacctcgtccgccacccgcaatggggaacagcatcgggggcaagcgcaagagcgccaaggtgatgcagctggacggcacctccttccgcgtgaagcccccggcggcggcggcggccgacgtgctgcgggaccacccgggcttccagctgctcgagtcggaggaggtcaagctcctgggcgcccgcgcgcgcccgctggcccccgacgcgccgctccgccgcggccggctctacttcctcgtcgcgctcccgcgccgcgcgcccgcgggggggcccatgcgccgcgcctggtcgggcaacctcaacgtcggcgcccgcgagcggctcgagtcgctcaagctcgcgcgccgctccacctccgacctctcctcgctccccgcccccgcccacgcctccgcgtcggcccccgcctccccgctccccggcggcggcggcgccacgcccgtgcgcctcaagatgcgcctcccccgggcgcaggtggagaagctcatgggcgagagcaaggaccccgccgaggccgccgccaagatcatggagctctgcggcgcggccgtggcgggcgacgcgcacgccagcgcccgggccaccccggaccgcccgcggcccgggatcctgcgcagccctaggttcgccaagacaccggagtggggcgcccggttcatgctgccgtcgccggcgccggcgccggccaagacgccgccgcagcggtggcccacgctgccacgcaccaacgagaaaaaggcgcggttcgtagagttgccggacgagctgatagcgtgacctgggcttcgccgaagcgagttaacactcccttttttttccttcttcttcaatgtactgtcgcaaagcatgtttggtgatcgtgaggccaggagacgaggaattgtaaacttatctccaggcgggcgcgctgtactccttcagccgctcatatccgagcgaaacacaaagtatggtttgaagatgagaagccgcccgatggcttccgattcaccttgctccagtgatctgactgactgacaccgtgttacttataccgtcagtatgttttccttccgccttcttctcgaacctctctctctctctctctctctctgattgtgtgttccttcctgttgtctcaccagtcaccactacggtgcgttatgtgctacattgccaaggccaattattccagtcagctctggttgccattgggggcagcttcgtcgtagg

SEQ ID NO: 119845 - DNA, 778 bp, Zea Mays
acgctgcacgacgctagaggaaaacgcactgccaacggacaacggagtcaggtgcggcgggaggtagcatgagggagcagcaggattccggcgacgtgacggggcgccggggcggggtcatcaggtcgctgctgggcgtcgagcgccggctcgcggagggcgacgcggacgccgagggggcgctcggagcctcctcggagaagcagcatttggccgcggacagcggcgaggagaggaaggcggtggtgagggtggtggcggctgacatgccgcccgcgctgcagcgccgcgcgttccgctgcgcccgcgacgagctcgcggcgatgccgcacttcccgcgccggctcgagcccaagcgcctcgcgctggcgctcaagaaggagtttgatactgcttacgggccagcttggcactgcatcgtggggacgagtttcggttcgtatgtcacgcacgcccggggcggtttcttgtatttttccgtcgataaggtctacatcctgctcttcaggacagccgtggagccctctaatcattgacggccaccggcctgccagcaatggacaaatggctcataaaaacgcgcagttcttgggacagcttgcaccaaattcagttgttcagtcagctaggccgagcccttgtaacttgtaaatcgcattgtttcttggtaggcaaatgtaaactactccttatgcttctgataaaatttaacatttcagtttgttggggtcatctgtttcagctggatctattcaagactgctaatggtttttgtttt

SEQ ID NO: 119846 - DNA, 1428 bp, Zea Mays
gcaatccaagctagcagagcagcagatattgaaaacatatacacataaaagacgtacgtacaggcagtcttgaggagaggccaaagcaacaaaaaatggcagctctcgccgtggtcttcgccatcaccgccatcagcggcgcggtggcggcggccgacgatgttgcgtcttctacggccgctagaaatttcacggtagcgtctcctccctctccgacgacgacgaccagtggtccggtgacgtacgtgttcggcgactcgatgtcggacgtgggcaacaacaactacttccccacgtccctcgccaagtccaactacccctggtacggcatcgactaccccggccgcgaggccaccgggaggttcaccaacggaaagaccatcggagactacatggccgagaagttcggcgtcccgcccccgccgccgttcctgtcgctgaggatgacaggcaaggacgtgctcggcggcgtcaacttcgcctccggcggcgccggcatcctgaacgagacgggcgtctacttcgttcagtacctctcgttcgacgagcagatatcgtgcttcgagatcgtcaagagggcgatgatcgccaagatcggcaaggacgccgcggaggccgctgctaatgcggccttgttccagattggactcgggagcaacgactacatcaacaacttcctgcagccattcatggcggacggcaccacgtacacgcacgaccagttcatccgcctcctcatcaccgccctagaccggcagctcaagcggctgtacgggctcggcgcgcggaaggtggcgttcaacgggctgcccccgctgggctgcatcccgtcgcagcgcgtccgctccacggacggcaagtgcctgtcccacgtcaacgactacgccgtgcagttcaacgcggccgccaagaagctgctcgacggcctgaacgccaagctgcccggcgcgcagatgggcctcgccgactgctactccgtcgtcatggagctcatcgaacaccccgaggagaacgggttcacgacggcgcacacgtcgtgctgcaacgtggacacggaggtcggagggctgtgcctgcccaacacgaggccctgcagcgaccgcagcgcgttcgtgttctgggacgcctaccacacctcagacgccgccaacaaggtcatcgcggaccgcctctgggccgacatgacgagcgccgggcacgggagcgcctcggctactcctcacgtcgccgcgtctagccccgacgtggcgccgtctccatccccgtctcaggactattgaggaacccaaaccgacgaccaagccgatcgatgcacggtgttgccaagcgccagctagcaggacattttggcatttgaatctgcagatgctcagttcaccttatgtttcacagagagcgaggagcatatacgttgtgttttgatgttgt

SEQ ID NO: 119847 - DNA, 1005 bp, Zea Mays
gtacatacggttctgcctattccacccgggctcggcggccgcgtcgcagtctgctcgcttgtcctgtccctgtcctgactggagtagtggagtctgagagattctctagcggaatccctcgatcgagaggaacacaatccctttctcccactgccgctcccacagtaacaagtgactctaccctcgccggcagagaagaagacgatggacggtgacgccggcatgatcccatcctcgccctccgccgagacatcgccgtcctcgtccgactccgatatcgccactgagtccaccacggggtcgttcttccgggaccggagcacgacgctgggcacgctgatgggcgtgtccctcgccgacgaggagcgggaggatcaccaccactactcagggcaggacgcagtggaggaggggaccgggtcggggacgccgtgtgctccggtgcatgaggaggaggaaggggaggggcggaggtggcgccgcaggtggaggcgccggcactggcgcggcgccgcggccggctggtggaggctgtgcagggacgacgtccgcgtgcccacgtcgctcggccacttcctgggcatggagaggcagctctccggcgccgggctgctgtgcggcgacgacggccgcgcgggggagcgggacgctgccgcggctgaaacggggaggtggaagctgcggaggccggcgcatgggacctcgtcgtccttggcgaggctgccggtgctgctcacggcgatctgcagcggtggagccacttgacctgagtcgagcggttcggagatgaaatccgcggttttgtgactacttcacttatttattattcaatttcagttgctcgtcaattcgtcatgttcatggcagttatctgtcatttgtcaccttctttttctgtcatttgtcaccttccgtttctaatccgagtcggtcaacgttgaacactctcgattctagtgtgataatcgtggaatacaatcatgcaatccattacgcagttgcttc

SEQ ID NO: 119848 - DNA, 2509 bp, Zea Mays
agccttttgcccaaatcacccatccgcaccatccgcgagcaagctccagcgatccagccgcatgccacgcaggccctatgacgcccgccatcctcatccaggagtgcccccacccccagcgccccttccacccccgcaccgccgtcctgcccctctcccctcccacacccactcccttcctccatctccatgctcggcgccctcaccatctcccctctgcctccgctccacctccctaaccgcctccgacctaaccgcctccccccatagaccgaacgggatcttcgcgtccgacgcgcccatcgacgtggacgccgccatggaggacgagctacgggagaaggaggacggtagccccaggcaactcgaaagaggtagcagctgcactgtctcaggctttaagaaattctttagaaaggtattcttgtacttctttaatatttgatgcagaaagaaatcatcgatatttcttatcaatgcatgctaagctatcatttaaagtgccatgcttggtttgtgagggtttggaggatatgttggctcactttaaatatatactatgtatttttaaatgtaaggcatgaaatatgtaatgaatcctgctactcttgtgcttagataggcttttgtttttatattggtaccctaatctgtttgaacaaacctaattggatcatcaaactgcattataactatatataactttatggtctgctatttttcctttcaccataggttttggaaattatttttgtgccattttggttacctttattatgtgataagaacatagcacaagagtatttactcttgtatgacaaacaccagttctgaatctttaatgctgacggactggtcttctcatggctggtactaagactgacggcgtagcgaatgataaaagtatgctacattgcattttacactacttaaaggggtaggtcaactgttgtgtagagaattattaaacatgccatcattatattgtttcatcaggtgtggggttctcattgtgcaagaactattcttatgtatggtcacttgtttattgttaaaactttggaccacacaaatatcattagatgtatttctaatgatacgtacataggtggtagagaaaggagtagcacaatttaatttgatggcatatatatagaatgaaatagtagtactatcagctataactattgataaatgatgcagtctaagagcataccaatatgatttgccacactggtagaaactatgacttgtctgctgcatcctgcacatgagcatgtgatttgaagaatcgcaccatttgaagcaatcaatgggattttaggtctgcaagtaatgggtcttggatttactaggtactagcaacctcacaaccaaaacatggtgaccacaatatccaggattagatgagattagagtcaggtagttcaaaagtaagattagaccgcccaagacatcatcgctgatttattgaccaacaccaacgatgacccaaatagcgcagatttgccagttcatggagaggaacccggatgtgaggttcctgcatgcaggtgaactatgaggagcacaagtctatgcgctacaaccttaatgtccatgtcatccctttcttcacgttctacaggggagcttagggtcgactctgcaacttcagttgtatcaaggcaactgtgagatcctatgttctactgtcaatagttctgtgtccctattctaattgttgtttaagtaaggttgagtacaattattttggaagatgtttctgtggccaatgagcaattatattaactaattcagtgaaatgaaaagttttgagggtcttgttattatttgcaaatgaaaaaatggcattagtaggtggtcccaagtacgtgccttttgcaacgccttcagatctactaggcaaagaaatcaaggaggcccttgcggctgaatgcaataacagttccttggtctggtacttgtctttgatgtgccatctgacttccattgcaataacagttccttagtgcttcagcatagataaggtccaatatttattgttaatggctaccagttgatttaacttatacaattggtgactgttgtatgcagaatgagcagttcagagatgcacttgcgaagcacagacttctgacaccaacgacaccattagcaaggcagggatccgatgatatgtccttggtgtcatccgtgatataaaccacttcctttagtcatgtgctattcttcactgttattcatgtgtacagttgttcctttccatagtcacagagtgtaggtttctagattttttgcttgtgaagtctacccacgctgcctcgctcttgttctttataatgagatgaaattgtatggtggctttgcgagtgagatgaaatgtatggtggctttgtgagtgaaccattgtggtttaccaagtctatttcaactcaaaaaatggcatcgggaggcaaaacaactgcaaaagggagcaaggctatgacggtaccggtagcgaaggccc

SEQ ID NO: 119849 - DNA, 935 bp, Zea Mays
gccgcatgccacgcaggccctatgacgcccgccatcctcatccaggagtgcccccacccccagcgccccttccacccccgcaccgccgtcctgcccctctcccctcccacacccactcccttcctccatctccatgctcggcgccctcaccatctcccctctgcctccgctccacctccctaaccgcctccgacctaaccgcctccccccatagaccgaacgggatcttcgcgtccgacgcgcccatcgacgtggacgccgccatggaggacgagctacgggagaaggaggacggtagccccaggcaactcgaaagaggtagcagctgcactgtctcaggctttaagaaattctttagaaaggtattcttgtacttctttaatatttgatgcagaaagaaatcatcgatatttcttatcaatgcatgctaagctatcatttaaagtgccatgcttggtttgtgagggtttggaggatatgttggctcactttaaatatatactatgtatttttaaatgtaaggcatgaaatatgtaatgaatcctgctactcttgtgcttagataggcttttgtttttatattggtaccctaatctgtttgaacaaacctaattggatcatcaaactgcattataactatatataactttatggtctgctatttttcctttcaccataggttttggaaattatttttgtgccattttggttacctttattatgtgataagaacatagcacaagagtatttactcttgtatgacaaacaccagttctgaatctttaatgctgacggactggtcttctcatggctggtactaagactgacggcgtagcgaatgataaaagtatgctacattgcattttacactacttaaaggggtaggtcaactgttgtgtagagaattattaaacatgccatcattatattgtttc

SEQ ID NO: 119850 - DNA, 691 bp, Zea Mays
gccgcatgccacgcaggccctatgacgcccgccatcctcatccaggagtgcccccacccccagcgccccttccacccccgcaccgccgtcctgcccctctcccctcccacacccactcccttcctccatctccatgctcggcgccctcaccatctcccctctgcctccgctccacctccctaaccgcctccgacctaaccgcctccccccatagaccgaacgggatcttcgcgtccgacgcgcccatcgacgtggacgccgccatggaggacgagctacgggagaaggaggacggtagccccaggcaactcgaaagaggtagcagctgcactgtctcaggctttaagaaattctttagaaagaatgagcagttcagagatgcacttgcgaagcacagacttctgacaccaacgacaccattagcaaggcagggatccgatgatatgtccttggtgtcatccgtgatataaaccacttcctttagtcatgtgctattcttcactgttattcatgtgtacagttgttcctttccatagtcacagagtgtaggtttctagattttttgcttgtgaagtctacccacgctgcctcgctcttgttctttataatgagatgaaattgtatggtggctttgcgagtgagatgaaatgtatggtggctttgtgagtgaaccattgtggtttaccaagtc

SEQ ID NO: 119851 - DNA, 768 bp, Zea Mays
gccgcatgccacgcaggccctatgacgcccgccatcctcatccaggagtgcccccacccccagcgccccttccacccccgcaccgccgtcctgcccctctcccctcccacacccactcccttcctccatctccatgctcggcgccctcaccatctcccctctgcctccgctccacctccctaaccgcctccgacctaaccgcctccccccatagaccgaacgggatcttcgcgtccgacgcgcccatcgacgtggacgccgccatggaggacgagctacgggagaaggaggacggtgcgtatgtggaacgtctcagatctgccactctatctccggcaacctaggtcgggtgaggtagccccaggcaactcgaaagaggtagcagctgcactgtctcaggctttaagaaattctttagaaagaatgagcagttcagagatgcacttgcgaagcacagacttctgacaccaacgacaccattagcaaggcagggatccgatgatatgtccttggtgtcatccgtgatataaaccacttcctttagtcatgtgctattcttcactgttattcatgtgtacagttgttcctttccatagtcacagagtgtaggtttctagattttttgcttgtgaagtctacccacgctgcctcgctcttgttctttataatgagatgaaattgtatggtggctttgcgagtgagatgaaatgtatggtggctttgtgagtgaaccattgtggtttaccaagtctatttcaactcaaaaaa

SEQ ID NO: 119852 - DNA, 838 bp, Zea Mays
cacaagtctatgcgctacaaccttaatgtccatgtcatccctttcttcacgttctacaggggagcttagggtcgactctgcaacttcagttgtatcaaggcaactgtgagatcctatgttctactgtcaatagttctgtgtccctattctaattgttgtttaagtaaggttgagtacaattattttggaagatgtttctgtggccaatgagcaattatattaactaattcagtgaaatgaaaagttttgagggtcttgttattatttgcaaatgaaaaaatggcattagtaggtggtcccaagtacgtgccttttgcaacgccttcagatctactaggcaaagaaatcaaggaggcccttgcggctgaatgcaataacagttccttggtctggtacttgtctttgatgtgccatctgacttccattgcaataacagttccttagtgcttcagcatagataaggtccaatatttattgttaatggctaccagttgatttaacttatacaattggtgactgttgtatgcagaatgagcagttcagagatgcacttgcgaagcacagacttctgacaccaacgacaccattagcaaggcagggatccgatgatatgtccttggtgtcatccgtgatataaaccacttcctttagtcatgtgctattcttcactgttattcatgtgtacagttgttcctttccatagtcacagagtgtaggtttctagattttttgcttgtgaagtctacccacgctgcctcgctcttgttctttataatgagatgaaattgtatggtggctttgcgagtgagatgaaatgtatggtggctttgtgagtgaa

SEQ ID NO: 119853 - DNA, 2607 bp, Zea Mays
aaatgatcgaaatcaattgcacacggcgccacaacgcaaaactttaatccgatcacaaaccaatctcgaactagactagaacgtgaaaccctaaaactaatgggtttactgctaattagggtgttatcatgtcgacgaacaatatcagacgtacacgtacacgtgtggtgcagagcgccgggcgcgtatggttcatgacgccgccgccgtgtccatcatggccttgaactcgtcgaagcagaccaccccgtcgccgtctatgtccaccaccgcgatcatctctgcgcaccgctcggccgtcatctcctccccgacgatccccagcctccacagagcgcggcgcagctcctccgcggtgatcacgccgtcgccgttctcgtcgtactcggcgaacgcagcgcgcaacgtgtctgaccggtcgccgtcctcaaacagcgcctcgagctcctcgaggctgatgaacccatctccatcgcggtccgcgacagctaccatctcgtctgcctccacggctgtgcacccgcacaactcgcgcatctcgtccgccgagatgcggccgtcgccgtccgcgtcgaagtggcggaacacgcggacgagggccggctccggtattgtgtacgtgggcgggggagtgctagccgcggctgggggaggcggacttgaggagcggcgtcggctgaagaagatatcgctgcaggacgcggtggcggagacgacgagacccattgccggccgggtgcgacagctttgaatttgattgacggccttgacagggttttgaccctgtttttatataggagtaggacccgccagatagatgaaactcctacgcggttagtttcggtcccatctggtcttatcgtatactggtgcggacctagttgccctctccgcatccaaccagctagcgcgtccgtccccatggcggccgccgccgcggggtttacgccggcgactgcaaggaaggccctcttcactactacagtcactctcctctcatcgtcactctcacgtagggccagcagcatccgcagccgcaacctctcctgctctgccgcgttcaccgccgccacgcgcctcgcgccgcagccgccggacctggtccggtgggtgcagcgcgagggcggattcgtccaccgtgccctccgcgtagcgaatcatccggaacacgggctcgggatctcagcctcttccgccgcggcctacggcgacatcccaattggggacgtcctcatcgcgctcccgagccagcttccattacgactacgccggcccaccagtgccgcggacgacgtgcttgtgcagctcgcccaacaagtcccggatgaactatgggctatgaagctgggcttgaggttgcttcaagaaagggccaaatctgattcattttggtggccatatattgccaatttgccagagacatttactgttccaatcttctttcctggggaagacataaaaaatttgcagtatgcccctatcctccaccaggtcaataaaagatgtcgttttctcctcgagtttgagaaagaggtacagcagaagcttcatactgtgcccttggtagatcatcctttttatggacaagatgtaaattcatcttcccttggatgggctatgtcagctgcctcttctcgtgcattccgtttgcatggtgaagtcccaatgttgttgcctcttattgatatgtgcaatcatagtttcaacccaaatgctaggattgtccaggaaagaagtgtaaacagcttagacatgtcagtaaaggttcttgctgagaagaagattaagcaaaatgaagcaataacactgaactatggctgctacccaaatgatttctttcttcttgattatggatttgtgataacacagaatccttacgatcaagtggaactaagttacgatggagcccttcttgatgctgcaagcatggcagctggagtctcttctcccaatttttcagcgccagccaagtggcaacaagatatattgtcacagctaaacctacatggagagggtgccgttttaaaggtgagcttaggaggccctgacgttgttgatggacgcctgttagctgctctaagggtgcttcttgccgatgatccagaggctgtgcacaagcatgacctgaatacattgatgtctcttgacgtgcaagttcctttaggtcccactgttgaagcatcagcactccggacagttcttgcgctttgcgcgattgctctccaacactttcacacaaaaataatggacgaccaggccattctaggcggtgggccgcctcttatcacgcaactggccgtccagtttagattgcagaagaagttcacgatcgttgacgtgatgcagaatatcagcaggagaatcaagatgttatcgccgcagaaatccactgggtagttctttaatctgtcgtcagacagtcagttaccattctgtactggctactgcagatagcacaaatcccagttgtgattctgtaccatgttcttgttatgatacttccagtgcctgtcattgaaaagttacatctgcgtcgaacagttaattacttccctgtactgattattgcgtataataataagtcccgattttgagtcttgtaccatt

SEQ ID NO: 119854 - DNA, 522 bp, Zea Mays
atggcgagggcgagggcgagacgacggcgatcgccgaccgaggacgccttccccacagcccatccccgaggggatcgatcggctccagctccagctccagtaaattccctaggagtcgccgccgatggagatggcggtgcgggcggcgcggccgagcggggagcgggagcgctgcctgtcgaggtcccgcaggcctcggcgcatctcggagacgtggtgctggtacgtctcgtgcaccttggcccgctcgtcctcctcctgcttgatccgcatcacctggctgtgcatcaccatcaccacctcctcctcctgctgctgcttctgccgccgccagccttcctggtgctccctgctctgcttctccatcatcttgtctcggcagaatctcttcttcggagacgagaggtcaagggaggaggtgatgtaccgtactgtttggattctggacgaacgcaacgcggcgcggcgcggcgcggcgcatgggatagggcggagagctcgatcgcgatcggggacgtataa

SEQ ID NO: 119855 - DNA, 1284 bp, Zea Mays
attccattgacttgacacgctataaaatcccagctccatggccgcaaaccagcagctgcagcatcagcatcgttccatccatccatcctactatccagcttcagcccgggccagccgctccacagcagcaagcaagcaaggctgagaacgaacgaagcagcccgcatccgcatccatggccgccgtgctggtggcgaggcaggggcgcgagctgcagcggtacagccagagcacgggcgggcgcatcgtggtgggctgcatcccgtaccgcgtgcggcgcgacggcgagctggaggtgctggtgatcacgtcccagaaggggcacggcatgatgttccccaagggcgggtgggaggtggacgagtccatggacgaggccgcccggcgcgaggccctcgaggaggccggcgtgctcggcgacaccggaccggtcctcggcctctggcactacaagagccgccgctacgtggaccagacctacgagggcttcatgttcccgctccgcgtcgccgacgagctccaccagtggcccgagatggcgtcccgcaagcgcacctgggtgagtgagttagctgagttctcgtcctccggacgcgacaccaccccccccccaatccccatgcatatgtatctagtatatatatacgacatgtcatctgaccgtgcgctcgcgactggatgtggatggaacgcaggcaacggtgcagcaggcgatggacgggtgcccgcactggtggatgcgcgaggcgctggagcggctcgtcgcgcggcaagccgtgctgcagtctgccctctgatcgtcgtcatcgactggggtaacaaaagaggcgggaggcgcgagccaccatgtgcgcacgccgccacggctctctctctctctcggtgcagcggcaggccggccggcccggcgttccgggtctggaatttggtcgccctcaccggagagtcgaacggcgcgccgcgcggctcgtgtgctctggcgatgctttcttgtgaccccccctgaccccgaggcgcggagtcgtcgttggcaaataaaatcatcagctcgtttttagagggcggatggtttagacgaaatggaaaacaaaatctgaactggacgcctagtggaaggaaaagtaatagaacagcagcgcgaaacaattcggcgattctttcgagtaactgcacagattgtaaaattttagtggtgactcgtttcttgcccttgggtggcaccgtggcagaattgttacgagctgttcaattcaaaaaagaagaagaagaaaaagtttcaggcat

SEQ ID NO: 119856 - DNA, 1150 bp, Zea Mays
attccattgacttgacacgctataaaatcccagctccatggccgcaaaccagcagctgcagcatcagcatcgttccatccatccatcctactatccagcttcagcccgggccagccgctccacagcagcaagcaagcaaggctgagaacgaacgaagcagcccgcatccgcatccatggccgccgtgctggtggcgaggcaggggcgcgagctgcagcggtacagccagagcacgggcgggcgcatcgtggtgggctgcatcccgtaccgcgtgcggcgcgacggcgagctggaggtgctggtgatcacgtcccagaaggggcacggcatgatgttccccaagggcgggtgggaggtggacgagtccatggacgaggccgcccggcgcgaggccctcgaggaggccggcgtgctcggcgacaccggaccggtcctcggcctctggcactacaagagccgccgctacgtggaccagacctacgagggcttcatgttcccgctccgcgtcgccgacgagctccaccagtggcccgagatggcgtcccgcaagcgcacctgggcaacggtgcagcaggcgatggacgggtgcccgcactggtggatgcgcgaggcgctggagcggctcgtcgcgcggcaagccgtgctgcagtctgccctctgatcgtcgtcatcgactggggtaacaaaagaggcgggaggcgcgagccaccatgtgcgcacgccgccacggctctctctctctctcggtgcagcggcaggccggccggcccggcgttccgggtctggaatttggtcgccctcaccggagagtcgaacggcgcgccgcgcggctcgtgtgctctggcgatgctttcttgtgaccccccctgaccccgaggcgcggagtcgtcgttggcaaataaaatcatcagctcgtttttagagggcggatggtttagacgaaatggaaaacaaaatctgaactggacgcctagtggaaggaaaagtaatagaacagcagcgcgaaacaattcggcgattctttcgagtaactgcacagattgtaaaattttagtggtgactcgtttcttgcccttgggtggcaccgtggcagaattgttacgagctgttcaattcaaaaaagaagaagaagaaaaagtttcaggcataa

SEQ ID NO: 119857 - DNA, 1099 bp, Zea Mays
atcctattcctgcggcctcggcctgtccgcctgtattttagggggcccgtggggcgtgggggcacgggcacccgcacaagctgcgctgccagtgccagcgctcactcgaacgccgagacccgagaggagcaaacagccaaaaagaacggaaaggggagagcaaacagccaaaaaaggacggacttgcgcgacagggtcgaagactcagaaggggaatctccggaggatggaggtgggcaggactccgcggcgacgggcgtccccagcggcagcggcggcggcggcggcggcggctgtgccttcgctgcttctgttcgccgtgctattcgtgggccgggcggcggcagcgttgggcggcccggggccggcgctatacaagcacgcgtcgttcttcgaccgcgacggcgacggcgtcgtctccttcgcggagacgtacggcgcgtttcgggccctcgggtttggactcggcctgtccagcgccagcgccgccttcatcaatggcgcccttggcagcaagtgcagacctcaaaacgcgacgtcgtcgaaactggacatctacatagaggacatccggagagggaagcacgggagcgactccggctcgtacgacgcccaaggaaggttcgttccggagaagttcgaggagatattcgccaggcacgcgaggacggtccccgacgccctgacctcggacgagatcgaccagctgctccaagcgaacagagagcccggggactacagcggctgggctggcgcggaagcggagtggaagatcctgtacagtctcggcaaggacggggacggcctcctccgcaaggacgtcgcgaggagcgtctacgacgggacactgttccaccggctcgcgcccagatggaaatctcccgacagcgacatggagagaagctgataagcgtggtccgggagaactgaaccgagaggaccgtcctattgatgtcgtcttgcgctgggctgctctgaactgaacaagtctggacatgccgtcaagcgacatgtgggtgtgaacactctttcgggtcagattattaacaagaagggtgtgaccgtgtgagtgtgaacagaatcggccgtatagatgtac

SEQ ID NO: 119858 - DNA, 532 bp, Zea Mays
accctaaccctaactgtataatgttttgctcttttgtaggtcagttgctgatgcctcgtcttcctcctctggggtagatcgggcacggcgactgcgtgctccgttgagggacggtgctggagatcgaccgtccgcggtgaaggtcgccatggcggatgatgacgatgtcaatccggtcaccggcaacgacgaccttcacgcggcagggcttgtcccagatgacgaagacgacatccaggctgacgcggctgctttgctcggtatcgatctaacctctgctcctgtcgatctaagttctaatccgaccaacgctggtggagggcctgctacggccaccgatactccggtcggctccaccagcaccgatggtggtactggtacctcatctgttggtaagcgtaaatctactgtctgggttgattttgatgaggtatttgagaaagtgaatgggcctgggaggattatattgcccgtgctcataaccctaggtttaccaaagtgtctagacagaccaccactagagaccttctga

SEQ ID NO: 119859 - DNA, 498 bp, Zea Mays
ccctagccgccgccgccgctgccgcttaaaccctcgctgcgccgactgcagcagcccccgcctgcgatggggaaggggacgaagaggaagcagcatcccgccgactcggcgccgcccccgggcgacgagggcgaggggaggagcgggcggaagggcaggaaggagaaggcggaggcgacactgccgtcgcagattaagaacaaggacaagcgccgcgaggtgcatgccaagcttaagcgagagaagaaggcccagaagcgcgcgctggcccgcgagcgcggccaggccgcttgctgcgccgaggagcaggcaagcccgcgcgctcttcgaactgtccactccactccacctgtagagttttgtagcttttggttcggttctgattgcttcgggtgtttgcagccgccggagaggctggtgccccggacgatcgagaacacaagggagcccgatgaggctgtgtgccggcccgacgaccaggaggttcgcatttcttga

SEQ ID NO: 119860 - DNA, 1327 bp, Zea Mays
gttcaggatttcagattgttcaacggagaacctccacgcgtcgtgagagcgcgagctctgaccgaagatctcagtggtcggcaccaaatttcgcgtgcacacctgcgcatccggcccttcccgtacgcccatgactcagccaccgcgttcctcgaacgtgtcgtccgtgtagcatccatagagacccgtcccacgcaaacacctcagcgatccaccgccctccctcttcgctaaagccgtaatccgaaatcccgcccccagacccagattgcacgacgcaaccgatccccaaatccccaaatcttcccagttccctcctcccgctcgacccagatcgaggcctcgatccaccggccatggcgctggagtgggtggtgctgggctacgcggcgggcgcggaggcggtcatgctgctgctgctgacgctgccggggctggacggcctgcgccggggcatggtctccgtggtgcggagcgcgctcaagcccatgatgtccgtggtgcccttctgcctcttcctgctcatggacatctactggaagtacgagacgcggcccacctgcgacgacgagcacgcctgcaccccctccgagcacctccgccaccacaagtccgtcatgaagtcgcagcgcaacgcgctcctcatcgccgccgcgctcctcctctactggatcctcttctccgtcacccagctcgtcgtcaggctcgaccagatgcagcagcgcgtcgacaagctcaagaagcgcgacgactgatggggctcgcgttcgcgccttccccgcgtccacccggtggtctcgttcttccctcttcctcgtatttctgtttttttttaatgttggagtgcggatgtcttagatctcgatcgtaatttgaggcatggtgcttcctttgcccttaccgtcttcagataaaaagaacaacgctctttgaaatgatgatatatttaggatgtttggacaaatggtatcgtaattgatgtgttcaccaatgagttgattggtttcactcgagatacaccgagatatgggtctagttgccatccttgagatattggttattagctactagtgctgttttgatgatgtgactgagcttatgttgtaatgagctagttcttgttcagaataagctgacattaggggccggattttatatcttttgtataaaaaatgagctccaacttggaagctagtcgtgtagctgttctagttctagactgagatgctcatctagtgatcaggtgacatgaatgaatggatagtcacgtttgctgtaatactgttctatcttctagactggaatgcttatataggtgattcaagtc

SEQ ID NO: 119861 - DNA, 2480 bp, Zea Mays
caagcaaaccgagtcgagtccacagtccacaccaccaccgcgaggtccactaaaaaaacaagagcattaccggcaccaatcaatcaggctggcagtggagtgacagcggcggcaacaccacgcccacgcggcgccggagccgatcccccgatggatctcccgccgctctcccaccaggccctcttcgccgccgtccgatccgccgacgcgcccgccgtccgcgcggtcctggccgacgccgaggcgtcggccacctccttggccgcgctcgccgccgctcagacggacgccggggaaaccgcgctgtacgttgccgcggaggccggcagcgaggaggtcgtgcgcctcctcctccctctctacgacttcgaggcagccaccgtccgctcacgccttgacctcgacgccttccatgtcgccgccaagcagggccacaccggggttgtgaaagagttcttggggcggtggccagggctttgctcagtctgtgactcttccaacactagtcccctctactcggctgctgtcaaggatcacttggatgtggtaaatgctatactggacactgatgatagctgcataaagattgtgcggaagaatgggaaaacatccctacatactgctgcaagaattggataccatcgtattgtcaaagcactcatagagagagatccaggaatcgttccgatcaatgataggaagggacaaactgcacttcacatggctgtgaagggcaaaaatacagatgtagtggaagagttattgatggctgatgtttccattctcaatgtgagggacaagaaaggaaatactgctttgcacatagctacacggaaatggaggccccagaatatctcaatgtgaaaaacatgtcgtatgtaagccatggtggtttcttagtggagcagagcatctattggaagagcaaccatatatctaagaacacacgaccatcttataaagcactataaagacattagttgctgctgctattaactgtctgccactagtcttactaagtcattgcaacggcgcaggaatgtatctggatgctaatatctcggtatcactattgtggaagtgtggctgacttctcaacacactattctagcagtccagcccaccccacataggccttaaagtattatataaatgatgcttgtgtgttaaaggaagatcaaaaatagccatccagaaactcacagaacgatggggtgcttttctattttatggagtatttacgattagtgttctaacttctaagttaccttactctcaaactccgaacatatgtttatattatttgtgggaattgttcatacttgattccaaacatgctttgctctgacttgccaactttattttaccttactagtcactattgttttcagatggtacagcttcttcttagctatgaatcacttgaagttaatgctatcaacagtcaaaatgaaacagctatggatttggctgacaaagttccttatggtgagtctaaaacggaaataatagagtggctgacagaagctggtgcaaagaatgccagaaatgttgggaaaattgatgaggcatcagaactgaggagaactgtgagcgatatcaagcacaatgttcaggcacagcttagcgagaatgctaaaaccaacaaacgagtgactgggattcgcaaagagttgcagaaactgcatagagaagctatccaaaacaccatcaattcagtcaccttggtagcgaccctgattgcctccattgccttcgtcgccatattcaatctgccaggtcaatacttccaggatgtgaatagtgggggagacattggtgaggctgaaatagccaagcttaccggtttccgtgtcttctgccttctgaacgctactgctctcttcatctccctcgcggtggtcgtggtgcagatcaccttggttgcctgggaaactggtgcccagaagcaagttatcaagatcgtgaataagctcatgtggacggcatgccttagcacgggtgtggcttttatctcgctggcctatgttgtagttggcccgcagcatgcctggatggccttcacggcatcagccatcggagggccgatcatgattggaactttcctgttcctagcctatcttctgttgcgcccacggttcaagttcggcgaagacagacagcgccgcatcaagagggcaagcggcagcaaatccttctcctggtcaatccatgatgggttttcagatctggaagccttctctgatcatgagaagaggatctatgccctgtaggagggtgtaacagtaactactcccacaagaggcaactgggagagtacaaatggttcatgtatatatttggtttagccgttttagcctagccgctgttagacctttctccccatgtacaatatctaataatgaagagctgcagctattgtaaagtgcaagtattgagcatgcttgaaagttgaaccggttgccctttgtgaattggct

SEQ ID NO: 119862 - DNA, 1938 bp, Zea Mays
caagcaaaccgagtcgagtccacagtccacaccaccaccgcgaggtccactaaaaaaacaagagcattaccggcaccaatcaatcaggctggcagtggagtgacagcggcggcaacaccacgcccacgcggcgccggagccgatcccccgatggatctcccgccgctctcccaccaggccctcttcgccgccgtccgatccgccgacgcgcccgccgtccgcgcggtcctggccgacgccgaggcgtcggccacctccttggccgcgctcgccgccgctcagacggacgccggggaaaccgcgctgtacgttgccgcggaggccggcagcgaggaggtcgtgcgcctcctcctccctctctacgacttcgaggcagccaccgtccgctcacgccttgacctcgacgccttccatgtcgccgccaagcagggccacaccggggttgtgaaagagttcttggggcggtggccagggctttgctcagtctgtgactcttccaacactagtcccctctactcggctgctgtcaaggatcacttggatgtggtaaatgctatactggacactgatgatagctgcataaagattgtgcggaagaatgggaaaacatccctacatactgctgcaagaattggataccatcgtattgtcaaagcactcatagagagagatccaggaatcgttccgatcaatgataggaagggacaaactgcacttcacatggctgtgaagggcaaaaatacagatgtagtggaagagttattgatggctgatgtttccattctcaatgtgagggacaagaaaggaaatactgctttgcacatagctacacggaaatggaggccccagatggtacagcttcttcttagctatgaatcacttgaagttaatgctatcaacagtcaaaatgaaacagctatggatttggctgacaaagttccttatggtgagtctaaaacggaaataatagagtggctgacagaagctggtgcaaagaatgccagaaatgttgggaaaattgatgaggcatcagaactgaggagaactgtgagcgatatcaagcacaatgttcaggcacagcttagcgagaatgctaaaaccaacaaacgagtgactgggattcgcaaagagttgcagaaactgcatagagaagctatccaaaacaccatcaattcagtcaccttggtagcgaccctgattgcctccattgccttcgtcgccatattcaatctgccaggtcaatacttccaggatgtgaatagtgggggagacattggtgaggctgaaatagccaagcttaccggtttccgtgtcttctgccttctgaacgctactgctctcttcatctccctcgcggtggtcgtggtgcagatcaccttggttgcctgggaaactggtgcccagaagcaagttatcaagatcgtgaataagctcatgtggacggcatgccttagcacgggtgtggcttttatctcgctggcctatgttgtagttggcccgcagcatgcctggatggccttcacggcatcagccatcggagggccgatcatgattggaactttcctgttcctagcctatcttctgttgcgcccacggttcaagttcggcgaagacagacagcgccgcatcaagagggcaagcggcagcaaatccttctcctggtcaatccatgatgggttttcagatctggaagccttctctgatcatgagaagaggatctatgccctgtaggagggtgtaacagtaactactcccacaagaggcaactgggagagtacaaatggttcatgtatatatttggtttagccgttttagcctagccgctgttagacctttctccccatgtacaatatctaataatgaagagctgcagctattgtaaagtgcaagtattgagcatgcttgaaagttgaaccggttgccctttgtgaattggct

SEQ ID NO: 119863 - DNA, 2156 bp, Zea Mays
ttcgttcttttgggaattgtgatgtccgttcttttgagccaaacagcaaccggatatggccgcttgcctcctgcacccttatcctccggggctccattcctctcgtgcaaatccctattccgcctcccgtcaacccacccacctcaaatgggagcttgggcgatggcgccgccacctcctcctgtgcgtcgccgcctccgcgggcatcttgcagcgagaactcatcatgctgcccagtgcaagaaccacccagaaccccggcccagtgaacccacgtaaccagttcgacataatgcctgagaggagcactgagaacactaagagcgcagctaacccgttggacgaaagccttgggacgggcggacagattgcaagcggacgtgatccccatgaggtcggcgagaagagcgagagcgcggtcttcgtggcgctggcgcacgctggccggcatgcggaggtcgtcgagctcttccgcagtatgcggagggagggagtcccggtgaacaggtttgtgctcccgagtgtgttcagagcctgcgccgacctatgggacagcaggatgctccgagccgtgcacggcctggtcatcaactgctcgttgtgtcagcatgtggtggtaggcactgcgttggctgctgcgtatattgatcttggcttggtagatgatgctagcaaggtgttcgatgatataagccagcccaatgtggtctcttggagcgtgatcattggcggctatgcccgttcttctcagtgggacaaagcctgggatgcattctcggccatgcagtgttcgggtttgcctccgaatggttctgttctcgtaatggcaattcaagcatgcggcgcattgggctgcctggtccgagggaagcaggcgcacacggtggcagttgtccttggatttgaaaggaatgccaccgtgtggaactgcctcattgacatgtatggaaaatgcggcagcgtggagagttgcaggagggtgtttgacacaacggtcagcagggatcaagtgagctggaatacgatcatctcgtgctatgctcgtctcggactctgtgaagaggcactggaaacgatcgttcggatgcaggagtctggtttcactattgatcgtttcgttcttggcagcggagttgcagcatgtgccaacttggctgacatagacagtggccgtgcgtttcatggctatttgattagaagagcgttagatactgatgtcatccagggcagtgcacttgttgacatgtatgggaaatgcggatacatggacctcgctcgattggtattcgacaggatggatgagaggaatgacgtttcatgggacgcgctcttatccgggttcgtcgaaaacgggctagttgattcagcacttgacacttttagacaaatggagtccgcaaaaataaagtctaaccagcatacctttgtgaaccttctgaggctctgtggtgatagaaggtacagagagtacggaaggcaaatccatggccatgccataagggtcataaaccagatgaatgtagtgctggaaaccgagctcatcgatatgtacgccaagtgtgggtgtattgaagtctctcagctactgtttctcaggatgaacgagcggaacctggtgtcatggaacacgttgctctcaggttacgttggggatggacagcctgttgccacggtaaacatttaccgtcagatggagctggcgcgtgttgggcctgaccactacactttggcgggtcttctgaacatgtgccggttccaagggctgctgcgctatggaaggcagatacatgcccacctcatcaagacaggctctgaaatgaacgttgtgttacagactttgcttgtccatatgtacttcaagtgtagacggtggcgggacgctcacaatgtttgcaccttgatcagagagaggaattcccatgtttatgaggcgtttttcaaggtttatggagacgactacttgatctaaggattacgcactagagtctgaatatgcgagatactgtggatagacatcttaaatgcacatactttgttgggtgcaagcaagcagtagtttcaagtctttttttaatcgctaacatcagtgacttgtatgacaaaagtatattttcaccaatactgtttttcaagttatgtgtttatactggttaaca

SEQ ID NO: 119864 - DNA, 273 bp, Zea Mays
atggccgtgctgatcatgaacaagaacctcgtgcttccggcggtgatcatgctggtcgtcgtcatggtgttgtcgatggtgcttggctcggccgccgcgcggccactgctaggagaggatgatcgactgcccggggaggccgccgccgccgtcggcgactccatcgtcaggctcatccggcagctgtatcggcaacagctaagcgggccaggtgcccaggtccctcgtgtaagggttcgacttcggaccctaacaacggatgctagctcgtga

SEQ ID NO: 119865 - DNA, 3326 bp, Zea Mays
gtgggcattgggcgggggaaggaggaggaggagcggcaatagatttgtgggcgcagaggcggggatggggggcaacaagtactgcgcggcgatgacgaagaggagatggagggggctggcagcggccgcgtgggtgctagtcgcggtggcttgctccgcggtgatgcactggaccatgcgccgggagagcatggaccgcgccgaggagcgcctcgtcagcatgtgcgaggagagggccaggatgctgcaggagcagttcggggtcaccgtcaaccacgtccacgcgatcgccattctcatcgccaccttcaactacgataagtccccttccgctatcgaccaggacacttttgcaaaatacacggcaaggacatcatttgagcgaccgctactcaatggggtggcatatgcacagcgtgtattccatcatgagagggaaatgtttgaaagccagcagggatggattatgaatacaatgcagcgggagcctgcacccccgcaggttgaatatgctccagtgattttctctcaggatactgtttcctacctcgcacgcattgacatgatgtctggagaggaggaccgagaaaacattttgcgggccaggactactggcaaagctgtgttaacaaacccatttcggttgcttggatcaaaccacttgggagtagttctcacttttgctgtgtaccgccctgatctccccgctgatgcatcagttgagcaacgtgtggaagcaactattggatatcttggtggagcgtttgatgtggagtcacttgtggagaatttgctgagcaaacttgctggcaatcaggatattgtggtgaatgtctatgatgtcacaaatgcttcagaggctatggttttgtatggaccttctagttcggatgagcgcgtgcctttcttgcatgttagcatgttggattttggagatccgtttaggaggcatgaaatgaggtgcaggtatagacaaaagcttcctatgcagtggtctgccataaccaatcctttgggcacatttgtcatatggatgcttctggggtatagcattgccgctgcatattctcgatatgacaaagttacagaagattgtagaaagatggaagagctaaaaacgcaggcagaagctgctgatgttgcaaagtctcagttcctggcaactgtgtcacatgagatcagaacacctatgaatggcgtccttggaatgctggatatgcttttaggaacagatctaactatgacacagaaggattatgctcaaactgctcaaatgtgtggcagagcattgataacgttgataaatgatgtccttgatcgagcaaagattgaagctggaaagttagagcttgaagcggtgccttttgacctgcgttctctcatggatgatgttatttccttattttcttcaaagtcacgggagaagtgcattgagcttgcagtatttgtatgtgacaatgttccgaaggatgttcttggagatccttggaggtttcggcagatactaacaaatttggtcggcaatgcagtcaaattcacagaacggggtcatgtatttgtgcgggtctgtttggctgataactcaaatatggaagccggtcaggtcctaaatggagccatgaatgggaaagatggtagagttgattcaacaactaatggtgccttcaatactctgagtgggtttgaagcagcagacagacgaaatagttggcaatattttaagatgctcctctctgataaggagtcccttttggatgatcttgagggaacaaattctgatcaaagtgattcagaccatgtcacactagcgataagtattgaggacacaggtgttgggataccattgcaagcacaagatcgtgtttttacaccgtttatgcaggctgatagttcaacttcaaggaattatggtggtactggcatcggtttaagcattagcaagtgcctagctgaacttatgggtgggcagataagttttgtcagccgtccttttgttggaagtacattcactttctccaccacactgaagcgctcatacaaagatatttcagttgattcaagtaggagcttgttagaggcactaccaactgcttttaagggaatgaaggccatcttgatagatgggagacctgtacgtagtgctgttacaagatatcacctcaagaggttgggaataattgttcaagttgtgaacaatatgagtgcagtagtaaaagctttccctggacaaaatggagcaactgtttctagggaaaaggcaaccattctttttattgagagtgacttttggaggcccgagacagatgttcagttattgaaccatctacgcgagcacaagaatcgtcagttgtctgatgggcataaggtagttcttttggtcacctccgaagctgataaggacaagtatggatccatatttgatattgtgatgtgcaagcctataagggcaagcatgattgcttcatctattcaacaactgctcaaagtagagatgcctgaaagaagaaataatcataatcggccatcatttcttcgcagcctgctggttgggaagaatatattggtagtagatgataataaagtcaatcttagagtcgctgcagctgcactcaaaaagtacggtgctaatgttagctgtgttgagagtggcaaagatgctatcagtctacttcaacccccacattgctttgacgcatgttttatggatgttcagatgccagagatggatgggtttgaggcaacaagacaaataaggcaaacagagatgagagttaacgaggaaaggaagaataagttggtgttgattgaaggctcaacatttgttgagtaccatttgcctgttttggcgatgacagccgatgttatccaggcaacttacgagaagtgtataaaatcgggaatggatggatacgtgtctaaacccttcgacgaggagcagctataccaagcagtctccagattaatagtgggaacgacagattcgactgtttaatatttagatggctatgaatctgatttctcattcatcgaattgaagcacaccaccatgttgcttctgtccaagtttgactctaacccttaacaattgtctgacctggcctctcgcagcactagatgaaaaggatgaaagtgccacgagttggctatgtatcagcaccacagatgaagttgcctcaccccggagtgtaggttggtagatcactctcttctttgatgtttataggttgttgtatatcttctgacaattcattggaaaccacatctcgttgcgacattggaggacatcttcaatgctggtaaatttgttataggaatatcctttaatg

SEQ ID NO: 119866 - DNA, 1540 bp, Zea Mays
ggttgctattatcttgttgatgctggttacacaaatgcaaatggtttcttagcaccatatcgaggacataggtatcatctaggaggtttcactactcaaaacccaccacatagtgctaaggagtacttcaacttgtgccatgctagagctaggaatattgttgagagggcatttggaaggctcaagggtcggtggggaattttaaggtctccatcgtttttccagtcaagactcaaagtcgaattataatggcatgtgccctcttgcacaacttaattttgcaaaatatgtctagagacccatttgaaaatgatgaggagccagctatggatgcatcatttgaagttatggatggagaaatcagtgaaccagaatttatcacgtgtgtctcaacatctaatgaatggactgatttccgcaataatcttgctcaggggatgtataatagatatagagctaggtctaataactaaggtttgtatcttttgtctttgatgttattcattatttttggcatgttgcttatactttcataaatacttcttgtaggacatgaaccaatcagagagctcaagtgttgctcggggaagagggaaaaacaaaaggatctggacttattatgaggatgaggagttaattaaagcactatatgagatatctttagatccaaagtggaaaagcgagggaggttttaagaatgggtattgttctgttctagaaaatgaactcaaagcaaggctaccagggtgtggtctcagtgctattccacacattgagtctagagtgaggcattttaggaccaagtatggtgctattgaggtcatgcttgctaagagtggttttaattgggatgacaacagaaaaatggtgcaatgtgagaaacaacaatattaagcccattgtaaggataatcctgatgcaaagggactttatggtattgcatttccacattttgataccttggctgctatatatggcaaggacatagctactggagaaggggccgaggggcttggtgaggctgtaattaacatggagaaagaaatagctatgggagaagattgtccagtagtggaagaggatatggtttctatggatacaccacaatggtctatggataataggaactcagatcattcaacttcatcgagcagcaaaagaaggaagaaacacaaagataatatgtcaagtgacccattcttggatctagcaagtggaattcgtggtgatcttaacaaaacctcacaacactttggaaggatggtagaagtgatggagatggaagcaaaaaaaaaaggatcaaatgcaagagttacaagagaagtttgttgttgagttgactagacttggttttggtgaagctcaaaggaagtgacttgttaaattatcaatgaagaatgtcatgagcatttggtgaagagtgatcggcatataaactcctgaaagttgcttagatctacttgagcaagtagatatgtttaccggtgaaacatatgtttacctgaagaccaagtactctgcggtctataagttgcttgct

SEQ ID NO: 119867 - DNA, 1232 bp, Zea Mays
ggggagctaccatctggtggcgcggtctccatgattatgtcgacagttcaaccgcatgaactgcttagaaacaaagaaatctgttcgagttcgccgacaagtacagggggacatacgacagcagcatcgcggaggtgaagagctactacgcgtcggtgagcgggtacaaggacgagctactgtgggccgccctgtggctccaccgcgccaccggcagagatgactacctcgactacgtcgtcgacaacgccgacagcttcggcggcaccggctgggccatcaacgagttcagctgggacgtcaagtacgccggcgtccagatcctagcggcaaggctgctgctgagaggggagcacgcgccgcgccaccggagcacgctggagcggtacagggccaaggcggagcggtacgtgtgcgcgtgcctgggccggaacacggagggcggcgcggacgccaacgtggagcgcagccccggcgggatgctctacgtccggcagtggaacaacatgcagtacgtgaccggcgccgcgctccttctctccgcctactccgactacctggcggccgccgaggccggcggcgccgcccgggccgtgtcgtgcgcggcggcggccgaggaggtgttcgcgctcgccagggcgcaggcggactacgtgctgggcaccaacccccggggcgccagctacctcgtcggctacggctccaggtaccccggccgggtgcaccaccgcgccgcgtccatcgtgccgtacaagcacagcagggagttcatcggctgcacgcaggggttcgaccactggttcggccggcggggctccaaccccaatttgctcgtcggcgcgatcgtcggcgggccggacaggcgcgacaggttcagggacagccgcgacaactacatgcagacggaggcctgcacgtacaatacggccccgatggtcggcgtattcgctaagctgcgccggatggcgtggctggagcgggaacaggggtccacgtcggtgcccgtcaccgtcacgtccacggcggccgaggtgtaaatagataggatgtagaggaagggggctgtacaattttccccattctttagttcatttttttcgagctttgaatttcattttacacagatcgaggttattgtatacgagaaagaaaaaaaagagaaaagggtggaggcgcctacatgcatgtgcaattctgcaaaatgtaaattcactactggtacatatggagaa

SEQ ID NO: 119868 - DNA, 854 bp, Zea Mays
ctagcgttgagcacaactgcacaagcaggagaaatcagaatcaagggtctcgtcttcgttcccttcgcctccccattccgtaccgcgtcagatcgcacccctcctccatggcggcgctcagcctccgccagaggcagcttggtaagcctcgccgtcccgaatccaccttcgccttggctcccgggtgttcccctcctgcccgctcttccttgctaagtttttgattggatcgctcccagatctgattgtgcggatgctgcacctcaacaagccaccgccgccgcccggcacggctgcggagcaagaagaggaggtgtacaagatcctggtactggacagcttctgcctctcgctgctctcgccgctgctccgcgtcgccgacctccgcaagcacggggtcaccctctactttcccatcgacaagccccgccagcaggtcgccgacgcccccgccgtgtacttcctccgccccacgcaagccaatgccgaccgcgtcgctgcagatgccgccgcctcgctctacgcatccttccacctcaacttctcctccgccctcccgcgcccgctcctcgaccgcctggccgccgccaccgcagcctccggctctgcccaccgcgtcgcccgcctcgccgaccagtacctcgacttcgtctctctcgaggacaacctcttctccctcgcccacccgcgctcctacgtcgcgctcaacgaccccaaagcggccgacgccgacattgaggccctcgtcgacgcgatcgcgctcggcctcttctgcgcggcggccacgctcggcaccgtgcccgtcatcaggtgcccccgcggtggccccgccgagatggtcgccgccgcccttg

SEQ ID NO: 119869 - DNA, 2261 bp, Zea Mays
ctagcgttgagcacaactgcacaagcaggagaaatcagaatcaagggtctcgtcttcgttcccttcgcctccccattccgtaccgcgtcagatcgcacccctcctccatggcggcgctcagcctccgccagaggcagcttgatctgattgtgcggatgctgcacctcaacaagccaccgccgccgcccggcacggctgcggagcaagaagaggaggtgtacaagatcctggtactggacagcttctgcctctcgctgctctcgccgctgctccgcgtcgccgacctccgcaagcacggggtcaccctctactttcccatcgacaagccccgccagcaggtcgccgacgcccccgccgtgtacttcctccgccccacgcaagccaatgccgaccgcgtcgctgcagatgccgccgcctcgctctacgcatccttccacctcaacttctcctccgccctcccgcgcccgctcctcgaccgcctggccgccgccaccgcagcctccggctctgcccaccgcgtcgcccgcctcgccgaccagtacctcgacttcgtctctctcgaggacaacctcttctccctcgcccacccgcgctcctacgtcgcgctcaacgaccccaaagcggccgacgccgacattgaggccctcgtcgacgcgatcgcgctcggcctcttctgcgcggcggccacgctcggcaccgtgcccgtcatcaggtgcccccgcggtggccccgccgagatggtcgccgccgcccttgacgcccgcctccggcatcacctcctcgccaagcctaacctcttcaccgaggcctcagcctcagcctccgttgcctccttccagcgccccgtgctctgcctcttcgacaggaatttggacctctctgtgggaatacagcacgattggagctaccgccccttggtccatgacgtcctcggcctcaagctcaacaagctcaagatgcccgcggacaagtctggcccggccaaggcctacgatctcgatgattccgatgccttctgggtagcaaacagctggtcgccgttccccagggtggctgaggagatcgagtcgcagctcgccaagtacaagcaggatgtggacgaggtgaaccagcgcaccggtggcaacaaggatggcatcgagttcgatggcacagacctcattggcaacacccagcacctgatgaatgccgttaactcgctcccggagctcacagaacgcaagaagatgatcgacaagcacacgaatatcgcgacagcgttgcttgggcacatcaaggagagatcgctggatggatactgtgactgcgggaacgacatgctcacgaagggcaccgtggacaggagcacgctactgggccttctccgagggaagggcaccaaggcggacaagcttcgtctggctgtgacctacctcctctgtttcgagacgccagagctagagcaggtcgaggcggcgctgcgtgagtcagaagtggacatgtcagcgtttcagtatgtgaagaggatcaaatcgctgaacacgcagtttagtgcctcgtcgtcaagcagtgcaacgaggagcaacattgttgattgggcagagaagctgtatgggcagtccattagcgcagtgacagcaggggtgaagaatctcttgtccagtgggaggcagcttgcattgacgaggacggtcgaagctctcatggaagggaagccgaatccggaggtggacaactatctgctgtttgacccacgtgcccctagatcaggaagcggtgggcagttcaaagggccattcagagaagcaattgtgttcatgattggtggtgggaattacattgagtacaggagcttgatggagctggcagaatgctcgcagccgccttcttccaagcatgtcatatacggagcaactgagattgtcaacggggtggagttcatcgagcaacttgcagaactggggcagaaagcggggctgggtctgggtggtggaaacaaccctccactacagtaattactaataaataagggggggttctttcacatcgtttgaacattgtcagatatgatatgatcatttgcttccttttgtatggtttatattcgttgagaatatgttagtgcaatctgatccgcagtcttttttatactggttactggaggcaataataattataaacagatagaagaacaagacattcaaaggtttctagagatggagctgctattgtcaagtaattttaatagatagaaatgaagtatgcatcaattcaagcgggcc

SEQ ID NO: 119870 - DNA, 1317 bp, Zea Mays
aagcaggagaaatcagaatcaagggtctcgtcttcgttcccttcgcctccccattccgtaccgcgtcagatcgcacccctcctccatggcggcgctcagcctccgccagaggcagcttggtaagcctcgccgtcccgaatccaccttcgccttggctcccgggtgttcccctcctgcccgctcttccttgctaagtttttgattggatcgctcccagatctgattgtgcggatgctgcacctcaacaagccaccgccgccgcccggcacggctgcggagcaagaagaggaggtgtacaagatcctggtactggacagcttctgcctctcgctgctctcgccgctgctccgcgtcgccgacctccgcaagcacggggtcaccctctactttcccatcgacaagccccgccagcaggtcgccgacgcccccgccgtgtacttcctccgccccacgcaagccaatgccgaccgcgtcgctgcagatgccgccgcctcgctctacgcatccttccacctcaacttctcctccgccctcccgcagcctccggctctgcccaccgcgtcgcccgcctcgccgaccagtacctcgacttcgtctctctcgaggacaacctcttctccctcgcccacccgcgctcctacgtcgcgctcaacgaccccaaagcggccgacgccgacattgaggccctcgtcgacgcgatcgcgctcggcctcttctgcgcggcggccacgctcggcaccgtgcccgtcatcaggtgcccccgcggtggccccgccgagatggtcgccgccgcccttgacgcccgcctccggcatcacctcctcgccaagcctaacctcttcaccgaggcctcagcctcagcctccgttgcctccttccagcgccccgtgctctgcctcttcgacaggaatttggacctctctgtgggaatacagcacgattggagctaccgccccttggtccatgacgtcctcggcctcaagctcaacaagctcaagatgcccgcggacaagtctggcccggccaaggcctacgatctcgatgattccgatgccttctgggtagcaaacagctggtcgccgttccccagggtggctgaggagatcgagtcgcagctcgccaagtacaagcaggatgtggacgaggtgaaccagcgcaccggtggcaacaaggatggcatcgagttcgatggcacagacctcattggcaacacccagcacctgatgaatgccgttaactcgctcccggagctcacagaacgcaagaagatgatcgacaagcacacgaatatcgcgacagcgttgcttgggcacatca

SEQ ID NO: 119871 - DNA, 2091 bp, Zea Mays
ggtctcgtcttcgttcccttcgcctccccattccgtaccgcgtcagatcgcacccctcctccatggcggcgctcagcctccgccagaggcagcttggtaagcctcgccgtcccgaatccaccttcgccttggctcccgggtgttcccctcctgcccgctcttccttgctaagtttttgattggatcgctcccagatctgattgtgcggatgctgcacctcaacaagccaccgccgccgcccggcacggctgcggagcaagaagaggaggtgtacaagatcctggtactggacagcttctgcctctcgctgctctcgccgctgctccgcgtcgccgacctccgcaagcacggggtcaccctctactttcccatcgacaagccccgccagcaggtcgccgacgcccccgccgtgtacttcctccgccccacgcaagccaatgccgaccgcgtcgctgcagatgccgccgcctcgctctacgcatccttccacctcaacttctcctccgccctcccgcagcctccggctctgcccaccgcgtcgcccgcctcgccgaccagtacctcgacttcgtctctctcgaggacaacctcttctccctcgcccacccgcgctcctacgtcgcgctcaacgaccccaaagcggccgacgccgacattgaggccctcgtcgacgcgatcgcgctcggcctcttctgcgcggcggccacgctcggcaccgtgcccgtcatcaggtgcccccgcggtggccccgccgagatggtcgccgccgcccttgacgcccgcctccggcatcacctcctcgccaagcctaacctcttcaccgaggcctcagcctcagcctccgttgcctccttccagcgccccgtgctctgcctcttcgacaggaatttggacctctctgtgggaatacagcacgattggagctaccgccccttggtccatgacgtcctcggcctcaagctcaacaagctcaagatgcccgcggacaagtctggcccggccaaggcctacgatctcgatgattccgatgccttctgggtagcaaacagctggtcgccgttccccagggtggctgaggagatcgagtcgcagctcgccaagtacaagcaggatgtggacgaggtgaaccagcgcaccggtggcaacaaggatggcatcgagttcgatggcacagacctcattggcaacacccagcacctgatgaatgccgttaactcgctcccggagctcacagaacgcaagaagatgatcgacaagcacacgaatatcgcgacagcgttgcttgggcacatcaaggagagatcgctggatggatactgtgactgcgggaacgacatgctcacgaagggcaccgtggacaggagcacgctactgggccttctccgagggaagggcaccaaggcggacaagcttcgtctggctgtgacctacctcctctgtttcgagacgccagagctagagcaggtcgaggcggcgctgcgtgagtcagaagtggacatgtcagcgtttcagtatgtgaagaggatcaaatcgctgaacacgcagtttagtgcctcgtcgtcaagcagtgcaacgaggagcaacattgttgattgggcagagaagctgtatgggcagtccattagcgcagtgacagcaggggtgaagaatctcttgtccagtgggaggcagcttgcattgacgaggacggtcgaagctctcatggaagggaagccgaatccggaggtggacaactatctgctgtttgacccacgtgcccctagatcaggaagcggtgggcagttcaaagggccattcagagaagcaattgtgttcatgattggtggtgggaattacattgagtacaggagcttgatggagctggcagaatgctcgcagccgccttcttccaagcatgtcatatacggagcaactgagattgtcaacggggtggagttcatcgagcaacttgcagaactggggcagaaagcggggctgggtctgggtggtggaaacaaccctccactacagtaattactaataaataagggggggttctttcacatcgtttgaacattgtcagatatgatatgatcatttgcttccttttgt

SEQ ID NO: 119872 - DNA, 823 bp, Zea Mays
gagcgggttggagtcttcgtcgccgagttctcttatctctcctccctctcctctccatttctctcccctcgaccgagctcctctcctgcccatccatggtgctcggcacccggtatccctgctcctcttccttggcggccgagcggggctccctctgacgactccgcgcttcctctggtgcacggccgcctctattgccgtcgcctggggcttctgctgcgttaccatgggccaaacagcgaggaaaatgccgagagagaggtagagacagtttggtcgtcgagtcacatggagggtgccctggtggccggggaatccttcacctgcggggtgctacatcgccgggctgctgcatcgtggtctgcctctactaccagggctgactccattgccggacagccaaaactctcggtcgagtctctgaaggccgtctgtccctgttccttccgaacgttggtgattatgatactggggcgcctaatcgctgtcgccggtgagatccggccgccagattccaaggcgccgccgggctgtgctgctaccgtctgttgttgaggttggtgatgatccggtcaccgttgattcctctggaccggccgccagcaagactccgtcggtgccgttccgacccgctgtgcgtgtcgttggtgcagtagagaagaaacgaagaaagcgttgtatacgtagggaaaagaagcaagccactgttcgttcctggatgtctcatggatcttcatcgttcaaacaccccatgtccatatgtgtggttggcttcaatataatcacgtcacgtcgtccaagctgcggtcgtgcctatattttt

SEQ ID NO: 119873 - DNA, 186 bp, Zea Mays
ggtcgctatagatctcgttggagaccaatggttggtcgctatagagaaggggtcgctatcaaatcttatagcctaattaatctgtagatgttacttactaaaaattaattaaacattgatcgctaaattatagaaaagaaaaaaaagatttgtataaaagcaaaaaaaagaattatagaaaagaaa

SEQ ID NO: 119874 - DNA, 571 bp, Zea Mays
tttgattgatattttgtttgattatggataatctacctactcgcaattctctacatatgaggacttgaggatttagagcaagacctaaagtatacccttgaagggacacactttatgattcaatggtttgaatgaccgatcatttatgatgtctgtgctcgactgaatctcgttgagagtacttctgggagcctaaaccttcagatgggtgttctggacaaagaaagcgtgtaccttaaaacaggaggatacaagaagctggagtggttgtctgaaggcttttgaactgcttgaagtattagtgtagttttggtgcttttgtgactgatcagctctggagcagctagagtgatgtagttgtgggcttttgaacaatagctagagtgatatgaaacattagtgatgtagttgtggacttttgaactgcttcaagctagagtgatgtcgctgtggtgtttttgtgactaatcatctctggagcttttgtgaatgatctagctagctatctgtaaatgatctagttgtgaatgatattataattgtgatgcttttgtgaatatataattgtggt

SEQ ID NO: 119875 - DNA, 822 bp, Zea Mays
atggaatcaggggctcggcttggtcacagaccacgacgggctggagttcggcgcaggcgcccaacaaactggtgcagcctggcgttctcgcagtggaggaacagaggatgccgagctggagcagggaagaccacggcacgggaggaacggctggagagcgagctggagttaggcacgcagggagctgcagccggccatgggagaatgcgcacgcagcaccagagcaagcagcagaggggcgcggcgcagggacaaggcgccgagcgtggagggagcaggtggcgcgcacgctctggagagctgagcagggagccgacgcttggagaagaagagcagccgtgcgtcgcagagaagccagagaccaagcccagggagccgtccacggagcttgggcgcggtgagccagggagggcgcgagcgagtagaggggagctccggccaggggcgcgcagccggcgatggagaagcaagggcgtggcaagggagctccgtgatgcacagggagcaggagaacgaacagagatgcgccatggctggagcacggcaggaaggagacctcggctgggagcttggcgcgcggcgaagcagacagcagagggagcttcgcccggcgaacagagggagctggggagggtcgcgcacggaagatgcgcgcgcttgaggaggatgaagacgaccgggtctttgttactcgatcggatgaggctgggcaactggaagagcagacgcgcagaaatatcagacgagggagagaaagtacgactgggagatgggagaagcggctggatttgtacccagcgcggtcgaacagataagggctaa

SEQ ID NO: 119876 - DNA, 792 bp, Zea Mays
ctctgcatcattctgaggaggagcttcctccacttcattctcgccacctccaacaccaccacctagcgaaaattttgcctcaagagcctccaggcggcgcctcatgtcaccaacctcttgctccatcaagaagagcctctcctttagggtcaggttctcttcctcaaggcgagccacatgcgcatcctggtcatactcgtcatcgtcctccaacacgtagcccccagcatcctcccctctaccagggtacaccatctcaaaacggctgaggtcatggtcgaggcgtcgctccacctcgacgtgctcctcgacgtcgcttccactggagttcccctcatcatcgtcatctgatgcggcagcattggggttggctggctggggggagctacggaggcggatgaggcccttcatggagccgtacccatcgacgccccactgcgcctgggccatgtcagctaggccctcgcgggagggggagagacgcggggtggggagcacggcgggcgtgacggggcacggggagacgagggaggcaatgccgccggcgcgcttggcccggatgatgaaggaggtggtgttgcgcggcgcggcgaccttgttgttcttggccggtggctggtaggcggcggcggcgggattcttgcgcttccagccgcggttgggattgggaggggggaggaagggctgcgcctgcgcgttgggggcggcggcgtggtcatcggagggcggcttcaaggcggcgggaggcggcgccccccagatggggaacatcatctggctgggatccatggg

SEQ ID NO: 119877 - DNA, 624 bp, Zea Mays
atgcgcactccggcgagcctcctccactcccactcagccatcgctgacaccccatctccggctgctctcctgctccctgctcacgtagaggagcagcaggccatctccgtggactccgacacggtggtcatcctgtcgtccctcctctgtgccctcatctgcgtggccggcctcgcgcttgtcgcccggtgcgcctgccgtagaggaggaggagcctctgtttcagtgtcggccaccaccagcggcggcaggtcgtccgcccaggcgcccagcggactggagaaggcggccatcgaggcgctgcccaccgtctccgtctcttcttccctgaaacaagcaagtagaagagacgccgccgacaaggaggagtgcgccatctgcctggcggcgttcgtggagggagaccagctccgtgtgctgccgcgctgtgcccacggcttccacgcggcctgcgtcgatacctggctcgccgcccacgccagctgcccctcctgccgcgccaccatcgtctccgtcgtatcgccgctgtgccggaggtgcggggcggcgtgctgcgaccagcaggaggaaacccccatggcagcaccggagcctgctgctgcggggaggggcttgcatgcttag

SEQ ID NO: 119878 - DNA, 468 bp, Zea Mays
atcaggtccctgatctcgctctccctgaggtccttggacccgtgcctcttcagcccctccttcagctcgtcgaaggtgatggcgccgctgccgtccgtgtccatggccttgaacatctccttcagccccgccagctcctcctccgacaggctctgcgagatgacccgcagcgccatcttcttcagcctgttcatggccgagaactgcttcagccgcgtcagcaccgccgggtccagcgccctgtccggggccaccccgttctcgcagatccacgggtggcacagcacctggtgcgcgctcagcctgtccgccggcggcgaccgcagcattcggcggatcaggtccttggcgctgtcggagatggccggccacggctccgagtcgaagtcgatggcccccttcagcacggcgtcgaagatgccctgctgcgtctccgcccagaacggcggcaccccgctgaggaggatg

SEQ ID NO: 119879 - DNA, 1209 bp, Zea Mays
catcctggccatccaaccaatccggtcaacgggagaacatgtacgaggcgatgtcgccgcgccgggcgctcctcgccatcctcctcgccgtcgccctcgcctccgcttcctcggcaccccagcccccgccgtgcagccgctcgtgcgcggccctcaactgcgactccctcgggatccgctacggcaagtactgcggcgtgggctggagcggctgcgacggcgaggagccctgcgacgacctcgacgcctgctgccgcgaccacgaccgctgcgtcgagaggaaaggttacgtttccttcatccccggcctgcgtttgttgtgctcgttaattagggtctgagtgagatgggtggatggatcatgatcaagttcctagcttgcaactcatcggtagcaaaggaatttttcattggatttgatttcgcgttgcaatctgatcactacacttgctcactccgttttttttatttgtcgcgttttagttaaaaaaaataaactagccggtaacaaatattgaagaatagagtcagttttctttatttattttctgcttgtggtgtggttggaatgcagtgccttcaagcaccattaccacaaaattttgcatttaccatccacgaaaaggatgaccacagttattctcccaacctgaacattacatgtaatcagtcagtcactcagcctcagcctgatgggaatagaaatgaaaatagtgatcaacagcggattagcatgaggatatggtatccccacaccaactcaaaatagtttttgacttttattcacctgcagttcctgagctgatgtagcttttctcttgttttgatttatcattctctgctaggtatgatgagcgtgaaatgccatgagaaattcaaaaactgcatgaggaaagtgaaaaaggcaggcaaggttggcttctccaagaaatgcccgtacgagatggctatggctacaatgactcaggggatggatatggccatcatccttagccagttgggcacccagaaggtggaactctagcgttagctagctccgcctcagctgcatgttgatttattctcacggaaatatttatatactccactgaagaatagaatttgcttccatatgattactgttgtttcatcgaagtcagagggatgcatagcttatctttcttctgccaaattgaaaaagaaaggaaaagacttcagtttattttctgt

SEQ ID NO: 119880 - DNA, 646 bp, Zea Mays
atcctggccatccaaccaatccggtcaacgggagaacatgtacgaggcgatgtcgccgcgccgggcgctcctcgccatcctcctcgccgtcgccctcgcctccgcttcctcggcaccccagcccccgccgtgcagccgctcgtgcgcggccctcaactgcgactccctcgggatccgctacggcaagtactgcggcgtgggctggagcggctgcgacggcgaggagccctgcgacgacctcgacgcctgctgccgcgaccacgaccgctgcgtcgagaggaaaggtatgatgagcgtgaaatgccatgagaaattcaaaaactgcatgaggaaagtgaaaaaggcaggcaaggttggcttctccaagaaatgcccgtacgagatggctatggctacaatgactcaggggatggatatggccatcatccttagccagttgggcacccagaaggtggaactctagcgttagctagctccgcctcagctgcatgttgatttattctcacggaaatatttatatactccactgaagaatagaatttgcttccatatgattactgttgtttcatcgaagtcagagggatgcatagcttatctttcttctgccaaattgaaaaagaaaggaaaagacttcagtttattttct

SEQ ID NO: 119881 - DNA, 1758 bp, Zea Mays
agataaggcccagtccatctaaagagtcgaacaggcctggcccggactccagaacaacgcatgacgtcgaagaaaatctcagggacaccctccatccaatcagaaccgaccttgacccaccgataataaatttacaaaaaagccccaaaacaaacaggctcttctcctctcgtcttcctctccccaacccgtcgagaccatccttcccttcttccctcctcgccagaggagagtctcgctagctagggtttccaccaatggcggcgcccaccacctcccgccgcggccccggcggcgcgcgcaacatggacgatgaaaacctcaccttcgagacctccccgggggtcgaggtcgtcagcagcttcgaccagatgggcatcaaggacgacctcctccgcggcatctacggctacggcttcgaaaagccctccgccatccagcagcgcgccgtcctccccatcatcaacggccgcgacgtcatcgcgcaggcccagtccggcaccggcaagacatccatgatctccctcaccgtatgccagatcgtcgacaccgccgtgcgcgaggtgcaggctttgattctctcgcctactagggagcttgcttcccaaacagagagagttatgctggctattggtgaccacctcaacgtccaagtacatgcttgcattggtggaaaaagtatcggtgaggatatcaggaggctcgagaatggggtgcatgttgtctcgggaactccaggcagagtctgtgatatgatcaagaggaggaccttgcgaacaagagccatcaagcttctagttctggatgaagctgatgagatgttgagtagaggttttaaggatcagatttatgatgtctacagatatctcccgccagaacttcaggtggttttgatctctgcaactcttcctcatgagatcttggagatgactagcaagttcatgacggaaccagttagaatccttgtaaagcgtgatgagctgaccctggagggcatcaaacaattttttgttgctgttgagaaagaggaatggaagtttgatactctttgtgatctttatgatacactcaccatcacacaagctgttattttctgcaatactaagagaaaggtggattggcttactgaaaaaatgcgcagcaataacttcacagtatcggctatgcacggtgacatgccccaacaagaaagggatgccattatgggcgagttcaggtccggcgcaactcgtgtgctaataactacggatgtttgggctcgaggactggacgtccagcaggtttcacttgtcataaattatgatctcccaaataatcgagagctttacatccatcgcattggtcgctctggtcgttttggacgcaagggtgtggcgatcaatttcgtgcgcaaggatgacatccgtatcctgagagatatagagcagtactacagcacgcaaattgatgagatgccaatgaatgttgctgatcttatttgagcaaccgctcctcgcaaggtttggcttggtgtggcggtgagaagtggacgagaggggctttgtaatctgagtggagcagagatttgtttgtttacttttttggtgacggcttgaactgtatgtatatatattttagcatgctccagctcatgtaacactttttgggagacctatgttggtggcttattgtgacaatgacacggagaactgtgctgctgtgaattgctgtttgattattattaattattatggttttggttggttgcaatgccgagaa

SEQ ID NO: 119882 - DNA, 342 bp, Zea Mays
atgccttcggaggtgaaccggcagctgctgtggaggagggggagggccaaggccaggaggtgcctgttgctgctgctcgccgtgcctgccttggccaccgtcgccctcgctgcattcggccgcttccggaacatgttggatcgccgggatcagcagcagctggagcggctccgagcagaaaggaaggctaagattggcagctttaggggaagccaccacaacttgcagaggctcgtccagaaatatggtcctgatgctgcagccggtgttgacagcagaacggaaaagctcaagaggacgcactcgcggttgagcttccacgtgggagagggagacgaatga

SEQ ID NO: 119883 - DNA, 1350 bp, Zea Mays
agagaactccgacttcttcactcacacacacatggcgctgatgagccttggcgccgccgggtacaccacggccaccgcgccgcctcgtccccgaagatgtaccctgccgtttcgcgccgccgcctcccctgcggcactggaccgccggcgacggccgcataatgtggctggcgacttcttcgtcgaccaccgctgcatcgactgccagacctgccgatggatggcgccggtacgcaggcagctttctcccatcctccaccttcaatcgctcgcttggctaaccatcattcatggcgtgaggcgtgccggcatctatgcaggaggtgttcaagagggtggatggcaaggccgccgtagcggcgcagcccagctccgaggaggagaggaccaaggccctgcaggcgctgctatcctgtccaacatcctcaattcacactgagaaacctccaaaagacattcttaaagtgcaaaacatgtttcctctaccaatcgacgacaagctactcccaggtgtttatctctgtgggtataattctgaagactcatatggggcaacatcgtacctggtaattcatccacaaggaaacatactgattgacagcccaaggtatactccaaagctggccaacaatattgaaaagcttggtggagcgcgctacatgtttttgacccacattgatgacgtagcagatcacaggaagtgggctgagcagctaaaatgtgaaagaataatacattcaggagatgtggaggaggctaccgcagatgttgagtggaaacttgaaggaaatggtccatggaacttaggaacagattttgaacttattacatacgccaggccataccccaggctcagtgtgcttgtacttcaaaccgctaaaggtgctgttcactggagaccatgttgcaaagtcagaagaatcagacgatctgaacctctttctgatgtacagcaagcagtcagtgagccttcagctggaaagcatcaggaagctactggagctagagttcgagtggcttttacctggacatggctatcgaatcaagtacaaagatgtgcgtgccaagaatgtagccatggagtccctcctagctaattacacaagctaggagcctatgagcatcttacttgagttagtgctcgcaaataagcattccaggaggctgaatgttgatgctatgtttccagagaatagtgtgcatgatgctcatcagctcttgaatgtgcatttgttaccagagactgtaccttgtgctgcacaccaagcaagtgaatgaatcaagcatacatgactcggcccaatgaatgctttttccagaaatcttgcaagaccatatgattgatttgtt

SEQ ID NO: 119884 - DNA, 1259 bp, Zea Mays
agagaactccgacttcttcactcacacacacatggcgctgatgagccttggcgccgccgggtacaccacggccaccgcgccgcctcgtccccgaagatgtaccctgccgtttcgcgccgccgcctcccctgcggcactggaccgccggcgacggccgcataatgtggctggcgacttcttcgtcgaccaccgctgcatcgactgccagacctgccgatggatggcgccggaggtgttcaagagggtggatggcaaggccgccgtagcggcgcagcccagctccgaggaggagaggaccaaggccctgcaggcgctgctatcctgtccaacatcctcaattcacactgagaaacctccaaaagacattcttaaagtgcaaaacatgtttcctctaccaatcgacgacaagctactcccaggtgtttatctctgtgggtataattctgaagactcatatggggcaacatcgtacctggtaattcatccacaaggaaacatactgattgacagcccaaggtatactccaaagctggccaacaatattgaaaagcttggtggagcgcgctacatgtttttgacccacattgatgacgtagcagatcacaggaagtgggctgagcagctaaaatgtgaaagaataatacattcaggagatgtggaggaggctaccgcagatgttgagtggaaacttgaaggaaatggtccatggaacttaggaacagattttgaacttattacatacgccaggccataccccaggctcagtgtgcttgtacttcaaaccgctaaaggtgctgttcactggagaccatgttgcaaagtcagaagaatcagacgatctgaacctctttctgatgtacagcaagcagtcagtgagccttcagctggaaagcatcaggaagctactggagctagagttcgagtggcttttacctggacatggctatcgaatcaagtacaaagatgtgcgtgccaagaatgtagccatggagtccctcctagctaattacacaagctaggagcctatgagcatcttacttgagttagtgctcgcaaataagcattccaggaggctgaatgttgatgctatgtttccagagaatagtgtgcatgatgctcatcagctcttgaatgtgcatttgttaccagagactgtaccttgtgctgcacaccaagcaagtgaatgaatcaagcatacatgactcggcccaatgaatgctttttccagaaatcttgcaagaccatatgattgatttgtt

SEQ ID NO: 119885 - DNA, 1258 bp, Zea Mays
agagaactccgacttcttcactcacacacacatggcgctgatgagccttggcgccgccgggtacaccacggccaccgcgccgcctcgtccccgaagatgtaccctgccgtttcgcgccgccgcctcccctgcggcactggaccgccggcgacggccgcataatgtggctggcgacttcttcgtcgaccaccgctgcatcgactgccagacctgccgatggatggcgccggaggtgttcaagagggtggatggcaaggccgccgtagcggcgcagcccagctccgaggaggagaggaccaaggccctgcaggcgctgctatcctgtccaacatcctcaattcacactgagaaacctccaaaagacattcttaaagtgcaaaacatgtttcctctaccaatcgacgacaagctactcccaggtgtttatctctgtgggtataattctgaagactcatatggggcaacatcgtacctggtaattcatccacaaggaaacatactgattgacagcccaaggtatactccaaagctggccaacaatattgaaaagcttggtggagcgcgctacatgtttttgacccacattgatgacgtagcagatcacaggaagtgggctgagcagctaaaatgtgaaagaataatacattcaggagatgtggaggaggctaccgcagatgttgagtggaaacttgaaggaaatggtccatggaacttaggaacagattttgaacttattaatacgccaggccataccccaggctcagtgtgcttgtacttcaaaccgctaaaggtgctgttcactggagaccatgttgcaaagtcagaagaatcagacgatctgaacctctttctgatgtacagcaagcagtcagtgagccttcagctggaaagcatcaggaagctactggagctagagttcgagtggcttttacctggacatggctatcgaatcaagtacaaagatgtgcgtgccaagaatgtagccatggagtccctcctagctaattacacaagctaggagcctatgagcatcttacttgagttagtgctcgcaaataagcattccaggaggctgaatgttgatgctatgtttccagagaatagtgtgcatgatgctcatcagctcttgaatgtgcatttgttaccagagactgtaccttgtgctgcacaccaagcaagtgaatgaatcaagcatacatgactcggcccaatgaatgctttttccagaaatcttgcaagaccatatgattgatttgtt

SEQ ID NO: 119886 - DNA, 2505 bp, Zea Mays
atcatcaccagctagcactgcggaggagacacagaaaattctccatcgtcggccaccagagggagaggacgagcgtcgagcgcgcccccatggccaaaacccacgaagagggagcgggagcggaagcggaagaggtgaacgagcacccgatcgaggaggtccggaacacggtgcccaccaccgacgacccgtcggagccgtgtctgacgttccggacatgggtgctggggatgtcctcctgcgtgctgctctccttcgtcaacgagttcttcaactaccggtcgtcccagctgagcatcggcacggtgctggtgcagatcgcgtcgctgcccatcggccgcctcatggcgtccacgctgccggggcgtcccgtccgcgtgcctctcatcgcctggtccttctccctcaacccgggccccttcagcctcaaggagcactgcctcatcactatcttcgccggcgccggctgctccggcgtctacgccctcaacatcgtcgccatcgtcaaggtgttctaccggcggcagatcaacccgtacgccgccatgctgctggcgcagaccacccagctgcttgggtacgggtgggctggcctcttcaggaagttcctcgtcgattccgcctacatgtggtggcccatcaaccttgtccaggtcacgctcttgagagccatgcacgaggaggagaagcgtcccaggggcggtgtgacgcgtctccagttcttcgtcatcgtcgtcatctgcagcttcgcctactacctcatcccgagctacctgttcccgtcgctgagcaccgtgtcggtgctgtgctggctgtacagggactcggtgacggcgcagcagatcgggtcgggcctgcggggcctcggcatcggctccttcggcctggactggaacacggtggccggcttcctcggcaacccgctggtgtcgccggcgttcaccgtcgtcaacgtcatggccgggttcgcgctcaccacctacgtcgcgctgccgctgctctactggacggacacctacaacgccaggcgcttcccgctcatctcgccgcacgtctacgacgacgccggaaggccctacgacactggccgcgtcctcaaccgcgacaccttcacgctcaacctcgtcggctacgacgcctacagccgcatcaacgtcagcgtgctcttcgctgtcaactacggcatcggcttcgccagcctcatgtccacgctctcgcacgtcgcgctctaccacggaagggaggtctgggacggcctctgccggaagcggcagcaccagaagacagatgtcgacgacgtgcacacgaggatcatgaggcggaactacaagcccgtgccgcagtggtggttccacctcatgctcgccgtcgtgctcgcgctctcgctcttcacctgcgagggcttcggccagcagctgcagctcccctactggggcctcctccttgcctgcgccatcgccttcgccttcaccctccccgtcggtgtcatcttcgccaccaccaacatgcagccggggctcaacatcgtcaccgagctcatcatcggctacctctacccggggaagccgctggccaacgtggtgttcaagacgtacggcttcatcagcatgggccaggcgctggcgttcctggccgacttgaagctgggccactacatgaagatacccccgaggtccatgttcttcgcgcagctcgccggaacgctcacggcgtccacggtgcacttcgccaccgcgtggtggctgctcaccacggtcaaggacatctgcgacgtgggcaggctccccgccggcagcccctggacgtgccccggcgacgacgtcttctacaacgcctccatcatctggggcgtcgtcggcccgctgcggatgttcggcagcctcggtaactactggcagatgaactacttgttcctcgtcggcctgctggcgccgctgcccgtgtggctgctccagcgtgcgtacccgaccaaccgcgtgctcgccggcgtcaacctgccgctcgtcttcgctggcgccagcgggctgctccccgcgcgcagcgtgaacttcatcatgtgggggctcctcggattcatcttcaaccacgtcgtgtaccgccgctacaaggcctggtggatgcgacacaactacgtgctcgccgccggactcgacgccggcgtcgcgttcatgggcgtcctcaccttcgtcgcgctgggttacttcgacgtctacgggccgcagtggtggggcagcgtcgccgacgaccgctgcgacctggccgcttgtccgacggcgccaggagtcgtcgctaagggatgcccagtggtggcggcagagtgataacataacacaaaaggatctgtcgtcgtcggatcagaatcagaaccatgcatccgtctctgcatgcatgtccaagttaattaacgagaagatggatctgcttgtaaattagtttagcccttgttttatttagtagtacaaatgttgtgtgtatctctactatattaaattaccagtttcaaca

SEQ ID NO: 119887 - DNA, 2605 bp, Zea Mays
gttactggtgggaagcgccgcagctccacctcgtccggtccggtgtggtgtggtggactgggtgggtgtctctggcggtggtcgccgatgctgaccccctcggccggcataccgccgccctccctctccgcagctagcagcccctccacgtcctactctctcctctaccttccccgacgatgccgacgccttcccgtcccccgagcctcctccagctttgcccccaagcgctcggcgccggtccccaccaccaccctcccgcccgaggccccctccacctccgccgctgtcgaggcgccggcgcccttctcggtcacggccccggggacctaccggggaggggaggacccgctcgtctccaagctccgcacccagctcggcgtcatccacccgctcccggcgccccccatcagccgctccgtcgtcggcctcttcgccctcttcttcttcgtcggcgccgccttcgacaagctctggacgctgcggaagcgccgtcgcgccgagcgcgagctcaaggtcaacggctcctggccgcaggtgcccaccccgagcttctccctcttcctcgagaaggacctgcagcgcaaggagtccgtcgagtgggtcaacatggtgctcggcaagctctggaaggtctaccgcaccggcatcgagaactggatcgtcggcctgctccagcccgtcatcgacaacctccacaagcccgattacgtcaacagggtcgaaatcaggcagttctacctcggcgaggagcccctctccgtcaggaacgtcgagcgccgcacctcaaggcgggccaacgacctgcagtaccagattggcatccgctatgccggtggagcacgcatggcattggcactctacttgaagttcaccaaagtaccggtcgtcgtgccggtctgggttcgagattttgatatcgatggggagttgtgggttaaactaaggctcataccaacagaaccgtgggtgggagccgtatcttgggcttttgtgtcccttcccaaggttaagtttgagctttcgctgttccggctattcaatcttatggcgattcctgttctgtctatgtttctcacagaacttctgacagaagatttgccacgtctctttgtgcggcccaaaaagattgtccttgattttcaaaaggggagagctatgggacctgtttcaggaagtgttgcaagtgatataattcaaaatgttgcaactgacctgatccaagaggggaataaggactttgttggagagctatcagtgacactagttgatgctagaaagcttagctttgtcttgtttggcaagacagatccttatgttgtcatgattattgatgatcaagtaataaagagcaagaagaacagtcaaacaactgtgattggactaccgggagaaccaatttggaatcaagatttccatatgcttgtcgcaaatcctcgcaaacagaagttgaccattcaagtgaaggattcaattggtctaactgacatcactattggcaccggagaggtggagctagggtcacttaaagatacagtacctacggacaaaatcgtgactctatatggaggatggggtttgtttgggaagcgagaggctggggaagttctacttcggctgacatacaaggcatatgtcgaggatgaagaggaagaagacgaggcggtgagaagcgagattggtgcgggttacgcctcagacgaggatgtgctggactacgttagtggcatgagcaaggggactgatttcgtgggtaaagaaagggaaactttcatggatcttctcgccgcgctgctggtgagcgaggagttccaaggcatagtgtcatccgaaacaggaagctcgtcaagagaaggtgagcaggcaggcagtggaccagaaggcacagacagcgtcactgtccctactagcgctgcggcggctgatacggaggcatccaccgtgccaaacagctccacagatacggctctggtgtggctggcggccataacgagtgtgatggtgctggtgtcctccaacctcggtggctcaggctacttcaacccgtgaccgtgagtgaaggcaacactggctgtaacttgtaagggtgacaacaagagagttctcttcttgttcttttttttttcttttcttttggaaggctagtgaagagaggcaactgtgtatattcatttttgctgtcacctccttccgatttgctgaacatggaccaggatttctcctgctcgcgtcgcggcaggggtcattgccatcggttactgtttccaaggcaaatgcgattgtagttgtatcgttaaaaaatataccaagaaaatttaaggctgccttgttaggcatcagcttatgattatgacgagctgtttgaagtacttttttttttggctaaacaggcctttttgcgaatagctaatcattctctcacataggaataagaacgtgatgagatcaagtttaaaaaaacattttttgcagttttaactcacacttgtggatcctatataatatgttttaatgaactcatgagatttcgtgagaccataaattctacatgtagaactgttttgtcaaatactgtaacaaaagaggtttaatttcattggtaaag

SEQ ID NO: 119888 - DNA, 1714 bp, Zea Mays
attaatttccagggatgcacgcaggcaagtttaatttggaggatcaatggtagctagctagagctactagagacatacatggcggatcctctggtgcgagcgcgacccaaaaggaagaaggtcttagcggactacttggtgcgactccgatggattcctgccctcttcgtggcccttccaatatctgcgctgatctacctgagcgtcttcctggtgaacacgtggtccgccatgaaatccgagaagcgtcgacagaaggaacaccaggagaacgtagagggtcgtgaagcgtctcaaggagagggatccgaagagggacggcctcgtctgcaccgcgaggaagccgtgggtggtcgtgggcatgcgcaacgtggactacaagcgcgccagacgcttcgaggtcgacctctccgcgttgaggaacatcctcgagatcgacgcggagaggatggtcgccagggtggagcctctcgtcagcatggcccagataaccaaggctacctgccccatgaacctctcgctcgccgtggctcctgagttggacgaccttaccgtcggtggtctgataaacggctacgggatttcggggagctctcacgtctacggcctcttctctgacacggttgtctccatggaggtcgttcttgcggatgggcaggtcgtgagagccaccatggacaacgagcactccgacctcttctatggcatgccatggtcgcaaggcacgatcgggctcctggtttcggctgagatcaggctcgttcgtgtgaaggagtacatgaggctcacgtacactcctgtcaggggcaccctcaaggagatcgcggaggcttatgctgattcgttgttcctgccggcaaaggtccctgactttgtggaagggatggtgtactcgtcctcggagggcgtgatgatgacgggcgtgtatgcctcggaacaggaggcgaggaggacgaagggcagcggcaggatcatcaaccgtgtgggctggtggttcaagccctggttctaccagcacgccgagacggctctcgagaggggcgagttcgtggagtacatccccacgagggagtactaccatcgccacaccaggtccctgtactgggaagggaagctgatcatcccgttcggcgaccagctctggttcaggctcctgctcggctggctcatgccgccaaagatctccttgctcaagatcacccaaggcgaagccatcaggaactactaccatgacaggcacgtcatccaggagacgtgctgctgccccttcacaggctcagcgacgcgctggagtttgctcaccctccccgtgaagacgatggtgcggccggagccaggattcgagcagcatcgcaggaagggtgacaccagctacgcgcagatgttcaccgacgttggcttctactacgcccccgcccctgttctgcggggcgaggacttcgacggcgcccaagccgtgcaccggctggagcagtgggtcatcagcaaccacggctaccaggcgcagtacgccgtgtctgagctcagcggcaaggacttctggaggatgttcgacgcctcccactaccaccactgccgccgcaagtacggcgccgtagggaccttcatgagcgcccactacaagtccaagaaaggcaagaagacacaggaggaggtgctccaggctgaagctgaagctgcggatgctgacgtggtcgatgcagtgaccagctga

SEQ ID NO: 119889 - DNA, 1908 bp, Zea Mays
atcagaaacagacataaacatttgggccgggccctccctttgcctctccctccctccataggccctagcccatagccccgtcgtcgcaatcgcagtcgccacccgccgccgttccgccggcaagccgtccgtctccgccgcccgccccatccaggagaagcctgccaccagaacattcaactggccttcgttggaaatccgtccgttccccacaactgaactgacaggccacccatggcgctgctccgcgccgccgtatccgagctccgccgccggggccgcggggctcttacccctctcccggcgctgtcatctctcctctcctcgctgtctccccggagcccagcctccacccgccccgagcctaataacccccacgccgaccggcgtcacgtcatcgcgctccgccggtgcccgccgctcccggcgtcggccgtcctcgcccccgagctgctccacgccaggggtctcctcccgaggcactggtcgcacgcctcaccgctctccacctcctcctcctcttccagacccgcggacaaggcgcagctcacgtgggtggacaagtggatcccggaggcggcgcggccgtacgccatgctcgcccgcctcgacaaacccattgggacctggctcctcgcctggccctgcatgtggtcgatcacaatagcagcaatgccaggggatttgccagacttgaaaatgctggcactcttcggatgtggagctgtccttctcaggggggctggttgcacggtgaatgatcttctggatcgcgacattgataataaggttgagcgcaccagaagtaggccttttgcctcaggagtgcttactcctttacagggagtgggcttccttggaattcagcttctattgggactgggcattcttctacaattgaataactacagtcgtattctgggggcgtcttcacttgttctggtcttctcgtatcccctgatgaagaggttcacattttggcctcaggcttatcttggcctgacattcaactggggagctttactagggtgggctgctattaaggaaagcatagaccctgcaatcatccttccattgtatacagctggtatttgttggacgctggtgtatgatactatatatgcgcatcaggacaaagaagatgacctgaaagtaggagtcaagtccacagcattaagatttggagatttgaccaaatactggatcagtggctttggcgcggcatgcgtcggcagcttagcactcagtggttacaatgctgaccttgggtggccctactatccattcatagcagctgcagctgcccagttagcgtggcaggtttcgaccgtggatctgtctagccgctcagattgcaacaagaagttcgtgtccaacaagtggtttggagctttggtatttagtgggattctatttgggcgtcttgtatcatgatggttagctgatgaagcgtcatgtgcttgcatggtgggtccagtggaacctaagcaatattatgatgagatgctacaaacttttgtgtctgggctagcaaatgcggcgtggtacaggagtggagtggactttgtaagctgcttgatctttcaccgtcatcaaaccttggctatttaacgagcatatcaatcaatcatggtggtggtctgatgtaggacatgtgttacgatttccctagcagcttgctccttctcatcttttatttcaaatcttactgtgagtgcagctacggtacgtgttttgcacgatctattgactatagccttagggcatatacttgttttttttattacttctgtcaccatgagtggaggcaaaacactgctgtgttgttacataaaaacagacacacgtagatatttaagtgttaaatatgacatacggcttcttgcagaagcactcgttgccgataca

SEQ ID NO: 119890 - DNA, 1644 bp, Zea Mays
ccctttgcctctccctccctccataggccctagcccatagccccgtcgtcgcaatcgcagtcgccacccgccgccgttccgccggcaagccgtccgtctccgccgcccgccccatccaggagaagcctgccaccagaacattcaactggccttctatccgagctccgccgccggggccgcggggctcttacccctctcccggcgctgtcatctctcctctcctcgctgtctccccggagcccagcctccacccgccccgagcctaataacccccacgccgaccggcgtcacgtcatcgcgctccgccggtgcccgccgctcccggcgtcggccgtcctcgcccccgagctgctccacgccaggggtctcctcccgaggcactggtcgcacgcctcaccgctctccacctcctcctcctcttccagacccgcggacaaggcgcagctcacgtgggtggacaagtggatcccggaggcggcgcggccgtacgccatgctcgcccgcctcgacaaacccattgggacctggctcctcgcctggccctgcatgtggtcgatcacaatagcagcaatgccaggggatttgccagacttgaaaatgctggcactcttcggatgtggagctgtccttctcaggggggctggttgcacggtgaatgatcttctggatcgcgacattgataataaggttgagcgcaccagaagtaggccttttgcctcaggagtgcttactcctttacagggagtgggcttccttggaattcagcttctattgggactgggcattcttctacaattgaataactacagtcgtattctgggggcgtcttcacttgttctggtcttctcgtatcccctgatgaagaggttcacattttggcctcaggcttatcttggcctgacattcaactggggagctttactagggtgggctgctattaaggaaagcatagaccctgcaatcatccttccattgtatacagctggtatttgttggacgctggtgtatgatactatatatgcgcatcaggtgtttcgctatccctactttcatattaatccttgatgaagtggccatttcatgttgtcgcggtggtcttatacttgcatatctccatgcatctcaggacaaagaagatgacctgaaagtaggagtcaagtccacagcattaagatttggagatttgaccaaatactggatcagtggctttggcgcggcatgcgtcggcagcttagcactcagtggttacaatgctgaccttgggtggccctactatccattcatagcagctgcagctgcccagttagcgtggcaggtttcgaccgtggatctgtctagccgctcagattgcaacaagaagttcgtgtccaacaagtggtttggagctttggtatttagtgggattctatttgggcgtcttgtatcatgatggttagctgatgaagcgtcatgtgcttgcatggtgggtccagtggaacctaagcaatattatgatgagatgctacaaacttttgtgtctgggctagcaaatgcggcgtggtacaggagtggagtggactttgtaagctgcttgatctttcaccgtcatcaaaccttggctatttaacgagcatatcaatcaatcatggtggtggtctgatgtag

SEQ ID NO: 119891 - DNA, 1823 bp, Zea Mays
cctttgcctctccctccctccataggccctagcccatagccccgtcgtcgcaatcgcagtcgccacccgccgccgttccgccggcaagccgtccgtctccgccgcccgccccatccaggagaagcctgccaccagaacattcaactggccttcgttggaaatccgtccgttccccacaactgaactgacaggccacccatggcgctgctccgcgccgccgtatccgagctccgccgccggggccgcggggctcttacccctctcccggcgctgtcatctctcctctcctcgctgtctccccggagcccagcctccacccgccccgagcctaataacccccacgccgaccggcgtcacgtcatcgcgctccgccggtgcccgccgctcccggcgtcggccgtcctcgcccccgagctgctccacgccaggggtctcctcccgaggcactggtcgcacgcctcaccgctctccacctcctcctcctcttccagacccgcggacaaggcgcagctcacgtgggtggacaagtggatcccggaggcggcgcggccgtacgccatgctcgcccgcctcgacaaacccattgggacctggctcctcgcctggccctgcatgtggtcgatcacaatagcagcaatgccaggggatttgccagacttgaaaatgctggcactcttcggatgtggagctgtccttctcaggggggctggttgcacggtgaatgatcttctggatcgcgacattgataataaggttgagcgcaccagaagtaggccttttgcctcaggagtgcttactcctttacagggagtgggcttccttggaattcagcttctattgggactgggcattcttctacaattgaataactacagtcgtattctgggggcgtcttcacttgttctggtcttctcgtatcccctgatgaagaggttcacattttggcctcaggcttatcttggcctgacattcaactggggagctttactagggtgggctgctattaaggaaagcatagaccctgcaatcatccttccattgtatacagctggtatttgttggacgctggtgtatgatactatatatgcgcatcaggacaaagaagatgacctgaaagtaggagtcaagtccacagcattaagatttggagatttgaccaaatactggatcagtggctttggcgcggcatgcgtcggcagcttagcactcagtggttacaatgctgaccttgggtggccctactatccattcatagcagctgcagctgcccagttagcgtggcaggtttcgaccgtggatctgtctagccgctcagattgcaacaagaacttaaattcattgagttgatgccctgcaggttcgtgtccaacaagtggtttggagctttggtatttagtgggattctatttgggcgtcttgtatcatgatggttagctgatgaagcgtcatgtgcttgcatggtgggtccagtggaacctaagcaatattatgatgagatgctacaaacttttgtgtctgggctagcaaatgcggcgtggtacaggagtggagtggactttgtaagctgcttgatctttcaccgtcatcaaaccttggctatttaacgagcatatcaatcaatcatggtggtggtctgatgtaggacatgtgttacgatttccctagcagcttgctccttctcatcttttatttcaaatcttactgtgagtgcagctacggtacgtgttttgcacgatctattgactatagccttagggcatatacttgttttttttattacttctgtcaccatgagtggaggcaaaacactgctgtgttgttac

SEQ ID NO: 119892 - DNA, 1951 bp, Zea Mays
cctttgcctctccctccctccataggccctagcccatagccccgtcgtcgcaatcgcagtcgccacccgccgccgttccgccggcaagccgtccgtctccgccgcccgccccatccaggagaagcctgccaccagaacattcaactggccttcgttggaaatccgtccgttccccacaactgaactgacaggccacccatggcgctgctccgcgccgccgtatccgagctccgccgccggggccgcggggctcttacccctctcccggcgctgtcatctctcctctcctcgctgtctccccggagcccagcctccacccgccccgagcctaataacccccacgccgaccggcgtcacgtcatcgcgctccgccggtgcccgccgctcccggcgtcggccgtcctcgcccccgagctgctccacgccaggggtctcctcccgaggcactggtcgcacgcctcaccgctctccacctcctcctcctcttccagacccgcggacaaggcgcagctcacgtgggtggacaagtggatcccggaggcggcgcggccgtacgccatgctcgcccgcctcgacaaacccattgggacctggctcctcgcctggccctgcatgtggtcgatcacaatagcagcaatgccaggggatttgccagacttgaaaatgctggcactcttcggatgtggagctgtccttctcaggggggctggttgcacggtgaatgatcttctggatcgcgacattgataataaggttgagcgcaccagaagtaggccttttgcctcaggagtgcttactcctttacagggagtgggcttccttggaattcagcttctattgggactgggcattcttctacaattgaataactacagtcgtattctgggggcgtcttcacttgttctggtcttctcgtatcccctgatgaagaggttcacattttggcctcaggcttatcttggcctgacattcaactggggagctttactagggtgggctgctattaaggaaagcatagaccctgcaatcatccttccattgtatacagctggtatttgttggacgctggtgtatgatactatatatgcgcatcaggacaaagaagatgacctgaaagtaggagtcaagtccacagcattaagatttggagatttgaccaaatactggatcagtggctttggcgcggcatgcgtcggcagcttagcactcagtggttacaatgctgaccttggttggtgtttagtgtgatgcttgagcgaagaatggtattgtttttacttgatattgactccagacctgaaatcatgttggacagggtggccctactatccattcatagcagctgcagctgcccagttagcgtggcaggtttcgaccgtggatctgtctagccgctcagattgcaacaagaagttcgtgtccaacaagtggtttggagctttggtatttagtgggattctatttgggcgtcttgtatcatgatggttagctgatgaagcgtcatgtgcttgcatggtgggtccagtggaacctaagcaatattatgatgagatgctacaaacttttgtgtctgggctagcaaatgcggcgtggtacaggagtggagtggactttgtaagctgcttgatctttcaccgtcatcaaaccttggctatttaacgagcatatcaatcaatcatggtggtggtctgatgtaggacatgtgttacgatttccctagcagcttgctccttctcatcttttatttcaaatcttactgtgagtgcagctacggtacgtgttttgcacgatctattgactatagccttagggcatatacttgttttttttattacttctgtcaccatgagtggaggcaaaacactgctgtgttgttacataaaaacagacacacgtagatatttaagtgttaaatatgacatacggcttcttgcagaagcactcgttgccg

SEQ ID NO: 119893 - DNA, 1926 bp, Zea Mays
cctttgcctctccctccctccataggccctagcccatagccccgtcgtcgcaatcgcagtcgccacccgccgccgttccgccggcaagccgtccgtctccgccgcccgccccatccaggagaagcctgccaccagaacattcaactggccttcgttggaaatccgtccgttccccacaactgaactgacaggccacccatggcgctgctccgcgccgccgtatccgagctccgccgccggggccgcggggctcttacccctctcccggcgctgtcatctctcctctcctcgctgtctccccggagcccagcctccacccgccccgagcctaataacccccacgccgaccggcgtcacgtcatcgcgctccgccggtgcccgccgctcccggcgtcggccgtcctcgcccccgagctgctccacgccaggggtctcctcccgaggcactggtcgcacgcctcaccgctctccacctcctcctcctcttccagacccgcggacaaggcgcagctcacgtgggtggacaagtggatcccggaggcggcgcggccgtacgccatgctcgcccgcctcgacaaacccattgggacctggctcctcgcctggccctgcatgtggtcgatcacaatagcagcaatgccaggggatttgccagacttgaaaatgctggcactcttcggatgtggagctgtccttctcaggggggctggttgcacggtgaatgatcttctggatcgcgacattgataataagtcgtattctgggggcgtcttcacttgttctggtcttctcgtatcccctgatgaagaggttcacattttggcctcaggcttatcttggcctgacattcaactggggagctttactagggtgggctgctattaaggaaagcatagaccctgcaatcatccttccattgtatacagctggtatttgttggacgctggtgtatgatactatatatgcgcatcaggtgtttcgctatccctactttcatattaatccttgatgaagtggccatttcatgttgtcgcggtggtcttatacttgcatatctccatgcatctcaggacaaagaagatgacctgaaagtaggagtcaagtccacagcattaagatttggagatttgaccaaatactggatcagtggctttggcgcggcatgcgtcggcagcttagcactcagtggttacaatgctgaccttggttggtgtttagtgtgatgcttgagcgaagaatggtattgtttttacttgatattgactccagacctgaaatcatgttggacagggtggccctactatccattcatagcagctgcagctgcccagttagcgtggcaggtttcgaccgtggatctgtctagccgctcagattgcaacaagaagttcgtgtccaacaagtggtttggagctttggtatttagtgggattctatttgggcgtcttgtatcatgatggttagctgatgaagcgtcatgtgcttgcatggtgggtccagtggaacctaagcaatattatgatgagatgctacaaacttttgtgtctgggctagcaaatgcggcgtggtacaggagtggagtggactttgtaagctgcttgatctttcaccgtcatcaaaccttggctatttaacgagcatatcaatcaatcatggtggtggtctgatgtaggacatgtgttacgatttccctagcagcttgctccttctcatcttttatttcaaatcttactgtgagtgcagctacggtacgtgttttgcacgatctattgactatagccttagggcatatacttgttttttttattacttctgtcaccatgagtggaggcaaaacactgctgtgttgttacataaaaacagacacacgtagatatttaagtgttaaatatgacatacggcttcttgcagaagcactcgttgccg

SEQ ID NO: 119894 - DNA, 1745 bp, Zea Mays
cctttgcctctccctccctccataggccctagcccatagccccgtcgtcgcaatcgcagtcgccacccgccgccgttccgccggcaagccgtccgtctccgccgcccgccccatccaggagaagcctgccaccagaacattcaactggccttcgttggaaatccgtccgttccccacaactgaactgacaggccacccatggcgctgctccgcgccgccgtatccgagctccgccgccggggccgcggggctcttacccctctcccggcgctgtcatctctcctctcctcgctgtctccccggagcccagcctccacccgccccgagcctaataacccccacgccgaccggcgtcacgtcatcgcgctccgccggtgcccgccgctcccggcgtcggccgtcctcgcccccgagctgctccacgccaggggtctcctcccgaggcactggtcgcacgcctcaccgctctccacctcctcctcctcttccagacccgcggacaaggcgcagctcacgtgggtggacaagtggatcccggaggcggcgcggccgtacgccatgctcgcccgcctcgacaaacccattgggacctggctcctcgcctggccctgcatgtggtcgatcacaatagcagcaatgccaggggatttgccagacttgaaaatgctggcactcttcggatgtggagctgtccttctcaggggggctggttgcacggtgaatgatcttctggatcgcgacattgataataagtcgtattctgggggcgtcttcacttgttctggtcttctcgtatcccctgatgaagaggttcacattttggcctcaggcttatcttggcctgacattcaactggggagctttactagggtgggctgctattaaggaaagcatagaccctgcaatcatccttccattgtatacagctggtatttgttggacgctggtgtatgatactatatatgcgcatcaggacaaagaagatgacctgaaagtaggagtcaagtccacagcattaagatttggagatttgaccaaatactggatcagtggctttggcgcggcatgcgtcggcagcttagcactcagtggttacaatgctgaccttgggtggccctactatccattcatagcagctgcagctgcccagttagcgtggcaggtttcgaccgtggatctgtctagccgctcagattgcaacaagaagttcgtgtccaacaagtggtttggagctttggtatttagtgggattctatttgggcgtcttgtatcatgatggttagctgatgaagcgtcatgtgcttgcatggtgggtccagtggaacctaagcaatattatgatgagatgctacaaacttttgtgtctgggctagcaaatgcggcgtggtacaggagtggagtggactttgtaagctgcttgatctttcaccgtcatcaaaccttggctatttaacgagcatatcaatcaatcatggtggtggtctgatgtaggacatgtgttacgatttccctagcagcttgctccttctcatcttttatttcaaatcttactgtgagtgcagctacggtacgtgttttgcacgatctattgactatagccttagggcatatacttgttttttttattacttctgtcaccatgagtggaggcaaaacactgctgtgttgttacataaaaacagacacacgtagatatttaagtgttaaatatgacatacggcttcttgcagaagcactcgttgccg

SEQ ID NO: 119895 - DNA, 2041 bp, Zea Mays
cctttgcctctccctccctccataggccctagcccatagccccgtcgtcgcaatcgcagtcgccacccgccgccgttccgccggcaagccgtccgtctccgccgcccgccccatccaggagaagcctgccaccagaacattcaactggccttcgttggaaatccgtccgttccccacaactgaactgacaggccacccatggcgctgctccgcgccgccgtatccgagctccgccgccggggccgcggggctcttacccctctcccggcgctgtcatctctcctctcctcgctgtctccccggagcccagcctccacccgccccgagcctaataacccccacgccgaccggcgtcacgtcatcgcgctccgccggtgcccgccgctcccggcgtcggccgtcctcgcccccgagctgctccacgccaggggtctcctcccgaggcactggtcgcacgcctcaccgctctccacctcctcctcctcttccagacccgcggacaaggcgcagctcacgtgggtggacaagtggatcccggaggcggcgcggccgtacgccatgctcgcccgcctcgacaaacccattgggacctggctcctcgcctggccctgcatgtgacctttgcttcacaggtcgatcacaatagcagcaatgccaggggatttgccagacttgaaaatgctggcactcttcggatgtggagctgtccttctcaggggggctggttgcacggtgaatgatcttctggatcgcgacattgataataaggttgagcgcaccagaagtaggccttttgcctcaggagtgcttactcctttacagggagtgggcttccttggaattcagcttctattgggactgggcattcttctacaattgaataactacagtcgtattctgggggcgtcttcacttgttctggtcttctcgtatcccctgatgaagaggttcacattttggcctcaggcttatcttggcctgacattcaactggggagctttactagggtgggctgctattaaggaaagcatagaccctgcaatcatccttccattgtatacagctggtatttgttggacgctggtgtatgatactatatatgcgcatcaggtgtttcgctatccctactttcatattaatccttgatgaagtggccatttcatgttgtcgcggtggtcttatacttgcatatctccatgcatctcaggacaaagaagatgacctgaaagtaggagtcaagtccacagcattaagatttggagatttgaccaaatactggatcagtggctttggcgcggcatgcgtcggcagcttagcactcagtggttacaatgctgaccttgggtggccctactatccattcatagcagctgcagctgcccagttagcgtggcaggtttcgaccgtggatctgtctagccgctcagattgcaacaagaagttcgtgtccaacaagtggtttggagctttggtatttagtgggattctatttgggcgtcttgtatcatgatggttagctgatgaagcgtcatgtgcttgcatggtgggtccagtggaacctaagcaatattatgatgagatgctacaaacttttgtgtctgggctagcaaatgcggcgtggtacaggagtggagtggactttgtaagctgcttgatctttcaccgtcatcaaaccttggctatttaacgagcatatcaatcaatcatggtggtggtctgatgtaggacatgtgttacgatttccctagcagcttgctccttctcatcttttatttcaaatcttactgtgagtgcagctacggtacgtgttttgcacgatctattgactatagccttagggcatatacttgttttttttattacttctgtcaccatgagtggaggcaaaacactgctgtgttgttacataaaaacagacacacgtagatatttaagtgttaaatatgacatacggcttcttgcagaagcactcgttgccgatacaccgacgtgttcttttatttggctgagaacatactgatgctttcgttttggactgaac

SEQ ID NO: 119896 - DNA, 216 bp, Zea Mays
atgggcgacctcatcagcagcttcacttttggacttgatgcctccctcgccttctatttaggcttctcatcaacgcctgacacttcaactcctcttctaggcggcagctccttctcatctacagattcatcctcacagatgttctcaccaaccccaattttcaactcttctgaggaacgaggatccaggaagtttacagcttcgttcagggcatga

SEQ ID NO: 119897 - DNA, 805 bp, Zea Mays
agaggctgcttggcgagtcaaaaatacatttggtcatcttccctgcttggagttggagttgagacgccgacgcggcgcccgagaagaatttgcggatggattcgctgcgcagcgtgttggagtcgattcaggcgatgcagatccgccccgtggtcgcccaaatcatcaccctagggatgatcctaacttcggcattgatcctatggaaaggattggtcgtcgtaacagggagtgagtcgccggttgtggtggttctatctggaagcatggagcctgggtttcgaaagggtgatgtcctgtttctgcacatgaataaggaccctgtccgcacaggagacatagttgttttcaatgtcgagggccgtgatattccaattgtccatcgtgtgatcaaggttcatgagcgccatgatacggtggactctgacattctcacgaaaggtgacaataatcccggggatgaccgagtcctgtacgcacatgggcagctttggctgcagcgacagcacatcattggacgggctgttggctatctgccttatgctgggtggcttacaatcgtcatgacggagaaaccagtcctcaagtatctgctaattggtgcactggggctgctggtggtagcatccaaggagtgacgttaaaggtaggatcgatgaacagtgagaagagtatgcggagaggagaaaagctgtagagaaacacaattgttatgttgaagaaagctgtattgcatacatgatacaatgttggagtacaagtatatataatatctcatcctgtgttaaactatactgcatgtatg

SEQ ID NO: 119898 - DNA, 986 bp, Zea Mays
agaggctgcttggcgagtcaaaaatacatttggtcatcttccctgcttggagttggagttgagacgccgacgcggcgcccgagaagaatttgcggatggattcgctgcgcagcgtgttggagtcgattcaggcgatgcagatccgccccgtggtcgcccaaatcatcaccctagggatgatcctaacttcggcattgatcctatggaaaggattggtcgtcgtaacagggagtgagtcgccggttgtggtggttctatctggaagcatggagcctgggtttcgaaagggtgatgtcctgtttctgcacatgaataaggaccctgtccgcacaggagacatagttgttttcaatgtcgaggtaagtcctactggattcctattcctttcttgtcgtttgtccatagattactagtatctgaaattttctgaagcttgatggattcgttgttctttctatatatttattatttgtgatgtgtgctcgtacatgacgtgctagcgactggttctctatcattgtatctgttgaaacattgcagggccgtgatattccaattgtccatcgtgtgatcaaggttcatgagcgccatgatacggtggactctgacattctcacgaaaggtgacaataatcccggggatgaccgagtcctgtacgcacatgggcagctttggctgcagcgacagcacatcattggacgggctgttggctatctgccttatgctgggtggcttacaatcgtcatgacggagaaaccagtcctcaagtatctgctaattggtgcactggggctgctggtggtagcatccaaggagtgacgttaaaggtaggatcgatgaacagtgagaagagtatgcggagaggagaaaagctgtagagaaacacaattgttatgttgaagaaagctgtattgcatacatgatacaatgttggagtacaagtatatataatatctcatcctgtgttaaactatactgcatgtatg

SEQ ID NO: 119899 - DNA, 596 bp, Zea Mays
cgcttgattctttgggtggtgttggtggtacagaaactgtgctggactgcagaccgacttgctcaatgaaatttgccgcatcggggtgtgctgtcatcactgtgatcaggtcgatgagacagctgatcacctgctcactaattgtgcctatacggttctgttgaagatagatcctctgattactggtggagcacagacagttagtggactggtgcagaaaggcctcaattcttaagcatcagaatctcttatgttttcaaattcaatggtgctgcccagacatggcaggtgccttgctgcttgctgatgaggagctgcagctttggggaatggctgggggctctagggcttagactgtctccagcaacgttctctatatacattctctatatccgtcttttacagtgttctctaaaagatttcatctcctatatctactttctctccaacaacgtcctctaaatcacgtcctctatatgtaaatacctatattaaagacatttttaattttttaatttttgtacatacgtatttgtcatactctcaaatgtattgtacatattttagttttattaaagcggttgtttaaagtattc

SEQ ID NO: 119900 - DNA, 375 bp, Zea Mays
atggtcattggtgaccatatgcttcttctactagctattgctgaggagaccttggcagagtttctgtcgaaagcaacaggaactgctgtcgattgggtgcaaatggttgggatgaagcttggtccggattccattggaatcatcgctgtttcgtacaattgcagtggcgtagcagcccaagcagatcaaggtctggttccagaaccgcaggttgttgcccatttcggagcatcatggtgtgtgatgtccctgtccatgaactacaagtttgaggagctggcgcagacccaccccgaggtcttgttcctctacgtggacgtcgacgatgtccaggtctcatgtcttggtttttcttatgtcctttcggattcttag

SEQ ID NO: 119901 - DNA, 515 bp, Zea Mays
atatctaaattatagctgcatcttgttccttaatggttagctgctttcttctcacaaagctcatattagttgtcgagggttttccaaaatcctttgttgtttccgacctcagaaaggcccaacagaaatcacatgcttctttacctctggtgtccgtgctactggcccaagccgagggcagtcttggctccaaaaccaagtgggaaagaaaccttcacctcaaatggttctcatggaccctagaattgaggcatgttgaggtgtatgtccaaatacatatgctggaaaggtagtatatcggctgcaactgtttgtcagcagaaccagctggtggagacgatccagagccccgagttatggttgctttagacaattcatctgaacccgtcctgtcccaggtaatataaagctctgctataacaaatatacgtgtagccttttgtcacgggtatcatccgtgcgcattctagcaggcgacgcgtccgttgtatgatgctcgtgctttgtcgctcctc

SEQ ID NO: 119902 - DNA, 1439 bp, Zea Mays
tttttttctaaaacggaagagctttaacaagttaagcttgaatgacatttgttcttttattgttgcagctttaacccattgaattctttcatttggtttgagctctttggagaaccaacagatcgagatgttgacctgcttggtggtgtaaagtggcattgtacaatttcattggattctccttattcagaaaacaacatactgtcttgacgtgaagtgttctttacaggtagtccaagcttggtatgtcatgggaaggctaggagcttacaattcttcaaatttgcagctggccaactcaatgatggactacgacccttcatatgattctgaagaagcttccacagtaatgccatcatctttccatgatatcagtgatgttgagttccaagacaattgggccagggtttgggtggaccttggaacctcggattaccttggcttggatgtattactaaactgcttaacacagttgagctcagagcacttgggtatcaaacaagtggtttttggaggcaagaaaatgggtgactgggaagagggcatgacgagctctgattatggatacaagcacttcaagatatgataaatttacaggtgacaagcaacggtggtgatgcaaggctggccgagaaatttgatcaagactgcatgcatctcgatgtgcccttgtatgtaaataaataaattgtcatgggttttattttatcgtcgtgatagcagtgaattttaactaacagctcaaggcaggctagcagaatagaaaaatataatatggatgcatgtcttgtttcagacacgtctgtttcttgatgatgatgatgataatgatgatgattcttgcaacgtcaggaaaacttgacgagtcaatcaggtgttttttttacgtattgattaggagaaagacgaagtaaacaaggtgtcacagttgatcacattcttaaacttgggaacaagtagcagacaaactaactagtagcatggtgaaaggcattggcacctgcatttttcatagtattccacaagctgatactaacatgaggtcacaagtacaccgctcatcccatccatgcatatttgccgccgccacacccacataatagatcagctctcgtggaaccctaaatgttgcacaactctacaaagaaaacatacaagttcagcctatacaccacttcccaaatcaacgaaacaagatgccgatccttgcatcctcgctagctactggtcctctccatgctgttggtcctagcattctctcgcatcttctccacgatgtgcctccctttctcttcgatggtccgcctcttctcctccagcttgtcccccatcctcttcccgaaatccatcatccgagctcgcctcccgctttttcgcttcgcgtcctctccaatgggtgatgctgacacctgcggctgctcccctgctggtatcaccgc

SEQ ID NO: 119903 - DNA, 226 bp, Zea Mays
gatccagcggaaggactctcatcgcatgcacataaggtggaagttctccaaggctaaagtccgaggttccaacaaagtgtgccttcatccgcaactcggtcatccgcattcacatcaggtgaagttgaaagctgtccaatttgattcaatgcagcaggcggggcagtggcttttacagtatcttgcgatgaattgccaccaagcttgtcctcttgtggacctatta

SEQ ID NO: 119904 - DNA, 1393 bp, Zea Mays
atgtacgggcacaccttctcgtaccgcctggtggagcacgacagcgacgccgtcagcaaggtggtgttcagggaggacgacttggtgctggcgcatccggaactcaagtacacggcgttcacgcccacgtcgtcgccggcggacacattctattacgtgaagctcaagggcgtgttggtgggcggcgagctgctgaaaatcagctcggacacgtgggacgtgggcaaggacgggtccggtggcacgatcatcgactccggcacgacgctgagctacttcgtggagccggtgtaccaggctgtaccctctgatcccggacttctcggtgctgaaccgtgctacaacgtctctggcatggagcggccggaggtgccggagctgtcactgctgttccccgacggtgccgtgtgggacttccccgcggagaactacttcgttcggctggacccggacgacatcatgtgcctggcagtcctgggcacctcgcgcaccggcatgtccatcatcggttttcctatcctcctcaatattttgaaagaagaccgtgaggatgtagagcttgtgagaggtgccctggagacctttatgagtgcattgactcctattgagacgtcacaagggccaaatactcagcttcagtcagccgaatcctgcaacaaggatgtctccatcgtccacgtcgacatgcacaactatagccttgatgagaagatcaggatgacgcttgaggcgcacattgtcgagaagaccgacgaggaggcaactaatcaacaatgttcaggatgcagggccacaccacacatatggactgcttcagtttgtgtgtcaaatttgttttccacaaagaaattatttaaacaaaaagatcgcatcacagagaaggatgtgacagtgatgaggctttcaggtggtgggcatagctgctttcgggatagtgataaggcaagattaagattcaaacggaagttctgggagaaggttgtggagatagatgatctatgtggaaaggatggtgcatggtggggtattaaaggttacatgcgagacaatttcaaccatagcaataaggtcacctcacaaaaagagcattttcagaacagtaggctcgtgaaatttgtgttggatatgtattgggagcttcgtcctgttactggttcatccttaacacaccaaacaaggtatgacccaacatgtgcagttgacccatcattgaagatggtcactacaccttgtttcgaagcctagcgagattggacgcctcagtgttcaattgttacatgcatatggtatttgtgcagatatcaggtttaatgttgagcacatacaatatttaaaggtttttcgtgttgagcttgttttacttttggccaactgttgatagtgttttttgtac

SEQ ID NO: 119905 - DNA, 103 bp, Zea Mays
gagagagagagagagaggctaattaagagtagatggcagcatcaagcttggttagattcattcagatgcatctctctctctttcagtctccaatgggcaggtg

SEQ ID NO: 119906 - DNA, 632 bp, Zea Mays
gccaaaggaaggcttgtgttgtgtttggctagggtttgctcgcgtctcctccttcccttggctgctgtcgtgccggtcggcggcgacagcaagggagggaacatgtcgaagaagaacaatcttgccaagaggaagaagcagtacgagttcgacctccaacgggagaaggaggccaaggagaagcaggccaagaagctgcaagccaagaaatccaagatgaagatagatggtgctgaaaagaaacgtaaaggtggccaatttaaggtcggcaagaaaaaggtgaagacgaaactttcagccttagcaaaagccaaagccgcgcaagccatggaggtcgacaagtgactgcggagcacaagcatcatcaccttaagcgtcgagccagagttggaactctgaattctgtgcccacatgaatagctcccgtcgggtgcagctgcagctgcagcttgttgaacctttctttctaaaaagaatgtcattcttgcttttttaagggtaatcaagctctagttataggttttggtgataacgactatgatgttagagaactaatgagatttatggagctaaatgaaaaagagaaaaatacatgtgatttttgatgcttcaattactaaagaaggacgcga

SEQ ID NO: 119907 - DNA, 2210 bp, Zea Mays
gatacaccattgtacatgctcgctcttcctcttggagtcttgggaccgccccctcccctcttccgaggtccgagcctgatccctccttccttccgtcagcgcacatctctagggttttagcgccccatttccgcaacgccattcccgatcggatcgcccccttcccacccgccgccgaccagatcccggcgcgagtgctacccaaccctccggcgccgccacccttagtctcagagggtcggtctccaccgaaagcttcgcacaaatcccctccgtttgtcggtgccatttgttgcaaagattgtgttttcctcctcatccgtgcctcgcgttccatttctgccgtccccgaaaatgccaccgctttgttgagatctctcgtttctcgatctgatctcgcctcggtatggcgtgagagttcctaggggagggcaaaatcgtcggagttgagattcttgcgtccatttgctagtctcaataccgagcatccgatctcgaacagtgagacaaagtagcgacctttgtgccgttccttgtaactgagcttgcccccgcctgcgtatcggtgggtgacggcgagctctacggcgctgcccattcctatgaatggacgggagggagtccacggtggcgtcggggcccaacttctcatcgttctacacgcagcaccggggcatcggggcgccgggtgtccccggccactcggcggtgctccatgacccgccgcccgccgggtaccggcagcatcttgatgctgtctctgctgggtacgcattccagaccccgcaggttgggggttcccacattggacaggggtaccaccatgtcgaggcctcaccccatgtggcgcaatacagctccggtggcggcaccagctccggcggtgatatggacattggcatgggttcggctgtgtgcaccaatgttaagggggagctggggagcgggcctgcccaagatgagcaggtgaagaagaagcggggtaggccaaggaagtataagcctgatggggcggtgactctcgggttatcaccctcttcatcattaacacctcactcggccagcttggggatgggaaccatgattagtgctccaggttctggatttgggtcggagggatcaggggcttcaggcttgggtgcgccatcagagaagcgtggcagggggcggccacctggctctggaaagatgcaacagttggcttcgcttggaaagtggtttcttggctctgttggaactggttttactcctcatgtgattattattcagccaggagaggacgttgctgccagaataatggccttctcacaacaaggcccaagggcagtgtgcatcatttcagcaactggagctgtttctgcagcaacccttcaccaggattcagaatctggcagtgtggttacatatgagggtcggtttgagatcctgtgcctttctgggtcatacttggtggtagatgaaggtggcggcgcacggacccgaagtggagggctttgcatagctttgtgtggtcctgacaacagggttattggtgggagtgtaggtggagtcctgatggcagctggagcggttcaggtgatagtggggagcttcatgtacggaggaggttcaaagaagaacaaggtgaaagccgagttggacgcggagcctgaggaggcgaacgccggcgaccaagaggtggcacttgcggagcacagcagcatggcccctcatcctgccatgagtggtggtggcgggtgggcatctggcatgatgaggcagatggagtcgagaactcccaacatcgatatcaactccatccgcgagtagtttgcctgtttggttgggtggatgaggaaggctcctcctccttggatgcacacagcacagcggcatgcatatgtttggttgtaggcgttgctatgttttaggactccagagtatattgtgatgtgatgttgtacttggatgttgttgtataagatcatgggaacgcttggtcgtgttattatgttaataaaaatatataatggatggtaagctactgtttggaagaagattaattttgaatctagttttgataggcccattttctttttttttactaacatctccctaatggtggcgtgagcatcgatagtccagaccaactccatctgacgcaacaagttagaactaatcgcaactctatacatttgacacaacaaattggaattgatcacagctccatc

SEQ ID NO: 119908 - DNA, 2078 bp, Zea Mays
gatacaccattgtacatgctcgctcttcctcttggagtcttgggaccgccccctcccctcttccgaggtccgagcctgatccctccttccttccgtcagcgcacatctctagggttttagcgccccatttccgcaacgccattcccgatcggatcgcccccttcccacccgccgccgaccagatcccggcgcgagtgctacccaaccctccggcgccgccacccttagtctcagagggtcggtctccaccgaaagcttcgcacaaatcccctccgtttgtcggtgccatttgttgcaaagattgtgttttcctcctcatccgtgcctcgcgttccatttctgccgtccccgaaaatgccaccgctttgttgagatctctcgtttctcgatctgatctcgcctcggtatggcgtgagagttcctaggggagggcaaaatcgtcggagttgagattcttgcgtccatttgctagtctcaataccgagcatccgatctcgaacagtgagacaaagtagcgacctttgtgccgttccttgtaactgagcttgcccccgcctgcgtatcggtgggtgacggcgagctctacggcgctgcccattcctatgaatggacgggagggagtccacggtggcgtcggggcccaacttctcatcgttctacacgcagcaccggggcatcggggcgccgggtgtccccggccactcggcggtgctccatgacccgccgcccgccgggtaccggcagcatcttgatgctgtctctgctgggtacgcattccagaccccgcaggttgggggttcccacattggacaggggtaccaccatgtcgaggcctcaccccatgtggcgcaatacagctccggtggcggcaccagctccggcggtgatatggacattggcatgggttcggctgtgtgcaccaatgttaagggggagctggggagcgggcctgcccaagatgagcaggtgaagaagaagcggggtaggccaaggaagtataagcctgatggggcggtgactctcgggttatcaccctcttcatcattaacacctcactcggccagcttggggatgggaaccatgattagtgctccaggttctggatttgggtcggagggatcaggggcttcaggcttgggtgcgccatcagagaagcgtggcagggggcggccacctggctctggaaagatgcaacagttggcttcgcttggaaagtggtttcttggctctgttggaactggttttactcctcatgtgattattattcagccaggagagggtcggtttgagatcctgtgcctttctgggtcatacttggtggtagatgaaggtggcggcgcacggacccgaagtggagggctttgcatagctttgtgtggtcctgacaacagggttattggtgggagtgtaggtggagtcctgatggcagctggagcggttcaggtgatagtggggagcttcatgtacggaggaggttcaaagaagaacaaggtgaaagccgagttggacgcggagcctgaggaggcgaacgccggcgaccaagaggtggcacttgcggagcacagcagcatggcccctcatcctgccatgagtggtggtggcgggtgggcatctggcatgatgaggcagatggagtcgagaactcccaacatcgatatcaactccatccgcgagtagtttgcctgtttggttgggtggatgaggaaggctcctcctccttggatgcacacagcacagcggcatgcatatgtttggttgtaggcgttgctatgttttaggactccagagtatattgtgatgtgatgttgtacttggatgttgttgtataagatcatgggaacgcttggtcgtgttattatgttaataaaaatatataatggatggtaagctactgtttggaagaagattaattttgaatctagttttgataggcccattttctttttttttactaacatctccctaatggtggcgtgagcatcgatagtccagaccaactccatctgacgcaacaagttagaactaatcgcaactctatacatttgacacaacaaattggaattgatcacagctccatc

SEQ ID NO: 119909 - DNA, 109 bp, Zea Mays
ttcttatgtgttactggttcagctcaggctaaggtattctgctcttgtaacctttcatattttccattacttcagaggtgaaaacttgttgtcgataattatgctttaa

SEQ ID NO: 119910 - DNA, 2896 bp, Zea Mays
actccattcccctcgtcgccgaccaccacccaccatggcgggggcggcatctccgcctcaggccctacccccggccccgaccctccaggcctccttcctctgctccctcgcgctcgccttcctccgggccggccgcctctccgctgcctctcacgtcgtctcctcactccccgctccgcctcccgcccgcctcctccgccgcctcatccccgcgctcgcctcctcgggcctcgtcgccgccgcctcccgcttccgccccgtcccaggtgacccgctcaccctcaactccatcatcctctcctactgcagcctccacgcgctccggcccgcgcttagcctgctccgttcctcctcggggccccagccgcaggtcgcggccgacaccgtcagctacaacatcttcctcgctggcctctccgagcagggacacgggaggctcgcgccgcccgtgctctccgagatgtgcaagcgcggcgtgccctgggacggggtcaccatgagcacggcgctcgtggggctgagcaggaccggacttgtcggcgaggccgcggcgttggcggagatgctggtccgaggccgaggaattgatggcttgggtgtggtgggatggaatgctctcattgacggctactgtaaagtccaggacatggccgcagcattggcggtggtggagaggatgactacacaagggctgtcgcttgatgtggtggggtacaataccctggttgccgggtttttctactccggcgatgctgatgctgcatgggaggtagcggagaggatgaaggcggatggggtggagccgagtgtggtcacacacacgacgctcattggggagtattgtaagatgaagcggatcgaggaggcgttcactctgtacgagggtatggtcaggtcgggtgtgctgcctgatgtggtcacccttagtgctcttgttgatggcctatgcagggatggccggttctcagaggcatatgcacttttcagggagatggacaagattggagtcgctccaaaccatgtgacatattgtacatttatcgattcattagcgaaagtgcagagggtgaacgagtcactgggtctattgggagagatggtctcaaggggcgtggccatggatctggtcatgtatacaactgtgatggaccgtttaggtaaggaagggaagattgaggaagctaaggatgtgcttcggcatgctttgtcggataatattactcccaattgtgtaacttacactgtactggtcgatgcacactgcagagctggcaatatcgatggcgcagagcagatgctgttgcaaatggaggagaaatccgttagccccaatgttgtcacattctcatcaatcctcaatggtcttgttaaaagaggatgcatcgccaaagcagctggctatatgaggaagatgaaggacagtggcattgctcctaatgttgttacttacggaacgcttatcgacggcttcttcaagtgccaggggcaagaagcagctcttgatgtgtaccgtgatatgttgcatgagggtgttgaggcaaacaactttattgttgactcactggtgaatggtttgagaaagaatgggaatatagaggaagctgaagcattatttaaagatatgggtgaacgtggtctgttgctagaccatgtcaactatgccaccttaatggatgggctttttaaaacaggaaacatgccagctgctcttaaggttggtcaggagttgatggagagaaatctgtcacctgatgctgttgtctataatgtgtttatcaattgcctttgcaggcttggcaagttcagtgaagcaaaatcttttttgaaagagatgagaaatacgggcttagaacctgatcaagcaacatataacactatgatttctgcacagtgtcgggaagggaatacctcaaaagctctaaagctactgaatgaaatgaagtggagttcaataaagcctaatctcatcacatatactacacttgttgtgggccttcttgaggctggggttgtggagaaggcaaaatatttactaaatgagatggcttctgctggattcactccaacccctctgacttatcgaagggtgctgcaagcatgttctggaagcaggagcccgtacgtgattttggaagttcatgaattgatgatgggtgctggtcttcatgctgatatcactgtctataatacactcgtgcatgttttgtgttgccatggaatgacaagaaaagctacaattgttttggatgaaatgttggggagaggaattgcaccagacactatcacattcaatgctctcattcttggccattgtaagagcagtcatctagataatgcatttgcaacgtatgctcagatgcttcatcaaggactctcaccaaatatagctacattcaacacacttctgggtggccttgagtccgctggaagaattggagaggcagatactgttatctgtgagatgaagaagatgggccttgaacccaataatctcacctatgatatactggtgacaggatatgcaaagaaaagcaacaaagttgaagcactgaggctgtattgtgagatggtgagtaaaggctttattcccaaagcaagcacatataattcactcataagtgactttgctaaagctggaatgatgaatcaagctaaagagttgttcagtgagatgaaaaggagaggagttttacatacgtcctcaacttatgatatccttttgaatggatggtcaaagcttagaaatggaactgaggtaagaatacttctcaaagatatgaaagagctagggtttaaaccatctaaaggcactattagttctatgtccagagcattttcaaagccgggaatgacttgggaagctcgacgtttacttaagacccttttcaaggtttag

SEQ ID NO: 119911 - DNA, 106 bp, Zea Mays
gctctcaaattcaaacaaatgcagcaaacaaaaatataccagcatgagatgcaaatacctaatgttattagttaatttactatcctattttaagcaaatgccttta

SEQ ID NO: 119912 - DNA, 550 bp, Zea Mays
ttcaattgtgatccttgtggcttggtgactgtggaaacacattgatggtgcctctccaaacagcaaccttgtcctgcaacatatccatcaagatgctcatatgtggggaatggctggggcagcagacattaggagactttggccttagtcctgggagtgcttgtttgctgctggttgtagtagtgtggtttttcatggacatttatgtgtatgcatgtgtttggccgccgtcaggaggccattttttgtactgtttttgctttataaggcctatttttgttcttaatataatgatgcgcagtcctcctgcattttcgagagaaaaaaatggaagactccacagctgcagatttaggattggaataccataactgagcatttgtagtttgtaaagcaactccatacaaggtttaattgtatcctcaatacatctttagataacttttactctgctatgattttattgtacgtgatatgcatatgtcggagtgaattctgcagggtacttcctatcaacaatgcaaaagattggctgcagtttgagtcaaga

SEQ ID NO: 119913 - DNA, 102 bp, Zea Mays
gggtgagtcaccttctctttgcagatgacagcctactattttttagtgcaagcaggaagaatgcggaggaggcgaggggtgcccttcgcccgtattgtcaag

SEQ ID NO: 119914 - DNA, 1721 bp, Zea Mays
aaaagaggagcccctttcttgcttccccacccacccccacctctctctcttacctttctttcttgcttccccgccatgcaaacatcgtcggaggtggtgacgacgaagaagaggatcgcgacgaccaccctcctcatgacgccgacgcccacctcctcctccacggacgaccactcctccacggccgtcatcaagcgcaagcagcgcaccaagaggccgcgcccctccgcgcccgcgtcatcgtccgagagcaccaccaccgaggaggaggaggacatggcgcactgcctcatcctcctggcagcgggcgccgcccatgcctccgatccatcgccggcgctgctgccgtcgtccacggcaccacaccagagccaggcgccgcccccgagggccgagaggtacaccagccgcaagtacacggaggcggccgccacgccggacggcgtcagggccggcttctacgtctacgagtgcaagacatgcaacaagtgcttccccaccttccaggcgctcggcggccaccgcgccagccacaagaagccgcgcctcgccgccgtcaacgtcgacggcaccaccaccaccaccacagcaacgacgatgaccgcgtcgccgtccccaccgcctcccctagctattgctgttcagccgccgcctccgcctcgccagacgacgccgatcgaattcccggacgtggccgtggccaccgcgctcagcctcagcagcagcagcagcgtcgcagccgccgcgagcggcaagccgagggcgcacgagtgctccatatgcggcgccgagttcgcgtcggggcaggcgctgggcggccacatgcggcgccaccgcccgctcaacgcgccggaccgcgcggtcaccgtcgccaccggtaacagtaacagtaagaaggaaggcatcaacctggagctggacctcaacctgccggcgccgtccgacgaggaagccgtcgtgtcgcttcttccgccgccggccgtcatgctcggtctcggccagttcaacgacggcagcaaggctgggcatatgctgacagcctcagcactggtggattgccattattgacgacatgagcgcggccctgcatctgcatgcctggccttagctagcagccagcctcatgaattcttttgcttgttaacaaacacgcaacgtactgattgatctctttaattcttcttcttctctctcctccttggggataaattaataggtctatcctcaactatacttacaatttattcctatatatcgatatattgggatcaatatattgggatatatataaatatgtatatcaatgaaactgatatatacaaaatttgattctttcaattctttgggtggcagccacttggaggagtagctagtgagtgtgtgggagcaagtagagtagtgagcagtgacgagtgagtggtgggtgttctctgaaatgtgatgaaagcaagggtagtggcaatgccatgccatgccaccactgttctcccaacttgaaactgagtgggtgcaatgttgtggcctgctactatcatatccaccttttccgcatgtccttctctgtgccaaaacatgtaactcatgatatacatacataaagtgtatacaaaaaaaagaactgctgtatttcatgtgtctgaattgaattttcagacaacttaattaccttagacaaccaattagtattagtaactcaccagagataaatcatatatatattt

SEQ ID NO: 119915 - DNA, 1016 bp, Zea Mays
cggcgatgcagagaggagagaggccgtcggtccggtcgggatggcccgcccagatcgacccggtccgttttttccctgagcccagttaatccagccaggtaaaaaggaaaaaaattaaaagcaactgcggcccgtcatctatctatttatccatcacgccgggccacgggtaacgacgggtcacacaggcagcacagccaggagccagcagcggcagctttccctctgtcacgctcacacgcctgcaggccggccagctccattgccaaccatcgtcgagcttgcagctcgctggtcgcatcgtccgtccaacgccacctatggccgccgctcctcctgcccggcaccggcaccggcaccggcacgcgctgcttatttttgttgttgttactgcagctgcagcaggagcagacgcgcagcatccgccgttgccggggttctacccgagcaagcgttaccgcgcgcgtcccttctcccgcgacttccgcaccctgtggggcgcgcagcaccagtcggtgtccggcggcggcggcggcggcggcgtgaccatctggctggactcgacgtccgggagcgggttcaagtcgcggcgggcgttccggtcgggctacttcggcgcgtcggtgaagctgcaggccgggtacacggccggggtcatcacggccttctacctgtcgaacgcggacgcgcacccggggttccacgacgaggtggacatggagttcctgggcaccacgccggggcagccgtacacgctgcagaccaacgtgtacgtcctcggctccggcgacggcgggcctggcagggtcgtcgggcgggaggtcaagttccgcctggactggttcgaccccaccgccgacttccaccactacgccatcctctggagccccacgcacatcatgtaagttcgaactagcttagtgaagtgagtgagtgttaactaataatggcgatgcaaatgcaagcggccggccaaccatgcatcaacagcgacagtgacagtgtacccgtacggc

SEQ ID NO: 119916 - DNA, 1542 bp, Zea Mays
cggcgatgcagagaggagagaggccgtcggtccggtcgggatggcccgcccagatcgacccggtccgttttttccctgagcccagttaatccagccaggtaaaaaggaaaaaaattaaaagcaactgcggcccgtcatctatctatttatccatcacgccgggccacgggtaacgacgggtcacacaggcagcacagccaggagccagcagcggcagctttccctctgtcacgctcacacgcctgcaggccggccagctccattgccaaccatcgtcgagcttgcagctcgctggtcgcatcgtccgtccaacgccacctatggccgccgctcctcctgcccggcaccggcaccggcaccggcacgcgctgcttatttttgttgttgttactgcagctgcagcaggagcagacgcgcagcatccgccgttgccggggttctacccgagcaagcgttaccgcgcgcgtcccttctcccgcgacttccgcaccctgtggggcgcgcagcaccagtcggtgtccggcggcggcggcggcggcggcgtgaccatctggctggactcgacgtccgggagcgggttcaagtcgcggcgggcgttccggtcgggctacttcggcgcgtcggtgaagctgcaggccgggtacacggccggggtcatcacggccttctacctgtcgaacgcggacgcgcacccggggttccacgacgaggtggacatggagttcctgggcaccacgccggggcagccgtacacgctgcagaccaacgtgtacgtcctcggctccggcgacggcgggcctggcagggtcgtcgggcgggaggtcaagttccgcctggactggttcgaccccaccgccgacttccaccactacgccatcctctggagccccacgcacatcatcttctacgtggacgacgtgccgatccggcggtatccgcggcggagcgagacgttcccgcggcggccgatgtgggtgtacggctccatctgggacgcctcctcctgggccaccgacgacggcaggtacaaggccgactaccgctacagccccttcgtagcgcgcttctcggggctgctcctccgcgcctgctcgccgcgcgccccgccaaggtgccgcgcgccaagcggcggcccgaccggcggcggcggcgatgcgctcagcccgcagcaggaggccgccatgcggtgggtgcagcgcaatcacatggtctacaactactgcctcgaccccaagcgagaccacagcctcaccccagagtgcattattcaccacgcagcagctggcgatacctactactagctaattacataattagatatatacatattcatcagcttatgtatgtgtctacgtaccatatgtcctatcgctatatatctctagttttgttgtaatattaaagagatgacatttgcttcagcagattctgagaaacacatgcatctgtatcccattatttacacgtggccccacattgtcatttgctaaagatacctatacatcatcctcctcctcctcttcttcctcttctcttcgtcac

SEQ ID NO: 119917 - DNA, 689 bp, Zea Mays
cgctgcagcatgcctttaactgacgcttgcttgcaagttgcacgacgcctggcctgccctgcccggtcgtcgcatctaatcattcagcagagccggatcactatactcacaatgtacgacgtacacatgcagcttctacgtggacgacgtgccgatccggcggtatccgcggcggagcgagacgttcccgcggcggccgatgtgggtgtacggctccatctgggacgcctcctcctgggccaccgacgacggcaggtacaaggccgactaccgctacagccccttcgtagcgcgcttctcggggctgctcctccgcgcctgctcgccgcgcgccccgccaaggtgccgcgcgccaagcggcggcccgaccggcggcggcggcgatgcgctcagcccgcagcaggaggccgccatgcggtgggtgcagcgcaatcacatggtctacaactactgcctcgaccccaagcgagaccacagcctcaccccagagtgcattattcaccacgcagcagctggcgatacctactactagctaattacataattagatatatacatattcatcagcttatgtatgtgtctacgtaccatatgtcctatcgctatatatctctagttttgttgtaatattaaagagatgacatttgcttcagcagattctgagaaacacatgcatctgtatcccatta

SEQ ID NO: 119918 - DNA, 1369 bp, Zea Mays
agtttaactgggcccccgtgtggcactggacttggtggggcccgtgtccatggtcgtctcccttgtccatcgtctatcttctcccccaaatcgcattctcatcgcaccgcacgagctacggatctgcggcccgacgactacgacgacggggaggtaggggacgaatcgttgcaagcaacgaggtcagaactaaggaggccgatccatcctccagcctccgatcccatccgacgacatggtctgcgtcgcgtgcctgctgccgctcttcctgatcccggtggtcaacgccctcccttacctcatcgacctcatcatcagcaaggtgtatcggctatttggatgggagtaccggagacctgaaagagtcccacctgcatgtccatacaagcctgcagctcagaagaacgatgagggtgcgagtgaatcaaaacccctggccgaaccgcacggtgctggtgctgcggcggcagaagataagaaagtggaatgatgcagcaggcgcttaaaatggtggccacggctctgtgtggttagctaagaaacaataattgttgtggatggttatgtacttggttgatgggttgaacttgttatgacactccggatccttaccagttgcattactaatcactgctgctggtctggtctgtctgaatagaagggagttgaacttgcagtcgcaaatgtaatagcgagagtgaatcttgttgtccaaggctttcgtatagaatataatgcttgaataatgagctcaaaattatgattttgtcatcaaaagcttggaaatgcttgaaagagatatcctggttacagaagctaacgttgagtacagtaggcagagattcggattccaacgtgaatggaatagctttatttatctgttcgttattctgctattcaactcgcaaggagatttgggcggatggagtggagatcacttggtatactcgaggacagcatagaaggggtcgagatagatggctcggaaggcggtgaagcctgcggcgtcgacgccgaggtggcggaactcctcctcggagcgctccctcccctgcgtccggtaggtggtcatgacgaagatgtcgttctccagcagcgccctcgtcctggtgctgctgtccgtctcctccggcaccaccggctcgcaggccacgagcttgccgccgtccggcagagcggcgtggcagttcctcaggatggccgtgcactcgtcgtcggtccacgtcgtcagaacccactgcatgcatggtcacagtctggacttgtaagagttgtgtttgcatgcagtgatgcagcagatgcaactaccgtaccgtaccttcatgaaaatggcatcaccggaggggatggacttgaacatatctccgcc

SEQ ID NO: 119919 - DNA, 211 bp, Zea Mays
tttgagttcatgtgacttattttagaaacttgagctcacaaactttctcttatctggtctctgtatggtggaattatgtcattttataatatatgttcgttcagtcagtcgttatgaaatctcttctaatcgctcacttcattggctgtgttgtactaagacatattggatgaagtaaataataacatcagttagccaaatcaaaaaaata

SEQ ID NO: 119920 - DNA, 2152 bp, Zea Mays
ccaaccgaacggacgtgacacgcacgcacggacgcacggcacgcggacacggcgcgcgcgcggcgactccgggctggggtctccctcttcccttccctcagatccaactccgtttctccattccctccctagcccagccagggaaccagtctcagtgaatcccgcgcccggatcaatctcgcccaaggaagcagctcttcacgacttgcttccagatccatccatccatccatccatccatccgaggttgggccgtgggggtgtcggtgcggtgggaaatggggaaggggatcagcggcgacgcccgcctcgccgcggcgccttacgaccagtgggtgctgctgagccccgccgggggctcgccgcgcccgcccgcgcgctacaagcatgctgcccaagtggttcaagacaagctgtacgttgtcggagggagtcgcaacggccgttctctatcggacgtccaggtttttgattttaagacatcctcttggtcagcgttaagccctgctagaggctcaaaacatcccaaccatgaaaatgatgccacaggtggatcgttcccagcattagcaggccacagtatggtcaagtggaaaaactatctcctggccgtagctgggagcacaaggtcgtcatcatcattaaataaggtttcagtttggcttattgatgtgcaagccaatagctggtctgctgttgaaacttatggaaaagttccaacagctcgagatggccaatcagtatccatacttggttctcgattactgatgtttggtggagaggataacaagagaaggctactgaatgatcttcatatacttgacttggagacaatgatgtgggaagaagtcaaatcagagaaaggtggtccagctcctaggtatgatcattcggctgctgtttacgctgaccagtatcttctgatctttggtggctcttctcactctacatgcttcaatgatctttacctacttgacttgcaaactctggagtggtctcaacctgatgcccaaggagcacacataactcctagaagtggtcatgctggtgctatgattgatgaaaattggtacattgttggcggtggagataatgcaagtggttccactgatacagttgtaattaatgcttccaagtttgtgtggtcagtggtcactagcgtctcagctagagatcctctagcttgtgagggtctcaccctttgctcaaccacagttgatggcgaaaaagttctaattgcctttggcggttacaatgggaaatacagcaacgagatctttgttttgaaatccaagccaagaaatttagtccaacctcgtcttcttcaatcagcagctgcagccgccgccgccgcttctgtgacagctgcctatgctgtaattactgccacagatgagaaaaccagagatattgttgctacagatgattttgatatcaagagagctcaacctgcaagtaattccaaaaagtttgttgctgaaattgatgtacttaatggagagaatggtaaactagcggctagattggcagaggttcgcgatgaaaactcaaaactaaaggataaattagacatgacaaacttgtcatatggtgaattagcaaaggaacttaaatcagttcaagatcaactagcagcagagggttcaagatgccagaagcttgagtcccaaattgctgctgcacggaagagactggaatctgctggttctttggagaatgaactagaagtattgcatcaacatatatctcaggtggaggaaaccattgcaactactcagagaagaaaatctgggggtgtttggaagtgggtggcgggtagtacagaggtctctgacgatgaatagtaagtcctatctgcagcatgcttggatggaacaatgctttatgtactcaggggttccgctacagttgtagctttatattttctatttcgcacgacctttttggtcagaaacttgtttaaatagagttttaactcatgaattgtctagagcacagtagcacactgcatcatgctgttgctaagttgtactctgtttcaaattgtaagtcgttttagtttttttcctaagtcaaatatgtctaactttggccaagtttatagaattagcatctacaatatcaaatatgcactatcaaaatatatttcata

SEQ ID NO: 119921 - DNA, 2183 bp, Zea Mays
ccaaccgaacggacgtgacacgcacgcacggacgcacggcacgcggacacggcgcgcgcgcggcgactccgggctggggtctccctcttcccttccctcagatccaactccgtttctccattccctccctagcccagccagggaaccagtctcagtgaatcccgcgcccggatcaatctcgcccaaggaagcagctcttcacgacttgcttccagatccatccatccatccatccatccatccgaggttgggccgtgggggtgtcggtgcggtgggaaatggggaaggggatcagcggcgacgcccgcctcgccgcggcgccttacgaccagtgggtgctgctgagccccgccgggggctcgccgcgcccgcccgcgcgctacaagcatgctgcccaagtggttcaagacaagctgtacgttgtcggagggagtcgcaacggccgttctctatcggacgtccaggtttttgattttaagacatcctcttggtcagcgttaagccctgctagaggctcaaaacatcccaaccatgaaaatgatgccacaggtggatcgttcccagcattagcaggccacagtatggtcaagtggaaaaactatctcctggccgtagctgggagcacaaggtcgtcatcatcattaaataaggtttcagctcgagatggccaatcagtatccatacttggttctcgattactgatgtttggtggagaggataacaagagaaggctactgaatgatcttcatatacttgacttggagacaatgatgtgggaagaagtcaaatcagagaaaggtggtccagctcctaggtatgatcattcggctgctgtttacgctgaccagtatcttctgatctttggtggctcttctcactctacatgcttcaatgatctttacctacttgacttgcaaactctggagtggtctcaacctgatgcccaaggagcacacataactcctagaagtggtcatgctggtgctatgattgatgaaaattggtacattgttggcggtggagataatgcaagtggttccactgatacagttgtaattaatgcttccaagtttgtgtggtcagtggtcactagcgtctcagctagagatcctctagcttgtgagggtctcaccctttgctcaaccacagttgatggcgaaaaagttctaattgcctttggcggttacaatgggaaatacagcaacgagatctttgttttgaaatccaagccaagaaatttagtccaacctcgtcttcttcaatcagcagctgcagccgccgccgccgcttctgtgacagctgcctatgctgtaattactgccacagatgagaaaaccagagatattgttgctacagatgattttgatatcaagagagctcaacctgcaagtaattccaaaaagtttgttgctgaaattgatgtacttaatggagagaatggtaaactagcggctagattggcagaggttcgcgatgaaaactcaaaactaaaggataaattagacatgacaaacttgtcatatggtgaattagcaaaggaacttaaatcagttcaagatcaactagcagcagagggttcaagatgccagaagcttgagtcccaaattgctgctgcacggaagagactggaatctgctggttctttggagaatgaactagaagtattgcatcaacatatatctcaggtggaggaaaccattgcaactactcagagaagaaaatctgggggtgtttggaagtgggtggcgggtagtacagaggtctctgacgatgaatagttgacaagcagcttccgaacaggaaacgtaagcggaggatctgctacagttttgaggcagcttgtctgttgccagttgccgggtgcttcctcaaggtcttgctcatggttgatctcgaaaatatgtctcccgaaataatcttgtttatcttcttcggtggtggcacctggtagaaaattttcctgggcagtcttagacattaattcaacagtaaaagcataacatcatgcaagtataccaaatactgagagcgtatcgcattggattattagcagcgctttgtttttgtcgtctggtacctattttttggctggcggttattacaagagcggtctcatattataaattattatatagggcgttcattggttgtgacgctgggaattgaggaaatatacattgctt

SEQ ID NO: 119922 - DNA, 2287 bp, Zea Mays
ccaaccgaacggacgtgacacgcacgcacggacgcacggcacgcggacacggcgcgcgcgcggcgactccgggctggggtctccctcttcccttccctcagatccaactccgtttctccattccctccctagcccagccagggaaccagtctcagtgaatcccgcgcccggatcaatctcgcccaaggaagcagctcttcacgacttgcttccagatccatccatccatccatccatccatccgaggttgggccgtgggggtgtcggtgcggtgggaaatggggaaggggatcagcggcgacgcccgcctcgccgcggcgccttacgaccagtgggtgctgctgagccccgccgggggctcgccgcgcccgcccgcgcgctacaagcatgctgcccaagtggttcaagacaagctgtacgttgtcggagggagtcgcaacggccgttctctatcggacgtccaggtttttgattttaagacatcctcttggtcagcgttaagccctgctagaggctcaaaacatcccaaccatgaaaatgatgccacaggtggatcgttcccagcattagcaggccacagtatggtcaagtggaaaaactatctcctggccgtagctgggagcacaaggtcgtcatcatcattaaataaggtttcagtttggcttattgatgtgcaagccaatagctggtctgctgttgaaacttatggaaaagttccaacagctcgagatggccaatcagtatccatacttggttctcgattactgatgtttggtggagaggataacaagagaaggctactgaatgatcttcatatacttgacttggagacaatgatgtgggaagaagtcaaatcagagaaaggtggtccagctcctaggtatgatcattcggctgctgtttacgctgaccagtatcttctgatctttggtggctcttctcactctacatgcttcaatgatctttacctacttgacttgcaaactctggagtggtctcaacctgatgcccaaggagcacacataactcctagaagtggtcatgctggtgctatgattgatgaaaattggtacattgttggcggtggagataatgcaagtggttccactgatacagttgtaattaatgcttccaagtttgtgtggtcagtggtcactagcgtctcagctagagatcctctagcttgtgagggtctcaccctttgctcaaccacagttgatggcgaaaaagttctaattgcctttggcggttacaatgggaaatacagcaacgagatctttgttttgaaatccaagccaagaaatttagtccaacctcgtcttcttcaatcagcagctgcagccgccgccgccgcttctgtgacagctgcctatgctgtaattactgccacagatgagaaaaccagagatattgttgctacagatgattttgatatcaagagagctcaacctgcaagtaattccaaaaagtttgttgctgaaattgatgtacttaatggagagaatggtaaactagcggctagattggcagaggttcgcgatgaaaactcaaaactaaaggataaattagacatgacaaacttgtcatatggtgaattagcaaaggaacttaaatcagttcaagatcaactagcagcagagggttcaagatgccagaagcttgagtcccaaattgctgctgcacggaagagactggaatctgctggttctttggagaatgaactagaagtattgcatcaacatatatctcaggtggaggaaaccattgcaactactcagagaagaaaatctgggggtgtttggaagtgggtggcgggtagtacagaggtctctgacgatgaatagttgacaagcagcttccgaacaggaaacgtaagcggaggatctgctacagttttgaggcagcttgtctgttgccagttgccgggtgcttcctcaaggtcttgctcatggttgatctcgaaaatatgtctcccgaaataatcttgtttatcttcttcggtggtggcacctggtagaaaattttcctgggcagtcttagacattaattcaacagtaaaagcataacatcatgcaagtataccaaatactgagagcgtatcgcattggattattagcagcgctttgtttttgtcgtctggtacctattttttggctggcggttattacaagagcggtctcatattataaattattatatagggcgttcattggttgtgacgctgggaattgaggaaatatacattgcttataccgtaaatttagaaacatttatctggtaacatata

SEQ ID NO: 119923 - DNA, 2197 bp, Zea Mays
acggcgcgcgcgcggcgactccgggctggggtctccctcttcccttccctcagatccaactccgtttctccattccctccctagcccagccagggaaccagtctcagtgaatcccgcgcccggatcaatctcgcccaaggaagcagctcttcacgacttgcttccagatccatccatccatccatccatccatccgaggttgggccgtgggggtgtcggtgcggtgggaaatggggaaggggatcagcggcgacgcccgcctcgccgcggcgccttacgaccagtgggtgctgctgagccccgccgggggctcgccgcgcccgcccgcgcgctacaagcatgctgcccaagtggttcaagacaagctgtacgttgtcggagggagtcgcaacggccgttctctatcggacgtccaggtttttgattttaagacatcctcttggtcagcgttaagccctgctagaggctcaaaacatcccaaccatgaaaatgatgccacaggtggatcgttcccagcattagcaggccacagtatggtcaagtggaaaaactatctcctggccgtagctgggagcacaaggtcgtcatcatcattaaataaggtttcagtttggcttattgatgtgcaagccaatagctggtctgctgttgaaacttatggaaaagttccactcgagatggccaatcagtatccatacttggttctcgattactgatgtttggtggagaggataacaagagaaggctactgaatgatcttcatatacttgacttggagacaatgatgtgggaagaagtcaaatcagagaaaggtggtccagctcctaggtatgatcattcggctgctgtttacgctgaccagtatcttctgatctttggtggctcttctcactctacatgcttcaatgatctttacctacttgacttgcaaactctggagtggtctcaacctgatgcccaaggagcacacataactcctagaagtggtcatgctggtgctatgattgatgaaaattggtacattgttggcggtggagataatgcaagtggttccactgatacagttgtaattaatgcttccaagtttgtgtggtcagtggtcactagcgtctcagctagagatcctctagcttgtgagggtctcaccctttgctcaaccacagttgatggcgaaaaagttctaattgcctttggcggttacaatgggaaatacagcaacgagatctttgttttgaaatccaagccaagaaatttagtccaacctcgtcttcttcaatcagcagctgcagccgccgccgccgcttctgtgacagctgcctatgctgtaattactgccacagatgagaaaaccagagatattgttgctacagatgattttgatatcaagagagctcaacctgcaagtaattccaaaaagtttgttgctgaaattgatgtacttaatggagagaatggtaaactagcggctagattggcagaggttcgcgatgaaaactcaaaactaaaggataaattagacatgacaaacttgtcatatggtgaattagcaaaggaacttaaatcagttcaagatcaactagcagcagagggttcaagatgccagaagcttgagtcccaaattgctgctgcacggaagagactggaatctgctggttctttggagaatgaactagaagtattgcatcaacatatatctcaggtggaggaaaccattgcaactactcagagaagaaaatctgggggtgtttggaagtgggtggcgggtagtacagaggtctctgacgatgaatagttgacaagcagcttccgaacaggaaacgtaagcggaggatctgctacagttttgaggcagcttgtctgttgccagttgccgggtgcttcctcaaggtcttgctcatggttgatctcgaaaatatgtctcccgaaataatcttgtttatcttcttcggtggtggcacctggtagaaaattttcctgggcagtcttagacattaattcaacagtaaaagcataacatcatgcaagtataccaaatactgagagcgtatcgcattggattattagcagcgctttgtttttgtcgtctggtacctattttttggctggcggttattacaagagcggtctcatattataaattattatatagggcgttcattggttgtgacgctgggaattgaggaaatatacattgctt

SEQ ID NO: 119924 - DNA, 565 bp, Zea Mays
tctgcaactttttttccctattcatatcatgaacttacggactgcttccatacaatctgatagtagaaactatcagctcttgctgtataactcaacatttgatactagaaatttcgactgactaatcatgcttcatcaggttgacaagcagcttccgaacaggaaacgtaagcggaggatctgctacagttttgaggcagcttgtctgttgccagttgccgggtgcttcctcaaggtcttgctcatggttgatctcgaaaatatgtctcccgaaataatcttgtttatcttcttcggtggtggcacctggtagaaaattttcctgggcagtcttagacattaattcaacagtaaaagcataacatcatgcaagtataccaaatactgagagcgtatcgcattggattattagcagcgctttgtttttgtcgtctggtacctattttttggctggcggttattacaagagcggtctcatattataaattattatatagggcgttcattggttgtgacgctgggaattgaggaaatatacattgcttataccgtaaatttagaaaca

SEQ ID NO: 119925 - DNA, 230 bp, Zea Mays
gtcaacacatagtattaaaaaatgggcacggtaacaggctaacacatgacagttccttcacaggaatttccacgaacacaaggcacacaccagcaaatcgaccaactacacccgaagtttccaactaacaacatagaggaattgatcaacagaacaacgacgccccttttagagatggaaagggggttagggttttaaacattcctggtcgccgcactggccaccggggg

SEQ ID NO: 119926 - DNA, 867 bp, Zea Mays
ccatcaaagaactagaagactatttgcaaaagtaggagaaatatgcttcctacttaagtagcatggttaatttgtgcacatctgttttgttgaatcatcggcttggaaaattaactaccacaacgggaacaaaatcactgatagcacaacaaaatagaacaagtctatgaagatacatactttattgttgctccacctttaccaattataccaccacaagagctattaggaactacaagtctaactttaggtctagcttctgcttcgttgaattcttcaccctggtaaaataactggagaacatcaatcatcaatcctgaatcagtcgcttgaaaaataaaaatgctttacctcagccaacagtttctcaagaatcagctccatggccttcattacttcatcaaacagtccagaaaccatgatgattctgtcatttgtaccagggaaaaactcattgctacgtgataactgaatacgagccccagactgggactgaaaatcattaatggttgatccacccttgccaatgatgcaccctgctgccgtattagacactagaaatctcaaatgtgttggcgcgtggcagttacctccttcctcggagggagactgctgctgctgcggaggggagcgtggggcacgcttgggggcggattccggcgaggaggcgtagggggagcccggggcttccatccttcctgctgtggggcggggcggtggggggcggaggtggaggcggtggggggcggaggcggatgcaggaaactctagctagatctctctgggcctacaccatggatttccaagtgaagaaaggagagggaggggggctggttgggcctttttggacttcaatatccggccttc

SEQ ID NO: 119927 - DNA, 1176 bp, Zea Mays
atggtgtatcgtactttcccaacaatttgggcagtgggcagtttgctgggtacatctattgatgtggacatgaaacacaccaggcagtttgaggttggtagagttcaagttatgattcttgatgctaatcttattcccagcacggtggaggtggtaatcggggaggaagtataccttctgtccttccgggttgaagatgggaatggggggcttcggcctgagacggataatgatgaaaaggggtttaacgatgatgaagatgacctgttgggggatgatgatggtaatgatctcaatggggctggtcctggtcagcttggaaagatgggtgatcgggctccagctgctgccactgggggaacaattacccatcattccaagtctggaattgctcagggggctgctttggatgatgaaagtggaatggggttagtggctgtgtcgggtgcgcagcaagtggcacaagacggggcagtggaaccgaaccgcagtgggtcctgttgcgctcaagagttggctgccattcctgaaatgctggcgggcagcaagtccacccggtctagcaaaagaaggggcgcgtcaatggacgaatcaactctggagcgggcggaaaggcttaaggcgcgactgaatgaaggtaattctaagtatttttttgctttaacttcaaggcaagttgcgtcttacttaaacactattgggtttttgttgagtgatgatagtcatggggttgacattgttatgtctaaactgcgggctagccatgtgggatctgtccgggaccatggggtggctcgggactgtttcgaggaggccttagaaacggaagagagggaaatggcagtggaggaaacgcttgataggttgcttctgaaagacctatgtggtgagctcactgaggaagttttggaaccgatcttagataaagataagattgaagttccatctgccttatctaccaggaaatctaaaactgggggtgggggtgcatggcatggggaagaaacaaatcctcagaagaagaaaaatacactaccgaatgagcaggctgagtgcatactgctattgcaggtctcagcaagagagatctgcatgaggttcttcaggagggggtcaggcttctggttcgtgcagcaagcgtggggccctgaagatgatgcgaggatggacagctga

SEQ ID NO: 119928 - DNA, 673 bp, Zea Mays
aagaggaagaataagaaccccatcggttctggctctgattaacccgattcctaacattattcgatctgaatacactggcttattacacgtagaaatacgatgatatacacctcctttttttgttgttttgtttcttatgtctgatatatacatacatggtgtgctactccataatgcacagatttcttactaaaagcagagaatgaatgtatgtatgtatgtacgtgcatcccaaaacgcctccagctccgagcaagcgagcaccatgctgatctatctatctatctctggtgctacgcttctccaccattttacaggacaggaggagaaggaggagtagtagcggtcgccgtcgccgtcgcaatcgccgttcaccgctgctttccttctgtggtggacgccgttgggcggcttgacggggtcttgattcgccgcgtcgtcgtagccggccggcacctgctgggactgggcgcgtcggaggaggaggtgcgacatggtggcgggcgagaagcggtgcgacgtgacgtcctcctcctcgacgacctcggtgggcacggcgaccacctcctgggctccggcggcgggcttgcatccgccgtccagctggttccagtagagggcgagcaggatggcggcgttgactacggagccgacgagcgtggccgggaggatg

SEQ ID NO: 119929 - DNA, 666 bp, Zea Mays
ctgaattgttttgagattggaattgtggttatggtttattttttttcccaaaactgttttgcttcttaacctaaaactattaggccatgttcgtttaggccgttccccgccgggaaccgcggccaaacctcgtggatccctccccatggaaataagcccggcccacagaaaaacaagcgttcggttacatcccacgtgggctgtatccagatcgttcctcgtcattctagcccgggaaacacgcccggtcgaccggggggtggaaaatatcctagcctggaccgcaagcgaacgcgaagggcacgcgacttctcgtcggcgtcgatctgctccgacgaccgcttctcatcgttgtagacttccaggggtcgagttatgtatgaagtagctccaatctttagaggaagaatgtcttctcaacgggttttatgtacttgttctatcaaagagtgagatgaatcattatctagatctatgatctcgtcatgtttagtacactggaaatgtattcttttgcaacttattagtgttaacataccatgagataattgtgcaggttgtttgaaaaggcattaatattgagctgactgaattattttgatattattgtgattgtttaaaatcgcatgttcagtgcacctgtttgaaacgtgtactgaatgttag

SEQ ID NO: 119930 - DNA, 153 bp, Zea Mays
ttttctttttcataattctttttttcttttctacaattctttttttctttactacaatttagctattaatgtttacttgttttaattaatttttagtcactaaaatctacaggtacgttcatgctataagatttgatagtgatccttgctcta

SEQ ID NO: 119931 - DNA, 247 bp, Zea Mays
atggcggccgcctccgcgttcgggtcgtcccccggagatggagcggttcctctgcgagaggctgcttgatgcggaggaccccatcgcggagcgcttccgggcgttcttctccctcggtccctccgcaacctccgcggggatgcgccgcgccctcatctaaggtatcgcctcgcttcactgagtcggctttgctactcttcaaagcctggtggaaggctttagcggcttgcgggttggttttagcaac

SEQ ID NO: 119932 - DNA, 680 bp, Zea Mays
aaagatatttctcaagtcgcagctggaggccccttgtgaaacgcctggaaatagctgctcggcgctacagagttccatgggcgcagactgccattgacatccttgcgaagcgcgcatactcccacgagacgaggatcagctgtggttgctcggctaaggtggtcagtcggcagagccgttggtgtctgtctgatccccgcttctcccccttggcaggcgggcgtagcatgatgatctggttgggttcaacaaggacggcgctcgcctgatccatccattgcctatgcctggcctgggactcccatggtccatggatttcggtgcttgtgatgaatgcggacgacgccagggtttcttctttgggcttcggcgagcgacacgggcgtgggagctgctgtttttgtgcttggatttccgtagaggagggttgacatgacatggccatcaccatccccatgcatgacctcatacatcagctgactgactggatgtgttggatgcatctgcatcccttacagttgcgttgcgatgccaagctaagcttgcaggtacctgtacaccgtatggtaggtgggtgggtggtgcctgtactgtacaccgtatggtgtgatatagagaagggggttgacttgaagaaagtacagtagagaaagagagcaaatgttttttggttttgatga

SEQ ID NO: 119933 - DNA, 959 bp, Zea Mays
gcagcgcgcaagtcctaccatagcaatatagcatagctagcacatcggagacgatctatcgactagctctatagctagttagctcttcctttgctagccgtttgcgccagtgactgacgacgaccgacgacatggccaacggaggggccgccgctgccgctgccgctgctgctgccgcgacgggcgcggggtctccgtgcggcgcgtgcaagttcctgcgccggcggtgcgtgccggagtgcgtgttcgcgccctacttcagcagcgaccagggcgccgcgcgcttcgccgccatccacaaggtgttcggcgccagcaacgcctccaagctgctgtcccacctccccgtcgccgaccgctgcgaggccgtcgtcaccatcacctacgaggcgcaggccaggctccgggaccccgtctacggctgcgtcgcccagatcttcgccctccagcagcaggtcgccatcctgcaagcgcagctgatgcaggccaaggcgcagctggcgtgcggcgtccagggcgccgccgcgcactcgccggcgagccaccaccaccaccagtggccggacagcgccagcatcagcgccctgctccgccaggacgcggcgtgcagtgccaggaggaccggcgggcccctcgacgacttcttcactccggagctcgtggccgggttcagggacgacgtcgccgccgccgccgggcagcattgcgcaggcaaggtggatgccggagagctccagtacctggcccaggccatgatgaggagccccaactactccctgtagccgtagctgtagctgcctaggaaggatgatgagaatcagacaccatgcgttttggagccatgccatgctgtgccatctctcatctcgatctccactccgctaatgcaagtgttgagagatgagctagaaattcctgcaaaaggaagttaacaacttgtaccagctagtgatgaagta

SEQ ID NO: 119934 - DNA, 1899 bp, Zea Mays
cgttttgtttggtgacatttccatcccaccaccaccactccaccagcaggtctgcttgcttgtgtttggtggatctgaatcaccactcactcccacctgctcgccatctccccttctctctctccctgctgccgtgcggctccagctccagctgcaggcgcgggagaggggccgcatcgacctccccaatccccatggccgctaccaagatccttgacaggctcaaggtgggggcttcacctccagcgcccggcggcgcgctcccgctcaccttcttcgacgtgccgtggctcttcacgggccccgtggagcgcgtcttcttctacccctacgcgcacacggcggaccacttcgccgcccacctcctgccgtccctcgtctcctccctctccgccacgctgcgcgcgttctacccgctgctcggccgcgtccgcccgtgcccggacggcggcggcgggtacgaattcttctgctccgacggcggcgaggccgtcgagctcatcgtcgccgagagctccgacgacttcgacgagctctccgccggcgggccgagggacgtcgcccggctctacgcgctggtgccgcggctcccgtcgcccggggccgacggctccttcgccctcgcggcggcgcaggtcaccgtgttccccgcccgcggggtcgccgtcggcgtgtccatccaccacgtggcctgcgacgactccagctacacgcacttcatcaggacctgggccgcccagtgccgcgtggctagcggcggcgcggacgcggtgccgccgccgcctttcctggaccgtggcgtggtcgccgaccccgagggcctcgccggcaggacgctcgacgaaatgcgccagctggcaggcaacggcccgcctccgcctccgccgccggcggcaggcccacagccgaagcttgtcatcgcgtcgttcgcgctcacccgcgaccgcatcgacgcgctgaagcggcgcgtggccgccaaggtcgcggcggacggcggcggcacgggccgcgtccactgctcggcgttcacggtggcgtgcgcgctggcgtgggcctgcctggcacgcgtgggcggcggggagcggccccgcgcgcacctgctgttctcggtggagtgccggcgccgcctggcgccgccgatcccgcaggagtacctgggcaactgcctccggccgtgcttcgtggaggtgggcacgggcgagctgctgggcggcgacggcgtggcggctgcggccgcggcgatcggcgcggccgtcgcggcgctcgacggcggcgtgctggatggggcaggcgggtggttccacaagatcctgtcgctggtcccggagcgcccgatgtcggtgggcgggtccccgcggtacggtgtgtacgagactgacttcgggttgggccggccggccaaggtggagctggtgtccatcgacaagacgcccggcacggtgtccctggcggaggcccgcgacgccggggtggaggtcggcgtcgtgctgcaggaggccgagatggcgcgcttcggctcctgcttcgccgatgcactggaggtgctctgtgacagtgtgactgaactgaactgagcggcatcgacgatggcacctccattttcgagaagctggtcatcagctcgcgattacatgtaatggagctcgcgaaattacactacatgaagtggtgtttaaggagtagtataataagaaaatatagggataagagagatgatccgaagtgtatatttgagggagggatgggtatattttcatatttgcgtggagtaatctcgtatgcgagaatatcaattgtgtgattgataaaaaagaagggttcattgattcgtgctattatagtttttgaagttatgagatttgttattataattatctattttgaaatttggcattacaa

SEQ ID NO: 119935 - DNA, 3649 bp, Zea Mays
cccccgcctcgccctccccgccggcctgcgccgccgcgagcaagcaaccgctccatcgcccaccatggcgctacgccgcgtcgcctccgttctcctcagaacccgcctgcgaggccccgtcacgtcccccgcgcgcaaagccctcgtacaccctctccaagcgccgccccgccgccaattctcgccgcggccgcctcctcccgtccccttcgccgccgccgccgccgcggatgccgcggaagaggcgttcgaggcagcgaggtcaactaacgacatgctcgctgcattctcccgcctcgaggccaccgtgcccgccaacgacaagcgcctcgccctcgcctgcctcaagctcggccagcacctcgaggcgtccggctccgccgacacgtcccgcgtcctcgcgcttgccctccggtgcctgggcatactcgaggccagccccaacgcctccaccccctcctccgcctcggacgccgtctcgctcgccatggcactccacctcgccggctccgcctccttcgacctctcccgcttccacgacgcgttgtccttcctctcccgcgcgctacgcctcctcgccccgctcctccccgaaacaggcgtcgcgttcgaggttggggaggaaccgggagggttcgacgtcaggcccgtggcgcacgcggtgcggctgcagctggccaacgtgaagacggcgctggggaggcgggaggaggcgctcgccgacatgcgcgcctgccttgacctcaaggagtccattctgcctccgggcagccgggagctgggagtcgcgtaccgggacctcgcggaggcgcacgccaccctgcttgacttcaagcaggcgctgccgttctgccagaaggcgctggagctgcatgagtcgacgctcggcaagaactccgtggaggttgcgcacgacaggcgcctgcttggtgtgatatacactgggctagagcagcatgagcaggcgctggagcagaacgagatttcacagagggtgatcaagagctggggtgcagctagccctgacctcctcctacatgctgagattgatgcggcaaacatcaatattgcattgggaaagtttgatgaggctgtcagcgtgttgaagaatgtcgctaagcaggtgaagaaggatagcgagacgcgagctctagttttcatatcgatggcgaaggcgctcgctaaccaggagaaggctggggacacaaagaggtgcttggagattgcttgcgacatcctggagaagaagaaattcgcgacacccgacaaggtggcagagatgtacatagaggtatcctcactgtttgagacggtgaatgagttggaaaaggcaatatctttgctgaagaagagcctgggaatgcttgagaggatgcctcaggcacagcacctggagggcaatgtcgcagcgaggattgggtggctgttgcttttgactggtaaggtctctgaagctgtcccgtacttggaggatgcagtggagaggatgaaggacagcttcggtccgaagcattatggagtagggtatgtgtataacaacttgggtgctgcttacatggagatggaccgtccgcagtctgctgcacagatgtttgcgctcgctaaagaagtcatggatgtctccttagggcctcaccattcggataccatcgaggcttgtcagagccttgctaatgcctacaatgctatgggaagctatcccctggctatggaattccaaaagagagtgatcgattcgtggcgaaaccatggcgccgatgccagggacgagctgaaggaagctatgagactctacaaccagatcaaggcaaaggcactggcatgcctatcgcccggaggttcagctaacgcgttgcctgaatctcaggagcaggaaacagattctgatactgccaaagctgctcaacggtagaccttcgctagttttgggttgaaggatttggagttctcttgctggttggtacatgatgtagtgttagatatttggatatcagaaaatcaacgtctggtgaactgccggctccctccctgcagcgcaaggaaaggaaagacctgattagtcaagatatgatgtgttcatcaaggcagaaatgtccgcgtgccatgtgtgtgtgtgtgttttaatgaaccagtatttggtctggtgaggcatttaggtatagtgttaagcatttttttttcaaattttggtacagactttcagcgatacattcttaaacaggataggcaggctagtattccagcgcaccggccggtcatggtcttctccgctgcacccccagttcgcgcccgacaagatccaaagcgggcttctcaggcggaaggaaagaccgccgcctactgctcgtcgagctgcgccgtctagtcgccactgctgcctgagaaatcacgatcgacgctcccttcaattgcctactactcgtacactgctgtcgctgtcatgatcatctctacctacggctacgggagtccctgtccgttcctctgcaagatgctctgaacctcctcgccaccgtcaccgtccgtggagaaggacctcgtcctcggtgcaacatctccatccttcctcctctccttttcaccaccgacctgaggaggatcttctccttcaacctcggcagcagcagcaggagccacggtggtttctcgctgccgctgtggcaccgtgccttggcggtcgtcttcctctgcgccggggacgacgacgacgacctggatggccgctacgtcctcctcctcctcgggtggcggcggcgggagcaggcggcagcagctggcggcatcgacgtccgccctggccctgcagagcgggcagctggcgttgccctggagccaggcgtcgacgcagccgacgtggaagacgtggaggcaggcgggcagcatcctcacgctgtctccctcctcgaactcgccgaggcacaccgcgcactcgctcgcgggcgcgggtgcggacggcggtaagtcggcgggcttcttcctgtaactgaacgccggcagcgcccggatgacggcgtcctcgaggccgcgcggctcggcgctggaggccggggtgccgccagtgctggtgcggacgcgggcgcgggcgcgctgggggcggcgggagacggcgtcggacgcgctacggtcgcggtgccaggtgaggcagcagcggatgacgaagacgtagtaggcaaggatgaggacgcaggcggcgaggatgcccagcaccgtgagcacgaggatcgggaagctggtgatggatggcgcgtggcgcgaggaggaggaggaggaaagggagagggaagaagatggcaatgccgccgccgccggcggcggcggggggaagagcagagctagcgccgggacctgcggcaccgggaagatggtggcgctgctgccccggcccgcgtccatcggatgcaggcaggcagacagctagcagagtgagaacggtgtcggggacgatggtggcgtggccctcgcatccccattgtccatatatgtaacgtaggggaatgcagcgcagcagtgtcggggtcttgcattgggaaggtaggcgggaagcagggatggtgaggttggaaaaaatccacaggcatggtggtcttctagaaggaccctccaatgcgaggatcggagacgacgaccaaagtgcgcgtactggcgtgtc

SEQ ID NO: 119936 - DNA, 1550 bp, Zea Mays
gaattagctcattgaagagagagagagagagagagagagaggggagacccattaccaatgccaagaacaagaaaccagagaggacagccgcgaatacaatccgaatcccctccaaaaacccaccataccgtctcccccatctgcaagaacaagatcaggagagcatcctagggggaagaaacaggagggggaaaaagaagcccagaaagaccaactgaccaaacaaaaaggtggcatctttgtgtcaccgaggcaccgccgatcacagaccaaagcccgctcctctggtccatcccaagcgtacagcagccgagatttcttcgatctgcgcttgcgtttttttttcttgtaaagattttagttttccccccttcaactgttgctagccttgagtcgctgagaagtttcgagaagggtggtgtgagtgtcggatagctcaagatggatccggcgttgctggacgacgtcatacgccggcttctggaggtgaagaatctcaagcctgggaagaacgcgcagctgtcagagtcggagattaagcagctctgcgctgccgccaaggagatcttcctgcagcagcccaacctgctggagctcgaggcccccatcaaaatctgcggtgatgtccatggccagtactctgatctcctgaggctatttgattatggtggctatccgcctcaggccaactaccttttcttgggtgattatgtggatcgtggaaagcaaagcctagaaacaatatgtcttcttttggcttacaaggtcaagtacccggagaacttctttcttctaaggggcaaccatgaatgcgcatcagtaaatcgcatctatggtttttatgacgagtgcaaacgcagattcagtgtaaagctgtggaaaacattcacagactgttttaactgcttgccagtgtcagcattgatagatgaaaagattctctgtatgcatggtggtctatctccggagttgaacaagcttgagcaaatactcaacctgaatcgccccacagacgtgcctgatactggattgctctgtgatcttctttggtctgatccttccaatgaagcaacaggctgggccatcaatgatcgtggtgtttcattcacatttggtcctgataaagtttctgaatttcttgagaagcatgatttggaccttatctgccgagcacatcaggttgtcgaagatggatacgagtttttcgctagccgtcaactcgtaacaatattttcagcccctaactactgtggagaattcgacaacgctggtgccatgatgagtgtagatgatacattgatgtgctcgttccaaatattgaagcctgcaaggaagatgatgggtggttcaactaataacaaatctggcttcaaggtatgcatgattaacatggaagcagtttatatcagtcggataaaacacgatatgttgccctacaaaattgtttggtccctaccctctggatacaagtagccttcttaattttcaaaagaattataaattgatcgtgtggtgtgctagtgttactatttgcttcaaaatgatgtagc

SEQ ID NO: 119937 - DNA, 1675 bp, Zea Mays
agagagagagagagagagagaggggagacccattaccaatgccaagaacaagaaaccagagaggacagccgcgaatacaatccgaatcccctccaaaaacccaccataccgtctcccccatctgcaagaacaagatcaggagagcatcctagggggaagaaacaggagggggaaaaagaagcccagaaagaccaactgaccaaacaaaaaggtggcatctttgtgtcaccgaggcaccgccgatcacagaccaaagcccgctcctctggtccatcccaagcgtacagcagccgagatttcttcgatctgcgcttgcgtttttttttcttgtaaagattttagttttccccccttcaactgttgctagccttgagtcgctgagaagtttcgagaagggtggtgtgagtgtcggatagctcaagatggatccggcgttgctggacgacgtcatacgccggcttctggaggtgaagaatctcaagcctgggaagaacgcgcagctgtcagagtcggagattaagcagctctgcgctgccgccaaggagatcttcctgcagcagcccaacctgctggagctcgaggcccccatcaaaatctgcggtgatgtccatggccagtactctgatctcctgaggctatttgattatggtggctatccgcctcaggccaactaccttttcttgggtgattatgtggatcgtggaaagcaaagcctagaaacaatatgtcttcttttggcttacaaggtcaagtacccggagaacttctttcttctaaggggcaaccatgaatgcgcatcagtaaatcgcatctatggtttttatgacgagtgcaaacgcagattcagtgtaaagctgtggaaaacattcacagactgttttaactgcttgccagtgtcagcattgatagatgaaaagattctctgtatgcatggtggtctatctccggagttgaacaagcttgagcaaatactcaacctgaatcgccccacagacgtgcctgatactggattgctctgtgatcttctttggtctgatccttccaatgaagcaacaggctgggccatcaatgatcgtggtgtttcattcacatttggtcctgataaagtttctgaatttcttgagaagcatgatttggaccttatctgccgagcacatcaggttgtcgaagatggatacgagtttttcgctagccgtcaactcgtaacaatattttcagcccctaactactgtggagaattcgacaacgctggtgccatgatgagtgtagatgatacattgatgtgctcgttccaaatattgaagcctgcaaggaagatgatgggtggttcaactaataacaaatctggcttcaagtcattcaggggatggtgacaacggcctgatggtgggcacgctgcgttcgacagggggtacatcttacagcggctgcaactaacaggcatatgcattttcgcggaaacctgcttgggccttggaagggcaaagcagatgtagaactgtgcatcttccatgttggattaacacttgatgtaatgtattgttatcggtttttactgtgcggatctccttatgatatgggaggatgtgaatgagtactgccctcccctttgcgtcctaagattcggaaagaatccattcgccaataaaaatagccagactattctccttttcca

SEQ ID NO: 119938 - DNA, 2915 bp, Zea Mays
cgtccttcctgagacgagaaggctaggctagctagagaaaggggggggggagggggcgacaccgaggcgggggcaacgggagcaagcaaggcaaggcaaggcagcagcatgggggagaagcgaacaagaccgcggggcgcgcggacgcccatgtggacgccatgcgcggacgcggcgcggacgtcgtgacacctgcagccccccggcacccggcctgcaccgccatggccctgccgccgccgccgcattgcgcctcaaaacccccctccgcgcctcccgccctctaggctccccgctcgccaaggccaaaccccccaccgttcggttcctgatccggcctctcggcctctccgctggaggtaggggacatggcggaagaggcatcgcctccgcctccgccgcccaagctgctctacattgccgtcgccgacggcgggggccgccgggcgttccggtacacgcgccccgtgctgcagagcaccctgcatctcatgggatgcaagcctcgccatgccttcaagattagcaagagagtattcgatgtaatgaagagtgaattcttggctcaatcaaagtcagacggggcaggcaaacaagaaaattatcctgctcttggccttggagatggaacagatactcaaaaaatgctggagagaagcgatagcagcataccgtttgaattatacaagaaccagactaccgttgttatctcaagagaggagtttgtaagtgttgtatgcgatgccctctctttgtacaagtatgttggacccaaccagaaagcagacctgctcctcgcttgcagaattaaagagagaaaggaatcggtgacaatactcttgtgtgggacaagcggatgcggcaagtccactttatcatctttgctgggtagtaggctgggtatcacgacagtggtttctactgattccatacgccatatgatgagaggcttcgcagatcaaaaacagaatcctcttctctatgcctcgacctaccatgcaggcgaatatctagatcctattgcagttgctcaggcgaaggcaaagcacaaggcgaataaacccacggttgtttctcatccaaatacctgtggaggcacttcttcagacgacaaatcacagcaagggtcctcggaactacctcctagagccgaactgattggcagcaagcagatggcggtagaaggctacaaggcgcagagcgagatggtgatcgacagcctggacagattaattacctcctgggaagagcagaaagaatccgtgatcgtcgaaggagtgcatctaagccttaacttcgtgatgggattaatgaagaagcatccttccataataccattcatggtatacatcacaaacgaggagaaacacatggaacggtttgctgtgcgtgcgaagtacatgacactagacccagcgaagaacaggtacatcaagtacatccgaaacatcagagccatccaggaatacctgtgcaaccgcgctgacaagcacctcgtgccgaagatcaacaacaccaacgtcgaccagagcgtggccgccatacacgccacggccttcagctgcctccgccggcgagcggccggggagcagctgtacgacctcaacacgaacactgctgccgtagtggacgaggagtacaggaaccagcgtgcggccaacaccttgggttccaagggcatgttccagctgatccagaggcaggggtcttcgaggaaccttatggcgctcctcaacaccgacggctcagtcaccaaagcctggcatgtaggtgccactgacggcggtggggaaaatcttggtggtaatacaagcagcggcaagaagcccgatgaaaatcgtgtgctggatgcctcgcagattgggaaggcagaggcggtcaacctccagttcggtcctttcgggatcagcgcctggatgagcgacacgggtggaaccagccatgctggaagtgtggaagacctgagggctgatggcgtggagactggtggtaggaattactcgtcgtgctgcagttcgccgaagacgtcggattccacttcgaaggagcttatggaggactattcggtctatgtcagcgaagaagaggaagaggaggaagctgacgacccttgtgatgctgaaactgatgaagatctatccgatgaagaaagagacatgcacgagatagatgcaggctctgtggacgagcactcgaccaagtcagacgaggagtatgaggacctagccatgcgcgatgtgatggagagtggcgactggtccgacgatgagcagcaaggcgtcagcaaaaccaagaactcacctaccctggagtgcagcattcatgggagtggggcagctgaagatgatggcataaatggccggtaccaccacaacctggacctgttcctgaagatgtccaaggaggtggtagccagcaacagaatgccttgcgcgtcgtcatagccccaccggccggcgacacgctgccctggtcccggcgggtgatacgtttcttgggctggtgctgtagagtggtggctgtgtctttgtagcgtgtacctgtgcaaactacaagatgccctcacctggatgtaaagagagaccctgatgctttgtccaggcaaccatgttcatccataccatgtagtagtaggagtattagggggtgtttgggaacaaagtttttctgcagttttggaagaatactgcagtattctcaaatactgcagtattatatacataatggtgtttggtaagctgggtaaaatctctgttttcaaaactgaagtattgcaaatactatagttgttttaaggcattctaaacttagctctggacctcagttttcaaaactgcggtattataaactacggtattgtcataactaaagtatagtatagtatttcaaaaactgtggttttcaaaaactttgtt

SEQ ID NO: 119939 - DNA, 120 bp, Zea Mays
aaaaagttgccacattttatttctagggcttgcatttttctgctgagagaagacaaacttgggaaagtgagaaaatccttaacaaaatataattgttaaagcagcctaagaggaaaacaa

SEQ ID NO: 119940 - DNA, 1491 bp, Zea Mays
aaaaatttagctttgagcgaggtccccgtgtcggaacgagatcctctgacgtggggagagggcactgccgcgtggcccccgcgtgcgatagggcccgcgcgcagtgaccctactgcccctgcagtacgtcagaggaaccggctccccccgtgtccgttcacctctccggctctccctcccagcctcgccctcccaccgtcccacgttgttcctcccgaccctcgccgtccctcccgccgcgacccgccctcctcctcccgaccacgccgcccagcccgtgtaccactccctcccagcctcgccctcccacgccgtccctcccgtcgtgacccttcctcctcctcccgacctcgccgcctagcccgtgtcgccgccgtcgcccgtgccactctgctgctgcgaccacgacaatggggatgtggaaggtggtgtgcgtcaccgacgcatcagcgtacatcgcgtcctggatcgttaggctcctcctcgaccgtggctacaccgtccgcgccaccgtgcgagacacaggtgcgcatcccggcccgtcctccccaatccccgtgcctttctttcccactgattccctgtggtagctagcggaattactgtgatgttttgtgagattggttaggttagactgggaattgattagttggcaggggactgcataacctaccttggtaaatttgggatgttaggttcggtactattttgcttctggatccacttgcctccggcaacccaaaatcttgattgcatctgtagactgaaaaatgctgctacagatgaacttggcttgtcagtttattaaggagcaatttgtatccccatacatatcagtacaccaagttccagaagggagagaaatagaaaatcaaccaaacggatagaaacagaaactattttttagaatgggtccctattataatcctaacgaggagaaaccttgaagtgcagcctatccttagctccatccaacgcagtcacttgcaatgttttctttgggtcagccgaaaagtgaaggtaacaacaatgaccgaatgccaaaggtaatattactaaagaattatggtaagaaatagaagacagtagtattattctgttgtatctccatgttaggatttgcaacatgtattctgcatttgcaacttttatttgttcttcgtgtggtcattctagcatgcttggattactctctgcatacatagatatgggaaaatagctccgatccattttttggtagccaacgatagctggcagaaaatttattctgtcagacaggcacttctggtctctagatctagattaattaacacactgcacataaatgaggtttccatccgggactatagcttatttctgcactagcgcatcgccacatgtatatgtatcaagcttgagtataagtatatatttccagcagttctacatatgtcaccacaatatatatgttatctttggccattaacttgtatatgtctgtatttatacttc

SEQ ID NO: 119941 - DNA, 846 bp, Zea Mays
aaaaatttagctttgagcgaggtccccgtgtcggaacgagatcctctgacgtggggagagggcactgccgcgtggcccccgcgtgcgatagggcccgcgcgcagtgaccctactgcccctgcagtacgtcagaggaaccggctccccccgtgtccgttcacctctccggctctccctcccagcctcgccctcccaccgtcccacgttgttcctcccgaccctcgccgtccctcccgccgcgacccgccctcctcctcccgaccacgccgcccagcccgtgtaccactccctcccagcctcgccctcccacgccgtccctcccgtcgtgacccttcctcctcctcccgacctcgccgcctagcccgtgtcgccgccgtcgcccgtgccactctgctgctgcgaccacgacaatggggatgtggaaggtggtgtgcgtcaccgacgcatcagcgtacatcgcgtcctggatcgttaggctcctcctcgaccgtggctacaccgtccgcgccaccgtgcgagacacagagcccacctcagttgatctattcaagaacttccattatagcaaaaacaatggatttaccgagtttgtacagaaagcaattgatgatatggaaggcatcatgagtgaaccagtacaagatggacatgaaccaaagttagcaaatgaagctgtttctcaggttgtcaaaatcaactacttttcttcgtgttgcaggtgtttgtttggcctccaagagtacctctagaggcacaatatcgtcacaggtacaagtgttttacataccaattatgttcccttctttctttggataagttgtacttgcaacatgtaccttgagaaag

SEQ ID NO: 119942 - DNA, 1272 bp, Zea Mays
aaaaatttagctttgagcgaggtccccgtgtcggaacgagatcctctgacgtggggagagggcactgccgcgtggcccccgcgtgcgatagggcccgcgcgcagtgaccctactgcccctgcagtacgtcagaggaaccggctccccccgtgtccgttcacctctccggctctccctcccagcctcgccctcccaccgtcccacgttgttcctcccgaccctcgccgtccctcccgccgcgacccgccctcctcctcccgaccacgccgcccagcccgtgtaccactccctcccagcctcgccctcccacgccgtccctcccgtcgtgacccttcctcctcctcccgacctcgccgcctagcccgtgtcgccgccgtcgcccgtgccactctgctgctgcgaccacgacaatggggatgtggaaggtggtgtgcgtcaccgacgcatcagcgtacatcgcgtcctggatcgttaggctcctcctcgaccgtggctacaccgtccgcgccaccgtgcgagacacagatggtactacatcgcaacttacacaacctttggaaatgtagagcccacctcagttgatctattcaagaacttccattatagcaaaaacaatggatttaccgagtttgtacagaaagcaattgatgatatggaaggcatcatgagtgaaccagtacaagatggacatgaaccaaagttagcaaatgaagctgtttctcaggttgtcaaaatcaactacttttcttcgtgttgcaggtgtttgtttggcctccaagagtacctctagaggcacaatatcgtcacaggtccaagatctttagattaccttgagaatgagaagcaataaacggcagaacttcgacaagagttggataacatgaagatggaatcagaaactttggtaaaacattctgaggaaatagaggatttaaagaagacaccataagaaatacatgccctccttcactagctgctaagcttcaatcaggatcagcacaatccagggccataaagttcctaagcccccaacagtgaactattgcaggacgtttctgttttgaaatttggttgttggttgaactatgtctaattgttttatcaataattggttgctagttgtttacaagtatgacttagtaggtccaagtttattgatttttgttactggtacctccaagttttgttgaacattgttgcttcttgcaagacgtattgtgatctatgaattggaactcatgtctgctataattttggtcattggatgtgtaa

SEQ ID NO: 119943 - DNA, 1231 bp, Zea Mays
aaaaatttagctttgagcgaggtccccgtgtcggaacgagatcctctgacgtggggagagggcactgccgcgtggcccccgcgtgcgatagggcccgcgcgcagtgaccctactgcccctgcagtacgtcagaggaaccggctccccccgtgtccgttcacctctccggctctccctcccagcctcgccctcccaccgtcccacgttgttcctcccgaccctcgccgtccctcccgccgcgacccgccctcctcctcccgaccacgccgcccagcccgtgtaccactccctcccagcctcgccctcccacgccgtccctcccgtcgtgacccttcctcctcctcccgacctcgccgcctagcccgtgtcgccgccgtcgcccgtgccactctgctgctgcgaccacgacaatggggatgtggaaggtggtgtgcgtcaccgacgcatcagcgtacatcgcgtcctggatcgttaggctcctcctcgaccgtggctacaccgtccgcgccaccgtgcgagacacagagcccacctcagttgatctattcaagaacttccattatagcaaaaacaatggatttaccgagtttgtacagaaagcaattgatgatatggaaggcatcatgagtgaaccagtacaagatggacatgaaccaaagttagcaaatgaagctgtttctcaggttgtcaaaatcaactacttttcttcgtgttgcaggtgtttgtttggcctccaagagtacctctagaggcacaatatcgtcacaggtccaagatctttagattaccttgagaatgagaagcaataaacggcagaacttcgacaagagttggataacatgaagatggaatcagaaactttggtaaaacattctgaggaaatagaggatttaaagaagacaccataagaaatacatgccctccttcactagctgctaagcttcaatcaggatcagcacaatccagggccataaagttcctaagcccccaacagtgaactattgcaggacgtttctgttttgaaatttggttgttggttgaactatgtctaattgttttatcaataattggttgctagttgtttacaagtatgacttagtaggtccaagtttattgatttttgttactggtacctccaagttttgttgaacattgttgcttcttgcaagacgtattgtgatctatgaattggaactcatgtctgctataattttggtcattggatgtgtaa

SEQ ID NO: 119944 - DNA, 1693 bp, Zea Mays
ggttggtgatgtgaatgaccaaataacattgctaaacactttgttaatgtaacatacatgactggtataggggatccacgagagagaaagcactgggcgctcctactgatgcttttgaaagttttgtcctccttggtttagtggaaacaagttattattctactttaatgatgccttcttagaattttatataactagacaagtgaaaatatgggatatacattgtcttttgcacccatggatgtgtaagttgtaacctcatcaatgcagttatgctctggttttaaaaaaaatagtgagcttacatatgcctgcacgcggactgctgatccatgcgttcccctttcttgagcccaatacacatgctaatagcagcatcaggttttagtgttgctgacttgctgtgtggggcaaaccaaaacaaggcaggcttcaaatctaaggaatttccctcttgcctagggctcttacagttgctattatttggccaaggtcaagattctcatacagattgtgtcctgtagtgtgggttggtgccttgttctgttttccatctcactcatccagcacaattctgcccctctaaacaaactttgtattcgctctgctatttaggtgttaaaaaggagaactaaatttagctgtcaaaaaaggagaactgtcctgtataatttctttggtcacacattcatagttcttctgtgacattattacaattaaccaaatatatgcaccacttttcccatgtttttttcccttttcctgagctgatgtcactcttttttctggattgcgtgatctcactctccaaatatttggcccttcattatgtatctgtctgactgatgatttcatctcatctgttctcacctaaatgagttgttgatcatccaccttctggtacccaacttcatggcaccaaataatggagtggccgtctaatttgggatctactaccttggatccaactggttgatgagctgatacagcccacctcagttgatctattcaagaacttccattatagcaaaaacaatggatttaccgagtttgtacagaaagcaattgatgatatggaaggcatcatgagtgaaccagtacaagatggacatgaaccaaagttagcaaatgaagctgtttctcaggttgtcaaaatcaactacttttcttcgtgttgcaggtgtttgtttggcctccaagagtacctctagaggcacaatatcgtcacaggtccaagatctttagattaccttgagaatgagaagcaataaacggcagaacttcgacaagagttggataacatgaagatggaatcagaaactttggtaaaacattctgaggaaatagaggatttaaagaagacaccataagaaatacatgccctccttcactagctgctaagcttcaatcaggatcagcacaatccagggccataaagttcctaagcccccaacagtgaactattgcaggacgtttctgttttgaaatttggttgttggttgaactatgtctaattgttttatcaataattggttgctagttgtttacaagtatgacttagtaggtccaagtttattgatttttgttactggtacctccaagttttgttgaacattgttgcttcttgcaagacgtattgtgatctatgaattggaactcatgtctgctataattttggtcattggatgtgtaa

SEQ ID NO: 119945 - DNA, 1543 bp, Zea Mays
ttgctagctagctagctccctcagttcagttcagttcagttcagctcagctagctagctcactcctctcttgagtcgtggtgtccatcacaatcttctctatatcgatacaggtgaggaggtagctagacagatcaacaccaatcctctcaacgacatccccttgttcttgtagagagagttggtgtaggtcgaaaggcagatagatcatatatagagggagagatgcatatatggtgtagggttcttcaatttgtttctatgatcgattcattcgccctgcagccccccctgcgcatctagttatgtctccatccctcctcccttgttcctgatacatatatatatatgtaggtagtggctctgtatatacccatgccatctctctcaatctcatctatatcatatatacccatgctttgcatctagctgtttcatttcttttcactcgtgctttgaaagatctggtacagtccggcctgtattagtaagaacgagttagaaaaatacacacgtacgcgcgagaaccatgcatcatcagctagctcctctctttcctctttttttttgttaatgcatacattcatatatatattcccatgaatgaatgctttaagcatgaggcaagcaaacatcgacagtgggtgcttgcaggtgcagcaccaccaagattcacatccaactctcacgcatcttcagtgatgcatgcatgctctgtgatgtctcgcagcagctatatgcatatgtgatgagatgagaatcttgatgatgctgcatcagcagacactcactcatcacaccaacgtaccccaacaagggtgagagacgacgaatcggctgctggtatatacatacaactgagaagtcggattacctttgctgattattaacttgtttccattgctgtgaaatgaaactttcaatgcaagggggctggcctaccagctggtactagcaggaatgaagagcatatatatatgaacatgatgatgcatatatgcagagcagcaacagcagcatcgtcgtaccatctcatatatatcattgcaaacatgagcagtagtggtagttcatgaatcatgatgaaagcaaggaagaggaagctagcagtgctggacgcggatcagatgcagatcgatggaggccggggccgggggtgtacctacgtagtacattgctattattgtgtccatggaagggggaccaaagtatgtaatgcgttgcacaccacacaccagagctggctcagcagctagcagcagcctgtggtggtggtggtacaatgcagcgtgtactgctgtcgtcccagcagcaagttgaaaggtaaaagagagaaatatttcagctgactttactcatcacgcactctgcctgcatgctggctgcaggcctgctgtgagtctgtgtgtgtgtgcttgttctcttgctttagtggtggtgtagatcttctatttgctagtttcagtccacacttcactcaccgcctgcgtctatcatccatacatatatgcatatctacaaagcctgcaaattagattgccaca

SEQ ID NO: 119946 - DNA, 1157 bp, Zea Mays
gaccaacacggtatagtttctctgccctcagaaccctcgccgccgcccgtcggagctccggtgtgtcagttcgccgtcgaaggatatggactatgacaggttgaattcgccgaacacgtcggctatttcgctggaggtgatgggccaccggctacatatttcacaggatccaaactccaagcaccttgggaccacggtctgggatgcatcaatggtgtttgtcaagttcttggaaaagaatagcagaaaaggtcggttttgtccatccaagctaaaaggaaagagagtgattgaattaggagctggctgtggcctggctgggttcggaatgaccttgttgggttgtgatgttacaacaactgaccaagtcgaggtgcttccgctgcttatgagaaatgttgaacgcaacagatcttggatttcgcaatcgaattccgacacagttgcagaattggactgggggaacaaagaacatatcaaggccgttgaacctccatttgattacattattggaactgacgttatttactcagagcatctgttgcaacctctaatggagacaattactgcattatctggtcccaaaacaaaaatattgctaggatacgagatccgttcggccaccgtccatgagaagatgatggaaatgtggaaaagcaatttcattgtgaaaaccgtctctaaatcgaagatggatgtgaaatatcaacatccaaacatacatctctacatgatggacctgaaggcaccattgatccctgaggttgaggctaccgacgataatgggaacgacgacgaagaggttgtttcaaatctgggggaagacgaagacaatggactgaagagcgaatcttgttccggctcgtcaccagaagctaagagcggcagcctggatgattgggaaatcagaagatgtggggctatggctgcaaggcttctaaaggatgtgaaactgtaaggccttgttcggttatttctatcctatattcctatttggattggaaatgttttaacttgtttgggattgtaactcatccaatccaaatggattgagaacaaaacgaacaagcactgacatgaaattgaaccacgtttttgtagtcaaggaggagaaccctagagctgcccccccccccccgcagtatgttcatgtgctg

SEQ ID NO: 119947 - DNA, 1130 bp, Zea Mays
attacatggtgaaatggtgatgatggtgactgaatcttgttagacactggcgttgaattcgccgaacacgtcggctatttcgctggaggtgatgggccaccggctacatatttcacaggatccaaactccaagcaccttgggaccacggtctgggatgcatcaatggtgtttgtcaagttcttggaaaagaatagcagaaaaggtcggttttgtccatccaagctaaaaggaaagagagtgattgaattaggagctggctgtggcctggctgggttcggaatgaccttgttgggttgtgatgttacaacaactgaccaagtcgaggtgcttccgctgcttatgagaaatgttgaacgcaacagatcttggatttcgcaatcgaattccgacacagataccatcggctcaattacagttgcagaattggactgggggaacaaagaacatatcaaggccgttgaacctccatttgattacattattggaactgacgttatttactcagagcatctgttgcaacctctaatggagacaattactgcattatctggtcccaaaacaaaaatattgctaggatacgagatccgttcggccaccgtccatgagaagatgatggaaatgtggaaaagcaatttcattgtgaaaaccgtctctaaatcgaagatggatgtgaaatatcaacatccaaacatacatctctacatgatggacctgaaggcaccattgatccctgaggttgaggctaccgacgataatgggaacgacgacgaagaggttgtttcaaatctgggggaagacgaagacaatggactgaagagcgaatcttgttccggctcgtcaccagaagctaagagcggcagcctggatgattgggaaatcagaagatgtggggctatggctgcaaggcttctaaaggatgtgaaactgtaaggccttgttcggttatttctatcctatattcctatttggattggaaatgttttaacttgtttgggattgtaactcatccaatccaaatggattgagaacaaaacgaacaagcactgacatgaaattgaaccacgtttttgtagtcaaggaggagaaccctagagctgcccccccccccccgcagtatgttcatgtgctg

SEQ ID NO: 119948 - DNA, 2147 bp, Zea Mays
gcgttctcgcttctcttctcgtggatccccaaatcctctccggccaccggcatcgctcctctcccgcccgccgacgccgaccgctcctatccacgccaccgcgtcggtgctcgagttgcctcagagagggagagagagagagagagagggagggagggagggagggagggaacggcgctcacgctgttccgattcgaacgagctcgcccggcgatttttttttttcctggaacgggctggctccgaatctcggcgaagtgtggggagcggctccaccctccaaccaagcaccgcaggatcaaccagaaggcgggcgcgcgggcggcaggcggcggtgctgagaacacgggtggcactgtctggacggacgctgcggatctcggcgattcttcgcggcctgcgtcaagggcggatcggcagcgatgagcggcggcggcggcgggagccccaataacacggagtggcgcttcaaccagaccctccgcaacgtgcaaggaatgcttaaaggacgcagctttcctgggaaggttttgctaacccggcgatccgagcctctctcccctcctgattattctccaagctttgagagcgagcacgatgaagatgagcgcaaggagggttctcgtcaggagggagaaggtcaagcatctggaaactcatttgacaatgcaagttcaaagaaatcaaatattctgtcaacaagtagttcaaattcattgccagatgctcaggggctagtttctggggctagagctactgattctgcaagaattgctaaattcacaacggaactatctaggccagctgttatattagacaaattgcgtgaactatcttggagtggtgtgcctccatatatgcgacctaatgtatggcggcttcttttgggatatgcaccgcctaataaagatagacgagaaggtgttctaacaaggaaaaggctggagtacgtggaatgtgtttctcaatactatgatattccagatagtgaacgctcagatgaagaaattaccatgcttcgccagattgcagttgattgcccaagaaccgtacctgatgttacattttttcagaatcatcagattcagaaatctcttgaacgcattttgtatacatgggctattcgtcacccagcaagtggctacgtccaaggaataaatgaccttgttacgcctttcttggttgtcttcttatcagagcacctagatggcaacatggatacttggtctgtggacaatctttcagcgcaggccatttccaacatagaagcagactgttattggtgtctctcgaagttccttgatggaatgcaggatcattacacctttgcgcaaccaggaattcagcgcctcgtttttcgattgaaggaactagttcgtcgtatagacgaacctgtttccaagcacattgaagagcaaggattagagtttcttcagtttgccttccgctggttcaactgccttctgatacgagaggtacctttccatctcgtaacgcgcctgtgggatacataccttgccgaaggcgactatctgccagattttctcgtgtacatatcggctagttttttgctgacgtggtcggacaagctgcagaagctggattttcaagagatggtgatgttcctgcagcacctccccacgaggacctgggcgcaccacgagctggagatggtcctctcgagggcatacatgtggcacacgatgttcaaaagctctcccagccacctcgccggctaggacccacccaagtccaccatgcctgtaagcggcagtcagttccttctgttttttttttgttaagcgcgtgcatactatactatcggtcgcgtcgcaccgatttgtatattttccgtttcctaccgaggaatgcttatctataatgaacaccagaggacaagtattagtgctcaatttgatattcagaccggtagttgtattgtattgtttgccgcgctcttggtggcgcaaggccttttttttttccccaacaccatgagatgctcgttccctgttttgtgaaacgcagagaagcgctgtggcttgtgaaaattgtgatggtccatactgtcctttttgttttcgtttgatgcattgtatagtatagcatgtgatactgatgctgagtggtggtagcactagcacata

SEQ ID NO: 119949 - DNA, 1447 bp, Zea Mays
atacccagagctcctccctctctctctgtctgctgtgctcagataatagcgacacctcctttcctctccctcgaggtgtctctcccagaacgcacagcacagtcgcagaacaggaaggcagagagcagcgccgcgatgagaggaggaggagcggggcccactgcggcgttcatgtccgacgagccgcctccagccgacgcggaagaggtggaggagaactccggcgccgaggaggaggacgaggagacggtggtggagcaggacgacgacgagctggagctggggctctgcctcggctccaagcaacagcagcagcagcatccgccgccgtgccggatcctcacggcccgggacctgcagccgaggtccctgtcaccggattcctccgtgtcctcttcctcccccgcggcaggtgcaggtaccgcggcgccaagcaagagggccaaggcggatgcggcgcccaactcgccagggacggtcgcgtctggccacccacagagcagctttggagtggtgggatggccacccataagaactttcaggatgaacagcctatttaaccaggccaaagagaatgcatcggaggctggcgccaagaagcccatcgtcgaacctgacatgcaggaagacaaggaggagagcaagaaaggccggaccgtcggttgggtgaaggtgaacatggaaggagatatcattggaaggaaggtcgatctcaatgcccatcgctcttacaagacccttgcctcagcacttgagctcatgttcatgaagccgtccattggtctttgcacttctagcagttcaaagactctaaagctattagacagctcatcggagtatcagctcacctatgaggacagggacggggactggatgcttgttggagatgttccctgggagatgtttgtaggttcagtgaagaggctcaagatcatgagaacctcagacgccaaaggtctcggtccacgattccaagggtctcacagacccacagcagcttgcacgagaggcaggacgtgaaaccaccgatgtgcgtttggtgctaacaccgctggtgaagcttgaactgtatttgatatcacgtaacagtaacagcagcccatatcgctggcatagttgtgagattacggggctgtttggtttactgtctaaggcgccacaacatggctaacttttatgtctaagtttagttcttcaattcgaacgactaaacttaggcaacttcattgtgtctagtggaaatagtagaagtttttttttttgcttcttccctgtggtgccctcgttgagcttttcttatgggctatacgagcatcatcgcccccagctcttctgtccacgctgtttacctgtgaggaatggtcgcccaaagtgttggtttttatccttgtgtttgatatggcagaagtatctgctctgctgtttcatatctgtgttcatatctgaa

SEQ ID NO: 119950 - DNA, 1528 bp, Zea Mays
atacccagagctcctccctctctctctgtctgctgtgctcagataatagcgacacctcctttcctctccctcgaggtgtctctcccagaacgcacagcacagtcgcagaacaggaaggcagagagcagcgccgcgatgagaggaggaggagcggggcccactgcggcgttcatgtccgacgagccgcctccagccgacgcggaagaggtggaggagaactccggcgccgaggaggaggacgaggagacggtggtggagcaggacgacgacgagctggagctggggctctgcctcggctccaagcaacagcagcagcagcatccgccgccgtgccggatcctcacggcccgggacctgcagccgaggtccctgtcaccggattcctccgtgtcctcttcctcccccgcggcaggtgcaggtaccgcggcgccaagcaagagggccaaggcggatgcggcgcccaactcgccagggacggtcgcgtctggccacccacagagctttggagtggtgggatggccacccataagaactttcaggatgaacagcctatttaaccaggccaaagagaatgcatcggaggctggcgccaagaagcccatcgtcgaacctgacatgcaggaagacaaggaggagagcaagaaaggccggaccgtcggttgggtgaaggtgaacatggaaggagatatcattggaaggaaggtcgatctcaatgcccatcgctcttacaagacccttgcctcagcacttgagctcatgttcatgaagccgtccattggtctttgcacttctagcagttcaaagactctaaagctattagacagctcatcggagtatcagctcacctatgaggacagggacggggactggatgcttgttggagatgttccctgggagatgtttgtaggttcagtgaagaggctcaagatcatgagaacctcagacgccaaaggtctcggtccacgattccaagggtctcacagacccacagcagcttgcacgagaggcaggacgtgaaaccaccgatgtgcgtttggtgctaacaccgctggtgaagcttgaactgtatttgatatcacgtaacagtaacagcagcccatatcgctggcatagttgtgagattacggggctgtttggtttactgtctaaggcgccacaacatggctaacttttatgtctaagtttagttcttcaattcgaacgactaaacttaggcaacttcattgtgtctagtggaaatagtagaagtttttttttttgcttcttccctgtggtgccctcgttgagcttttcttatgggctatacgagcatcatcgcccccagctcttctgtccacgctgtttacctgtgaggaatggtcgcccaaagtgttggtttttatccttgtgtttgatatggcagaagtatctgctctgctgtttcatatctgtgttcatatctgaattccatgttgccgcacagtatgtctttgctaattgctgtggtctgcaatgcaacgccaaccacccacccgggtgttggatgggg

SEQ ID NO: 119951 - DNA, 820 bp, Zea Mays
cgccgccgccgcagcagcagcaacatgatctgtgggcgaaccggagtcgagatttgggaaagagagtgaacagcgatctagacctcaccttgtgtctggagaagaggttgtactcgggctgctcgacgatgggtccgacgaggtcgagtcggttggcgacggcccaggcctcggtgatctgctgcgcggaccactcggaggtgccccagtagaaggcccagccctggtcgatgacccagttcatggcgcgcaccgtctcctcgacgggcgtggacgcgtcggggcggtggcagtagacgacgtcgacgtagtccagggcgaggcggcggagcgagccgcggaggccctcgacgacgtgcttccgggagaggcccttgtcgttggggccctggccgccccagaagagcttggtggagatgacgacgtcggagcggcgccagcccaggtcccggatggcctggcccatgatctcctcggcgcgcccgttggcgtacacctcggcgttgtcgaagaagttgacgccagcgtcccggcacgcctgcagtagcaccttggcctccttcacgtccagctggttcccgaaggtgacccacgcgccgtacgagagctggctgacgcggaggcccgaccgccccaggttcttgtactgcatcctgccctgcggtctggttcctcgcctggcgatctgcgcggaggaggcgggaagggaggggcggaagggagcgccggaggagggagacaaccgcaacttgacaagataacaacggaggggaaggggggcgaggaggaggaaggccggctacgactgctcatttgaact

SEQ ID NO: 119952 - DNA, 303 bp, Zea Mays
atgccaaggttacacaattgacccaaaagaagccaccaacacaattgtattctccattcgaaacagaggcgaaatgcactaccttagttgtcaatcaaatttggttaacaaaagactatagtggagggatcctcaaatggtctaatcacaaaatagaaaaatatgatacgattaagactgtttttcttgccaatcaggctagacaaggtaggagatggaagtaaagctcccatgtttcgcagccgcggctccccctaacaaccaaatcgaaaatatgaggaagcaaacacctcttgccacata

SEQ ID NO: 119953 - DNA, 559 bp, Zea Mays
agcatttccttttgcctctctccactctacctctcctctcctgtgcgctacagcgagggggaaggggagcgtcgaccgattcgtcccggcctcccgtcccgccgctggcctcgcctgccccgatggcggcggtggcgatccaccagttcgccgagtgcatcacctgccacgcctggagcccggaccagtcgatgattgccttttgtccaaacaaccatgaagtacatatctataaattcttcacagacaagtgggagaaacttcatgttctgtcaaagcatgatcagatggtttcggggatagactggagtaaatcatccaacaaaatcgtaacagtttcacatgatagaaattcatatgtttggacacaagaaggatctgattgggtacctaccctggttattctaaagttaaatcgtgcagctttatgtgttcagtggagcccaaaagtaatacccagctgatttcttggagctggagctcttccaaactgggcgttcggtgccttagctattcagattatcttagccgacttcacactttgttggagcaccatgtt

SEQ ID NO: 119954 - DNA, 1621 bp, Zea Mays
agcatttccttttgcctctctccactctacctctcctctcctgtgcgctacagcgagggggaaggggagcgtcgaccgattcgtcccggcctcccgtcccgccgctggcctcgcctgccccgatggcggcggtggcgatccaccagttcgccgagtgcatcacctgccacgcctggagcccggaccagtcgatgattgccttttgtccaaacaaccatgaagtacatatctataaattcttcacagacaagtgggagaaacttcatgttctgtcaaagcatgatcagatggtttcggggatagactggagtaaatcatccaacaaaatcgtaacagtttcacatgatagaaattcatatgtttggacacaagaaggatctgattgggtacctaccctggttattctaaagttaaatcgtgcagctttatgtgttcagtggagcccaaaagaaaacaagtttgccgtgggaagcggtgccaaatctgtgtgtatttgttactatgaacaagaaaataactggtggattagcaaggttatcaggaaaaagcatgaatcttctgtcactagtcttgcatggcatccaaacaatatatatcttgcaacatcgtctacggatggtaaatgcagagtgttctctacttttatcaagggtgtagacacaagaggatcaaaatcgagcacttcaaccgattcaaaattcggagagcaaatcgctcagcttgatctatcatctacctgggtatttggtgtaaggtggtcaccaagtgggaagacattggcctatgcagggcacaactccatgatttatttcatcgatgaagtcgaatcatctcctgtggcacaaaatttggcactgcgtgatctgcctctccgtgatgttctttttgtctctgagcgcacattgattggtgtcggatttgactgcaatcctatgatctttgctgctgatgatactgggctttggactttcataagattcttggacgagaggaaagctgccccatcagcttcaaaagcctcgcagctctctgaagcccttggaaagctatacggccaatcaaagcaagggactagtagtgataccgttgaaccatcaaaacctcgtggcggggcccatgagaattgcataacgtgtattgtacccttgagaaaaggaagcgacggtagtatcaaacgattcagcacatcaggattggatggtaagatcgtggtatgggatttggagaatcacgtcagcattgcaaaatagctcgagggagactttatcaccaatcaaatcgagggaactcctgtcattaccagccgtcctgcaggttttcaagatccagggccagccagatagattgttttttttttaatttttaaattttgttgtacctgtacacagaaacattgccttagcgtagggacagcttgcatctatcaagtagcttcatttttggcgagtaattttgccctttgaattgaatctatacaatattatactataattttagttaggtcgtaggcagttgacgtgatcccgcgttctttcgctctttctttccggtgccctgtgtaaaataaccacacgtggaatcttatctatccgggacttgtggtcatcttgtttcttctgct

SEQ ID NO: 119955 - DNA, 1625 bp, Zea Mays
agcatttccttttgcctctctccactctacctctcctctcctgtgcgctacagcgagggggaaggggagcgtcgaccgattcgtcccggcctcccgtcccgccgctggcctcgcctgccccgatggcggcggtggcgatccaccagttcgccgagtgcatcacctgccacgcctggagcccggaccagtcgatgattgccttttgtccaaacaaccatgaagtacatatctataaattcttcacagacaagtgggagaaacttcatgttctgtcaaagcatgatcagatggtttcggggatagactggagtaaatcatccaacaaaatcgtaacagtttcacatgatagaaattcatatgtttggacacaagaaggatctgattgggtacctaccctggttattctaaagttaaatcgtgcagctttatgtgttcagtggagcccaaaagaaaacaagtttgccgtgggaagcggtgccaaatctgtgtgtatttgttactatgaacaagaaaataactggtggattagcaaggttatcaggaaaaagcatgaatcttctgtcactagtcttgcatggcatccaaacaatatatatcttgcaacatcgtctacggatggtaaatgcagagtgttctctacttttatcaagggtgtagacacaagaggatcaaaatcgagcacttcaaccgattcaaaattcggagagcaaatcgctcagcttgatctatcatctacctgggtatttggtgtaaggtggtcaccaagtgggaagacattggcctatgcagggcacaactccatgatttatttcatcgatgaagtcgaatcatctcctgtggcacaaaatttggcactgcgtgatctgcctctccgtgatgtgggttctttttgtctctgagcgcacattgattggtgtcggatttgactgcaatcctatgatctttgctgctgatgatactgggctttggactttcataagattcttggacgagaggaaagctgccccatcagcttcaaaagcctcgcagctctctgaagcccttggaaagctatacggccaatcaaagcaagggactagtagtgataccgttgaaccatcaaaacctcgtggcggggcccatgagaattgcataacgtgtattgtacccttgagaaaaggaagcgacggtagtatcaaacgattcagcacatcaggattggatggtaagatcgtggtatgggatttggagaatcacgtcagcattgcaaaatagctcgagggagactttatcaccaatcaaatcgagggaactcctgtcattaccagccgtcctgcaggttttcaagatccagggccagccagatagattgttttttttttaatttttaaattttgttgtacctgtacacagaaacattgccttagcgtagggacagcttgcatctatcaagtagcttcatttttggcgagtaattttgccctttgaattgaatctatacaatattatactataattttagttaggtcgtaggcagttgacgtgatcccgcgttctttcgctctttctttccggtgccctgtgtaaaataaccacacgtggaatcttatctatccgggacttgtggtcatcttgtttcttctgct

SEQ ID NO: 119956 - DNA, 192 bp, Zea Mays
ggacactaaggatgacttatttgtcgactttttcactatcaacccccaaaaaaccaactatgccttacgtaaagttgccgaagtacgattaacctctggatttgaaatcactgcttatatacctggtattggccataatttacaagaacattctctagtattagtaggaggaggaagggttaaggatttaca

SEQ ID NO: 119957 - DNA, 2927 bp, Zea Mays
ggtgctctcacctgacctgacattctccgctctcacggtggggtcgtcgtcgtcgacggcgacgactgttctgccaccgtccacccgttctttgtccagcgcggtgcccgcctccgcgccgtccgtgtgctagtgccgcactcgcggcgcacgcgggagggcgcgcggcaccacaagcgcggctcacggcactcgtggccacgcgcgcgccaccccggtgacctgagtggcctgctattgaccatccccccgcccccaattcctcttctctcccaaccactgaaccaccaccaacttcacgtctgtccagccggccagtcagttgccttctcacatcgcaacccccgctgcccgcccgctccacgcttgccacgccggcctcgcttcccacctcccaccagagacgctgctgcgggccgagtccacaccacagccggcatggaggctgcggcggcggcgccgcatctactgcactgcggcggcttcggccgcgtagcgcacctcccagcgctccaccgccgaggacagttcccacgcgtccgcgccgtcgccacggagcccaagctgtccacctccacctcctcctcctcccgcggcaggaccaggagccgtaatgacctctctgacaccaggttcggagaggtgtccaaggagatccagcgcgtgcgtaagcagatggagcaggacgagcagcttgccacgctcatgcgcggtctccgcggccagaacctccgcgacgagcagttcgccgacgacaacgtccgcctccgcctcgtcgaggtagaatccgcggacaacaatgagggcctgcctcttgtgtatagccctgaaatcatatcagcctactggggcaagcgtcctagggccgtcgccacccgggttgtgcagctgctgtctgtcgctggtggtttcatctcccatctcgtatccgatcttattaacaagaagctcaaggagaatgaagtggctcgcgcaattgaactgagagaaatcgtgacgtctctgggtcctgcttacatcaagcttgggcaggcgctaagtatacgtccagatattctgtcccctgcagcaatgaccgagttgcagaaattatgtgataaggttccttcattcccagatgatatagcaatggctcttcttgaagaagagcttggtcagccttggcaagcaatctactcagagttatccccctccccaatcgctgcagcatctctgggacaggtttataagggccgcttgaaagaaacgggagaactagtagctgtcaaagttcagaggccatttgtacttgagactgttaccatcgatttattcatcattagaaacttgggtttggtactcaggagatttccacaggtgtccatcgatgttgttggcctggtagatgagtgggctgctcgattttttgaagaacttgattatgtaaatgaaggggaaaatggcacttactttgctgacgtgatgaaagaagatcttccacaggttgttgtaccaaagacttaccataaatacacgtctagaaaagttcttaccacacaatggatagagggagagaagttgtcacagagcacagaggacgatgttggatcattggtcagtgtaggagtcatttgctatctgaaacagttgcttgatactgggttcttccacgctgatccacatcctggcaatatgattagaacacctgatggaaagctggctattcttgattttgggcttgtaacaaaactgacagatgatcaaaagtatggaatgatcgaagcaatagctcaccttattcatcgtgattatgatgcaattgttaaggactttgtgaagcttggttttattcctgaaggggttaacttggatcctatcttgcctgtactggccaaggtttttgatcaggcactagaaggaggcggtgccaagaatattaacttccaagaattggcagcagatctagcacagataacttttgattatccattcaggatacctccgtattttgctttgattattagagccatcggagtattagaaggcatagctttggtgggagatcctgaatttgccattgtggatgaagcatacccatacatcgcacagaggctactaacggacgaatcgcctcggctaaggagcgccttgcgttacaccatatatggcaaaaccggtgttttcgacgcggaaaggttcattgatgttatgcaagctttcgagaattttatccgtgcagcgaagagcggtggtggggagaacttgaagggaaacatggctgagctggctgagttgggaggtcaacctagcaccagtctggttcctgtatttgcaatggccgtagcgcagcctgagcagccagttaaagcccgtgcggctcttgcttttctactctctgagagggggaacttctttcgggagtttattcttgacgagattgtgaaagccatcgatgcgatttcaagggagcagttgatccagatcgccgcgtcttttgggataggaaacgcggccccagtttttagcatggttcctgtcagggccagggcattgcttccgacgatcacagaggaagacagggtcatcctgaacaacgtcgagaaggttgtgaagttcctgacatccgggactgcaactccaacagtgggcggggacgtgaacgtggtgtctgtggtgcaagagcttctacctgtgttgccaggcatctcgtcgaagatcctacctgatgtcttgagccggttgtcgtcacgggtatttgcacggataatccgggagacatttttgtagagtgttctctttttgtttgccccttgctaacaggaaaactacaagtagcaatatctgcccaaacaacacgcaaatgaatggtgatagaagattgtacagcaatacaatgtatagaatttgcatctaagtaagttaacaaaagcagcaaagcttaaccaaca

SEQ ID NO: 119958 - DNA, 920 bp, Zea Mays
atggctcctcgaccagtagcagcctcttcgctttggcaggaacttgcacgcgaacgcaacgtaaacagcgggaaggaaggaaggaaggaagaagcttcgccaatgtcgcaaccacgccgcgaaaggagagtaaggggatttcctacccaacaaaccgaggcctgtgtacccgcagatgcgccaagaaagctgcgacggccggagcagcaggtacatgcaggggagcggctgggcgagcggcaggaatggcgtgactgggacgggcggcgcggagcagagcagaggcgcatgttacctggtcggcagaacggagcctgcaaggcggcaacaaccgtatatatatacgcggcggttggcggggacgcagccatcgtttatcccgccaccgtggaggaggacgggggacagggcgcaggcgcgcagcaacggcaacggcaccgacaccggagccaatgagcgcggcggagggaaagctggcgatggcgctggtccccatgaatgcggcgaggcagagagaggacgggggcgagcagaggtccccctgccggtggcgagctgtccgtcttgttgctgcgaggcagcgccggccggactgcgtgcagtcggccggccacgtccgtaccgtctgagagagagagagccgccgggcgccggaggtggcaccggcgagaccgagatcgtggcactgtgatgtggtagtgcgcagagggagacagcgacaatggcagctacaccgtgagtggtggggagggtgggccgatggggaggaggaggaggaaggcaaatggcaacttgaccaagtgtggtggtgactggcgggggagggaggcgagaggcggggcgcaatgggtcagtggcggtgtcgcactcgcacgcacacggaaggggaaggtggtggtggaggagctcggctggctggg

SEQ ID NO: 119959 - DNA, 1764 bp, Zea Mays
agagaagaagctcctcgctgcgtacgtcacagaaatggagttgggattagcagcagccagcagctagccaagattgtggggggaattgaaccgcagtgcagcagtaatggcgggcaccaaccaccgatcgcgaccactcattcttctctgatcccatcactccagtccattcccctcagcggcggcatggccgacgagggcactataaaaagggaaggcactgcaagtgctgagtgtggtgtgcaagtgcatgcagtcgtccatcacatcgatcgactggacacactgacaggatcacaagagtgacagcaagcgccgcccgcaatggcctccgcctcgcgcctcgtgtccttcgccgcgctctgcctgtgcctgggggcggcgctccaggcggcccggggcgccgacgcggccgcccgcgccttcttcgtcttcggcgactccctcgtcgacaacggcaacaacaactacctgctcacggaggcgcgcgccgactcgccgccctacggcatcgacacgcccgaccaccgcgccacgggccggttcagcaacggcaagaacgtgccggacatcatcagtgagcacctcggcgcggagcccgtgctgccgtacctgagcccggagctcgacggcgacaagatgctcgtcggcgccaacttcgcgtccgccggcgtcggcatcctcaacgacaccggaatccagttcgccaacatcatccatatctccaagcagctgcgctacttcgagcagtaccagaggcgcctggccgcgctgatcggcccggaggcggcgtcccgcgtggtgcgcggcgcgctggtgctcatcacgctgggcggcaacgacttcgtgaacaactactacctggtgccctactcggcgcggtcgcgggagttctcgctgccggactacgtcacctacctgctgtcggagtacgcgcaggtgctggaccgcctctacgacctcggcgcgcggcgggtgctggtgcagggggtggggcccatcggctgcgtccccgcggagctggcgctgcacagcctcgacggcacctgcgacgccgagctgcagcgcgccgccgagatgtacaacccgcggctcatggcgctgctggaggagctcaacgcgcgccacggcggcggcgaccccgtgttcgtcggcgtcaacatgcagcgcatccacaacgacttcatcgacgaccccaaggcgtacggcttccagaccgccaccgacgcgtgctgcggccagggccgcttcaacggcatggggctctgcaccatggtgtccagcctctgcgccgaccgcgacacctacgtgttctgggacgccttccaccccacggagcgcgccaaccgcctcatcgtgcagcagttcatgtccggctccaccgactacatcacgcccatgaacctcagcaccgtcctcgccgtcgacctccagaagcagcagctgcgtacgtgacgtgatgtcgtcatccgcttcatcagctgcctgatcagcttcgtgcgtcgccattgccacatcgtcagatcagtttcgtatgcgtgtgtagtgagagtacctagctagtgcatcatgtgccatcagtttccggatgtggttttctgcagggtttcgttcgttcgttcgtgtgtgtgctgcagtgcaggtgtttaattgtgtgatagtgacgaccgtatcctgtcaattgtcatatagcaggacagcttcttgtaataatttatataaattttcaggcgattcataatttctattttttggcctttgctt

SEQ ID NO: 119960 - DNA, 1333 bp, Zea Mays
accacccaggcaggcggcaggccaacgccacccgaaggccgcagcaggcaccacacaacacggacacaagtcaggcgcagcccataaccccccaccccagccgaagccatccgatacgggagggcccatccagcggcccaggtcacgctctcacgccacgcacgcatgctcccccgcctgctcaacgggccccaccgcctgctccttggcgggccccacgcctcgggcgccgcgcccctccaccgccgccgcgtcctcgccggccgccgggccatgtccgcctccgcctcgcccgcgtccgggccgaggcgtccgctgcgcggggtggtcttcgacatggacggcaccctcacggtgccagtcatcgatttcccggccatgtaccgcgaggtgctcggcggggacgccgcctacgccgcggcgcgcggctcggggggaggctccgtcgacatcctccactgcatcgaggactgggcgcccgacaagcagcgccacgcgtacgaggtcatcgcgcgcttcgagcgggagggcctcgaccgcctccagatcatgcccggggcctcggagctgtgtggcttcctggacgcgaagcagatcagaagaggtttgatcacccgtaatgtgaaggacacagttgatttgttccaccaaagatttggtatgacgttcactcctgcactgagcagagaatttcgcccctataaaccaaatcctgctccactgcttcacatatgctccgcttggaacattccaccacacgaagtgatcatggttggcgacagtctcaaggatgatgttgtttgtggaaagagggcaggagctttcacttgcttgcttgatgaaacggggcgatatggtcctcacgattctttacctgaggaagtaaaacctgacttcaaggtgtcctcactgacagaagtattcgctgtgctggaggagcacttcgatttggcaccagtgcctgccgagagtagaatatgacagggaagttttattggacctcccttctaatgtgaaatcggctacccaaccaacagcttgaataatgtggaggacgttgatgggactttcaagtatcagaagcccctgctagagcctgcagccagagcccagaaggacgatggctgttccaaggggggattgaatgtctttggaaaggcaatgaagtgattcagttcgttgtaaatctattatattatgttgccccagactaaaccagcttgtgtggtttagtgactgaaatgaccacacgtatctggagattcagaatataacaatcgatttccacggatttcattcgttcaatttggttcccctatctctttcacacagc

SEQ ID NO: 119961 - DNA, 1448 bp, Zea Mays
accacccaggcaggcggcaggccaacgccacccgaaggccgcagcaggcaccacacaacacggacacaagtcaggcgcagcccataaccccccaccccagccgaagccatccgatacgggagggcccatccagcggcccaggtcacgctctcacgccacgcacgcatgctcccccgcctgctcaacgggccccaccgcctgctccttggcgggccccacgcctcgggcgccgcgcccctccaccgccgccgcgtcctcgccggccgccgggccatgtccgcctccgcctcgcccgcgtccgggccgaggcgtccgctgcgcggggtggtcttcgacatggacggcaccctcacggtgccagtcatcgatttcccggccatgtaccgcgaggtgctcggcggggacgccgcctacgccgcggcgcgcggctcggggggaggctccgtcgacatcctccactgcatcgaggactgggcgcccgacaagcagcgccacgcgtacgaggtcatcgcgcgcttcgagcgggagggcctcgaccgcctccagatcatgcccggtcggtcagccggcaaccaccactccaccctgcttgccttgctgcttgctgcttgctgcgagtacccgcgattttgtggtgtgtgactgcttgcgattttgtcctgggtacgcaggggcctcggagctgtgtggcttcctggacgcgaagcagatcagaagaggtttgatcacccgtaatgtgaaggacacagttgatttgttccaccaaagatttggtatgacgttcactcctgcactgagcagagaatttcgcccctataaaccaaatcctgctccactgcttcacatatgctccgcttggaacattccaccacacgaagtgatcatggttggcgacagtctcaaggatgatgttgtttgtggaaagagggcaggagctttcacttgcttgcttgatgaaacggggcgatatggtcctcacgattctttacctgaggaagtaaaacctgacttcaaggtgtcctcactgacagaagtattcgctgtgctggaggagcacttcgatttggcaccagtgcctgccgagagtagaatatgacagggaagttttattggacctcccttctaatgtgaaatcggctacccaaccaacagcttgaataatgtggaggacgttgatgggactttcaagtatcagaagcccctgctagagcctgcagccagagcccagaaggacgatggctgttccaaggggggattgaatgtctttggaaaggcaatgaagtgattcagttcgttgtaaatctattatattatgttgccccagactaaaccagcttgtgtggtttagtgactgaaatgaccacacgtatctggagattcagaatataacaatcgatttccacggatttcattcgttcaatttggttcccctatctctttcacacagc

SEQ ID NO: 119962 - DNA, 2787 bp, Zea Mays
ctctagctactactactactattctgtagattgatacagatagcggcgctcttctcgcttcgcctcgctgccaatctcgtcgccgatccccgggtccggcgccgccacgagcttccagatccaccgcccgggcaatgctgtagcgcctcgcgccgagatgggcggcgtcggcgccgcctcgcttgccctgctgccgctccccctcctcctcctcctgctcgtccgcgcggaggcctccgctctccacggaactatattgcctaacccagcaccgagtccatctagcccccctgaagcgagatcgtttggacctcgaatttccccttcatatcctccaagggcactgtctccaggatctcctgacattgatgtgcgctctcattcgcacaagcccccacaccatagagagtcaaatcagggcccttcaccatcctcagcagaagcaggttgttctagttatatatgcactgaaccactgactgcaacaccaattggttccccttgtggctgtgtcgagcctattagtgttatcgttgatctggacttagctccttacctactgttcatgagcatagctgagttagaagttgaagttgcagctgggacatttcttaaacaaagccaagtgaagatcatggctgcagttgcaagtatccaggatgaccagaagacacgggtgaccatttatttggtgccactaagagaagagtttgatacttatacggcatccctaatatctgataggttcagggataaaaaggtccagataaattcatctatatttggagattataaagttatcaatgtcagctatcatggattgcaatccccaccatcatctgtgcctggaggatcggatccttcaggaaccgaagatcctataactgcagaggtgcctgatcagatgaaaaagcacaagaaatcagatattttgatcgtcgtggtagcgttagggtcttctcttggacttctgttgacatgtgctgttgtcctgatcttactagtaagatggaagaaacttggacggcttcatgaggatatgaaccctgcaactaccccaacagttaatagaagatacggtgctagatcaactttgtcaaccggcatggtgagctctgcgtcagcatcagcgttttcaacagtggctacttgcacaacatctgtaaagacattttcactaggccaacttcagaaggccacagatggttttgattcgagaagagttttgggtcaaggtggctttgggtgtgtctaccatgggacaatagaggatggaaacgaaattgctgttaaattgcttacaagggaggacaggagtggtgaccgtgagtttattgcggaggtggaaatgctcagtcgactgcaccaccgtaatcttgtcaaattgattggtatttgcgttgatcggagcaaaagatgtcttgtgtatgagctcatacgcaacggaagtgtggaatctcatcttcatggcgctgacaaggctaagggtaagctgaactgggatgttaggatgaaaattgctcttggggctgctcgaggcttagcatacctgcatgaagattcaaaccctcatgtcatacaccgtgacttcaaggccagcaatatcttgttagaggaagatttcactcccaaagttactgattttggtttagcaagggaagcatccaatgcaactcaacctatatctaccagggtaatgggcactttcggttatgttgctccagaatatgcaatgacgggtcatcttcttgtgaagagcgacgtctacagttacggggttgtcttgctggaacttctatcaggaaggaagcccgtaagcatctccgagtcgaaggatcccgagaaccttgtgacctgggcccgtcctctgctaagccacaaggagggcctggagaagttgatcgacccttctctggaagggaacttcaacttcgacaacgtggctaaggtggcgtccatcgcttccatgtgcgtgcacgcggacccatcgcagaggccgttcatgggcgaagccgtccaggcactgaagctcatctacagtgatccggacgaggcctgcgacgattcctacagcccgaggaactcatccgaccaagacggtggctacgacggagacctggtcttcgggagcgggagctgggggtttggggcctctggctctgggtgcctggactaccggaactccctgccgtttgttaccatggactacagttccggccgaatagaagggccgcgcgaccctcgcgcggcgttgtcggcgggctcccatgcccagccaccggtgctgcagaatagatcaggccccttgcgggtgaagaagaagctggccgcctcctaccgctctagaggcagtgttagcgagcatgggcacctgccgcgccattgatcagtagtagccaatgaagtagtgttaggccgctaccttccggtttgaccttggaggctgcggtggggtttgtcatcacctctcgatgattcgtgcctcgtgctagttagtgtacagttagttcgtggtgacccttggacatgcatgcatgcctgcctgccttgggtgtaggtgtttttttctttcttattcttcttgtttgccttctgcttcttccccggaagcaatgaggatggggttggcagatgctgtctaattttcgcaaaaatgcggctcatgcatctgattggtgtaatctggtttagggctttgacggaattctggacatcatgttgttgtggctaggttgttgtattggatgcagttcgtcactaacaagcgttagggcctgttcgtttcgc

SEQ ID NO: 119963 - DNA, 1120 bp, Zea Mays
gattcttctccccccacggccacacccacgcaccgcagcgccgcctcgtctcctctcgccggcgatggaggaggtgggcggggacatgcctctcccgaaacagaagctctccgctgcaccgtacagggacggaggtggcgtcgtgctcgtggccactgggagctttaaccctcccacctacatgcacctgcgcatgtttgagctggcaaaggatgaactcgagctgcgaggttattctgtgttgggcggctacatgtctccggtgaatgatgcatataagaagaaggacctcttaccggctgctcaccgaattcgcttttgtgaacttgcgtccaaaagctcatcttttgtgatggttgatccgtgggaggcaatgcagaatggttatcagcgcactttgaccgttctttcgagaatacgaaactcactatgcaaggatggtgtagctgaccaaggtagcctcaaggtaatgcttttatgtggctctgacttgctcgagtcattcaccactccaggtgtttggatcctagaccaggtcagaaccatatgccaggactttggtgtcgtatgcatacggcgagaaggaaaggatgttggaaaattgatagacaacagcgatatattgcaagaatgcagggataacattatttcggttgatgagattgtgccaaatcagatcagttcatccagagtaagagactgcataagaagatctctatcgataaagtatctcactagtgatgaagtaattgaatacatcagagaacacaagctgtttatggaaggcaatggcggcgacatagcattgctgtaatagaggtatttggagattttcactatcatgcaggtaaactctgtaatcgacaaggatcggctgtggacgtctacctcaggagtcaggataccatctggaccgtgcattctgggcaattacttcgcacaaacacagaaataaacggaactggccacttaaattactactatatttttgttaaatttgattctggaggttgaagtgagttgcatgttgattaattttgcttttgtgccagaatcaagtgctacatacaacatgaattctgacaaccatataaatgccaaggttattctgacatagcaa

SEQ ID NO: 119964 - DNA, 1906 bp, Zea Mays
gatatcaaatctttaacatttaaactcttccgattgtcaggctaagcaacagtttatcgatatggggaggatgccatcgaagctaacaggaaacggtccagcagcacaaacatcatccgggaaaacatctttagggccatcaaaagctcgtctaactaaaaactctcttcccaattcgcaacacaaacaaatgttatttgaagtaaatttcgatcaactgattccactagacaatcgcatttgccgcgctggcaatcctaggccacagatcagcacactcctttccgatgggtccagtgatggcagagcctgcatcatggtcatggaaatgcgtatcaatacatcattttccaactgtagtgttagattataataaaagctaagagaatctccaagagattagagaaatggctggtagtcaaattttggctactcaacatcaaaataatttttcaacagactagtcatctaactcatcaagttattcgactctcccaattagttctctcgctagccaaacatggctagccactctgactagtcaaactcatagaaaggtaaatagagagtcaaatagagaacaaaaaatggtgacctgaaaccagtccgagccggattacttcattaatttatataagttttaatcaactagaaaaattccggagccattccgcttgctgtattctggcaccattttcagctatgcctacaccagaatagttgtaatgcacataaaaccaacagaacgttcaggagtatacctttcatctctccctttgggttcacaatcactccagcattgtctgcaatatcacataaacagaacattacagaagcatgaaccacgaaccaaggctgaagtaaatgtggtgttgaccacgagcagcaggtaaataaaaagagttgctgatcaccaaatgtctaatataaatctctagacatgtgacaggcacaaaaaatgttaaaagacagaataaataactcaaatcaactgcaggtcgacaccaaattataccaaggcataaccacataactagtacaatccagccaagatgcaacatctaacttgcacatattcaccgttgctagagtttgaattaaaaaacatgagaacatgctattggtatctgagcaaataaatagtattggtcattgtttcgcgaatacttcaacatgtgccaggagacaggtaacactgcacaacgggaaaatgcacaatgctgtttaatactggccaattcgcttatatgcttcctcttgacaaatgaccagactgcacggtcactctttattaggtaaagaagcaacactttttgtgcagagaacatcaagcttcctaaaatctaatcataattcctcagaacaaagtattctagagtacaaatttgcaacaacaaaaaaacaactatgatatcttggtcatcatgtttactaaaattcagaaataatatcaaaagtagaatgttagctaagcagacatcacactctaaagaaccaaaatcaaatgaaaagaagactatccaagagaactgaattctgggtaattctacaaggacacagaagctcaaatgattggaccattgcagagtcaatgcacccagtcatgataataaatgtaccttcaaagtacatgtagacaccatcctttcggcgccatggcttgcgctgcctcacaatgacagctggcatcaccttcttcctaaggtcaggctttcccttcttcacagttgccataaccatgtcaccaacacaggcagaaggaagcctgttaaggcgccccttgattcccttcacagaaatgatgtaaaggttcttggctccagtgttatcagcacagttcacagtggctgccactggtagacccagtgacatccggaacttgttaccagcagaacctccacgtcct

SEQ ID NO: 119965 - DNA, 1624 bp, Zea Mays
agttcgggatttcttgcgcgttagtcccttcggaagtcaggatcgtgagaaggaggctcgggaaatggggtgggcgcacccggcggtgaccatggaggaggtgctccgtctggtgcggggtttcgtcgacgtccttgtccttgccggcggccgcacctcgtccggcgccgctgctacttggagcgccgacgagatcaagaaggccctccggtgggcgctcttcttcgaggagattttcaaggacctgctcgactcgggccagtacgaggattctgcaagagaactcgatgcggcactccttgagctcacttcaagtcccgagttccctaagggtcttgctgctgtacgttcagatttgctatccatggcaagggtgttggttatgcgacattttctgaaaccaaacacaatgagcgtggaaaacttttgtgctcttcttgaagcggttgctggcatggatattgatggcatttgtgctagtggtgcgcacaacgcatgccaagagtatgctgagtcaatattgaatatgaatacatcatgttttgcgcagaccatgaatgcttgtgatggtggacttcccactagttcttatgatctgcgggctgaatccacgggccattcatggattatagttaaagaatttcagaagacgctggattcggcatcgtgtggacggttggctgatagaggactggaaacgtttttgaacagtgtgaaaaggaacatcttggaaaatggtagtaataagccttgtgtcccagcaattccgaaaacatcgcaaatgatcgacgagtttctaatgtggaagcaatggagagcaaagtgtttgtcatatttgcttgatcaacggaccattcgagttctgtctggagctagtttgatttttaaagctcctaaagagcagtggatgaaagtgtttgagcccttaaaaagtatagaagaaacatgtcatagtggtcttgttgaaaccatggagctatgcttgctgggttcgattacaaggcgatggaacacattgatagagggcttcatgtcacacactttctgttccattcctatatccaagaagcacgctgatctgcaccagtgccttcacagaacctttcaggacaaattccaagacgaatatcttaatttggaggaaaaggatattcttgactatgcaagacagacattagagaggaaaccatccgtactatggcttctacctccagttcttaccgccgcagcaattccaccgcagtcaagcttgttccagatatacctagctcaaatcgataagcaaattcatgaagctgctcctgcagatcgaaagtgtagttgcagaggagatgaaatagatcggcatgttaactgtgagattactgaaaggattcaatgtctatatgcattccttattcagcaactttcatataacggttccacaagattacactgaatgttagcagtgtgcactgtatgacgtttcacttttaattgagtgactggccgactatgcatggcttccttggccatattacttttcatttaacgtttgtcactggtggggggtgcgtacatctttgactttgtactcttcttatttaatgaaatgaaatggcactaactctggtgcatccttcga

SEQ ID NO: 119966 - DNA, 117 bp, Zea Mays
tgactataaactatcgtctttgcaggtatgtatagccaaccaatgcagaaaatgttgttcatttgaagggattttccctttattttctgaaaatatgagaaatgaaattaaaaaaaa

SEQ ID NO: 119967 - DNA, 2459 bp, Zea Mays
gctgccgtctgcacctaaagttttgcagtgaatttattgagtcactactgccagctacagagggacgacgacgagcattgggaccagagcgcgcggtaaaaaaaataaataaaagcgtgtactttagttgattttgggcctccattgctaggagactacgtactcgattcctttggcacctctccccttctccctctactcctctctaccagtgtacctatataaagatggcaatgggcatgccctctacagctgaaagagctaaactaccacacacacacacatcctacgcatcttctcgcagccatctttgtggaagcaaggcgggcaacatcgtgtggctagccagcaagagggagagaaacaagcacaagtatggcctcaaaacctggccctctgagtcgctggccatggcaagatcttggaaactacaagtacgcgctggtggctccatgggcggtgcgcagcacgtacaggttcgtgaggagcgggagcggggagcgggacctgctcgccttcgccgtgctgccggtgctcctcctccgcctcctctacagccagctctggatcaccgtgtcccgccaccagacggcccggagcaggcacaggatcgtcaacaagagcctcgacttcgagcaggtcgacagggagaggaactggtaatatgactaggcggagagccagaaggaaggccgcagcagtatactgtttgcgtgcgtttaatttatatagtatatggcaacgaacgacaaataatgtgcagggacgaccagatcctgctgacggcgctgctcttctacgcggtgaacgcggcggtgccggtggcgcagtcggtgccgtggtgggactcgagggggctgctggtggcggcgctcctccacgtgggtcccgtggagttcctctactactggctccaccgcgcgctgcaccaccactacctctacgcccggtaccactcgcaccaccacgcctccatcgtcaccgagcccatcacatcggtgatccatccgttcgcggaggagctggtgtacttcaccctgttcgccatcccgctgctcaccatggtgggcaccggcaccgcctccgtggccgtggccaacggctacctcgcctacatcgacttcatgaactacctcggccactgcaacttcgagctcgtccccaggctgctcttcgacgtcttccctcccctcaagtacctcatgtacacgccatcgttccactcgctgcaccacacgcagttccgcagcaactactcgctcttcatgccgctctacgaccacctgtacggcacggcggacaagtcaagcgacgacctgtacgagcgcgcgctgcagggccgcgccggggaggacgcgcccgacgtcgtccacctcacgcacctcaccacgccggcctccctcctccgcctccgcctcggcttcgcgtccctcgccgccgcgccggcgccgcccgcgtcccgctacggcgccggcagcagcagcagcagcagcagcagcctggcggcggtggcgtgcccgctggccgcgctcctcggctggacccggaccgccttcaggtccgaggccaacaggctccacaagctcaagctcgagacgtgggtcgttccaagatacacctctcagtacctgtccaagcaaggcctgtacgcagtggggcgtgtggtggagaaggcggtggcggacgcggaggcgagtggcgcgagagtactcacgctgggtctactgaaccaggcaaacgagctgaacaaaaacggcgagctgtacgtcatcaggaagcccagcatgaggaccaagatcgtcgacgggacaagcctggccgccgccgccgtgctccacatgatccctgagggcaccgacgaggtgctcctcctgggagacgccggcggcaataagatggcgggcgtgctggcttcggcgctctgcgaacgcgagattcaggttcacgtggtcgacaaggacctgtacgagtccgtgaagcagcagctgcgcccagagacgcacgagcatctcctccacctcgctgagtggtggagtcacagcgccaagacgaccaaggtatggctcgtcggcgacaggctgacgggcgaggagcagaggagggcgcagggcggcgcccacttcgttccctactcgcagttccctcctggcgccgtcgtccgcgccgactgcgtctaccacagcaccccggcgctggtggtgccggacgccttcgaggacctccacgcatgcgagaactggctgccgcggagggtgatgagcgcgtggcgcgcggcgggcatcgtgcacgcgctcgaaggctgggacgcgcacgagtgcggcgccagggtcaccggcgtcgacaaggcctggcgcgccgcgctcgcccacggcttccgcccctacgaccgctatggcgccaactaatacgtgaagtgaccattacgaacgacgacgactacgaagcgtacctgtgcatgg

SEQ ID NO: 119968 - DNA, 2433 bp, Zea Mays
gctgccgtctgcacctaaagttttgcagtgaatttattgagtcactactgccagctacagagggacgacgacgagcattgggaccagagcgcgcggtaaaaaaaataaataaaagcgtgtactttagttgattttgggcctccattgctaggagactacgtactcgattcctttggcacctctccccttctccctctactcctctctaccagtgtacctatataaagatggcaatgggcatgccctctacagctgaaagagctaaactaccacacacacacacatcctacgcatcttctcgcagccatctttgtggaagcaaggcgggcaacatcgtgtggctagccagcaagagggagagaaacaagcacaagtatggcctcaaaacctggccctctgagtcgctggccatggcaagatcttggaaactacaaggaaacgcaattaattatggtggatgaacgaagaagaagaagaacaagaaatggctgcttcttgcactgcatgttaagttacgcgctggtggctccatgggcggtgcgcagcacgtacaggttcgtgaggagcgggagcggggagcgggacctgctcgccttcgccgtgctgccggtgctcctcctccgcctcctctacagccagctctggatcaccgtgtcccgccaccagacggcccggagcaggcacaggatcgtcaacaagagcctcgacttcgagcaggtcgacagggagaggaactgggacgaccagatcctgctgacggcgctgctcttctacgcggtgaacgcggcggtgccggtggcgcagtcggtgccgtggtgggactcgagggggctgctggtggcggcgctcctccacgtgggtcccgtggagttcctctactactggctccaccgcgcgctgcaccaccactacctctacgcccggtaccactcgcaccaccacgcctccatcgtcaccgagcccatcacatcggtgatccatccgttcgcggaggagctggtgtacttcaccctgttcgccatcccgctgctcaccatggtgggcaccggcaccgcctccgtggccgtggccaacggctacctcgcctacatcgacttcatgaactacctcggccactgcaacttcgagctcgtccccaggctgctcttcgacgtcttccctcccctcaagtacctcatgtacacgccatcgttccactcgctgcaccacacgcagttccgcagcaactactcgctcttcatgccgctctacgaccacctgtacggcacggcggacaagtcaagcgacgacctgtacgagcgcgcgctgcagggccgcgccggggaggacgcgcccgacgtcgtccacctcacgcacctcaccacgccggcctccctcctccgcctccgcctcggcttcgcgtccctcgccgccgcgccggcgccgcccgcgtcccgctacggcgccggcagcagcagcagcagcagcagcagcctggcggcggtggcgtgcccgctggccgcgctcctcggctggacccggaccgccttcaggtccgaggccaacaggctccacaagctcaagctcgagacgtgggtcgttccaagatacacctctcagtacctgtccaagcaaggcctgtacgcagtggggcgtgtggtggagaaggcggtggcggacgcggaggcgagtggcgcgagagtactcacgctgggtctactgaaccaggcaaacgagctgaacaaaaacggcgagctgtacgtcatcaggaagcccagcatgaggaccaagatcgtcgacgggacaagcctggccgccgccgccgtgctccacatgatccctgagggcaccgacgaggtgctcctcctgggagacgccggcggcaataagatggcgggcgtgctggcttcggcgctctgcgaacgcgagattcaggttcacgtggtcgacaaggacctgtacgagtccgtgaagcagcagctgcgcccagagacgcacgagcatctcctccacctcgctgagtggtggagtcacagcgccaagacgaccaaggtatggctcgtcggcgacaggctgacgggcgaggagcagaggagggcgcagggcggcgcccacttcgttccctactcgcagttccctcctggcgccgtcgtccgcgccgactgcgtctaccacagcaccccggcgctggtggtgccggacgccttcgaggacctccacgcatgcgagaactggctgccgcggagggtgatgagcgcgtggcgcgcggcgggcatcgtgcacgcgctcgaaggctgggacgcgcacgagtgcggcgccagggtcaccggcgtcgacaaggcctggcgcgccgcgctcgcccacggcttccgcccctacgaccgctatggcgccaactaatacgtgaagtgaccattacgaacgacgacgactacgaagcgtacctgtgcatgg

SEQ ID NO: 119969 - DNA, 2355 bp, Zea Mays
gctgccgtctgcacctaaagttttgcagtgaatttattgagtcactactgccagctacagagggacgacgacgagcattgggaccagagcgcgcggtaaaaaaaataaataaaagcgtgtactttagttgattttgggcctccattgctaggagactacgtactcgattcctttggcacctctccccttctccctctactcctctctaccagtgtacctatataaagatggcaatgggcatgccctctacagctgaaagagctaaactaccacacacacacacatcctacgcatcttctcgcagccatctttgtggaagcaaggcgggcaacatcgtgtggctagccagcaagagggagagaaacaagcacaagtatggcctcaaaacctggccctctgagtcgctggccatggcaagatcttggaaactacaagtacgcgctggtggctccatgggcggtgcgcagcacgtacaggttcgtgaggagcgggagcggggagcgggacctgctcgccttcgccgtgctgccggtgctcctcctccgcctcctctacagccagctctggatcaccgtgtcccgccaccagacggcccggagcaggcacaggatcgtcaacaagagcctcgacttcgagcaggtcgacagggagaggaactgggacgaccagatcctgctgacggcgctgctcttctacgcggtgaacgcggcggtgccggtggcgcagtcggtgccgtggtgggactcgagggggctgctggtggcggcgctcctccacgtgggtcccgtggagttcctctactactggctccaccgcgcgctgcaccaccactacctctacgcccggtaccactcgcaccaccacgcctccatcgtcaccgagcccatcacatcggtgatccatccgttcgcggaggagctggtgtacttcaccctgttcgccatcccgctgctcaccatggtgggcaccggcaccgcctccgtggccgtggccaacggctacctcgcctacatcgacttcatgaactacctcggccactgcaacttcgagctcgtccccaggctgctcttcgacgtcttccctcccctcaagtacctcatgtacacgccatcgttccactcgctgcaccacacgcagttccgcagcaactactcgctcttcatgccgctctacgaccacctgtacggcacggcggacaagtcaagcgacgacctgtacgagcgcgcgctgcagggccgcgccggggaggacgcgcccgacgtcgtccacctcacgcacctcaccacgccggcctccctcctccgcctccgcctcggcttcgcgtccctcgccgccgcgccggcgccgcccgcgtcccgctacggcgccggcagcagcagcagcagcagcagcagcctggcggcggtggcgtgcccgctggccgcgctcctcggctggacccggaccgccttcaggtccgaggccaacaggctccacaagctcaagctcgagacgtgggtcgttccaagatacacctctcagtacctgtccaagcaaggcctgtacgcagtggggcgtgtggtggagaaggcggtggcggacgcggaggcgagtggcgcgagagtactcacgctgggtctactgaaccaggcaaacgagctgaacaaaaacggcgagctgtacgtcatcaggaagcccagcatgaggaccaagatcgtcgacgggacaagcctggccgccgccgccgtgctccacatgatccctgagggcaccgacgaggtgctcctcctgggagacgccggcggcaataagatggcgggcgtgctggcttcggcgctctgcgaacgcgagattcaggttcacgtggtcgacaaggacctgtacgagtccgtgaagcagcagctgcgcccagagacgcacgagcatctcctccacctcgctgagtggtggagtcacagcgccaagacgaccaaggtatggctcgtcggcgacaggctgacgggcgaggagcagaggagggcgcagggcggcgcccacttcgttccctactcgcagttccctcctggcgccgtcgtccgcgccgactgcgtctaccacagcaccccggcgctggtggtgccggacgccttcgaggacctccacgcatgcgagaactggctgccgcggagggtgatgagcgcgtggcgcgcggcgggcatcgtgcacgcgctcgaaggctgggacgcgcacgagtgcggcgccagggtcaccggcgtcgacaaggcctggcgcgccgcgctcgcccacggcttccgcccctacgaccgctatggcgccaactaatacgtgaagtgaccattacgaacgacgacgactacgaagcgtacctgtgcatgg

SEQ ID NO: 119970 - DNA, 2343 bp, Zea Mays
gctgccgtctgcacctaaagttttgcagtgaatttattgagtcactactgccagctacagagggacgacgacgagcattgggaccagagcgcgcggtaaaaaaaataaataaaagcgtgtactttagttgattttgggcctccattgctaggagactacgtactcgattcctttggcacctctccccttctccctctactcctctctaccagtgtacctatataaagatggcaatgggcatgccctctacagctgaaagagctaaactaccacacacacacacatcctacgcatcttctcgcagccatctttgtggaagcaaggcgggcaacatcgtgtggctagccagcaagagggagagaaacaagcacaagtatggcctcaaaacctggccctctgagtcgctggccatggcaagatcttggaaactacaagtacgcgctggtggctccatgggcggtgcgcagcacgtacaggttcgtgaggagcgggagcggggagcgggacctgctcgccttcgccgtgctgccggtgctcctcctccgcctcctctacagccagctctggatcaccgtgtcccgccaccagacggcccggagcaggcacaggatcgtcaacaagagcctcgacttcgagcaggtcgacagggagaggaactgggacgaccagatcctgctgacggcgctgctcttctacgcggtgaacgcggcggtgccggtggcgcagtcggtgccgtggtgggactcgagggggctgctggtggcggcgctcctccacgtgggtcccgtggagttcctctactactggctccaccgcgcgctgcaccaccactacctctacgcccggtaccactcgcaccaccacgcctccatcgtcaccgagcccatcacatcggtgatccatccgttcgcggaggagctggtgtacttcaccctgttcgccatcccgctgctcaccatggtgggcaccggcaccgcctccgtggccgtggccaacggctacctcgcctacatcgacttcatgaactacctcggccactgcaacttcgagctcgtccccaggctgctcttcgacgtcttccctcccctcaagtacctcatgttccactcgctgcaccacacgcagttccgcagcaactactcgctcttcatgccgctctacgaccacctgtacggcacggcggacaagtcaagcgacgacctgtacgagcgcgcgctgcagggccgcgccggggaggacgcgcccgacgtcgtccacctcacgcacctcaccacgccggcctccctcctccgcctccgcctcggcttcgcgtccctcgccgccgcgccggcgccgcccgcgtcccgctacggcgccggcagcagcagcagcagcagcagcagcctggcggcggtggcgtgcccgctggccgcgctcctcggctggacccggaccgccttcaggtccgaggccaacaggctccacaagctcaagctcgagacgtgggtcgttccaagatacacctctcagtacctgtccaagcaaggcctgtacgcagtggggcgtgtggtggagaaggcggtggcggacgcggaggcgagtggcgcgagagtactcacgctgggtctactgaaccaggcaaacgagctgaacaaaaacggcgagctgtacgtcatcaggaagcccagcatgaggaccaagatcgtcgacgggacaagcctggccgccgccgccgtgctccacatgatccctgagggcaccgacgaggtgctcctcctgggagacgccggcggcaataagatggcgggcgtgctggcttcggcgctctgcgaacgcgagattcaggttcacgtggtcgacaaggacctgtacgagtccgtgaagcagcagctgcgcccagagacgcacgagcatctcctccacctcgctgagtggtggagtcacagcgccaagacgaccaaggtatggctcgtcggcgacaggctgacgggcgaggagcagaggagggcgcagggcggcgcccacttcgttccctactcgcagttccctcctggcgccgtcgtccgcgccgactgcgtctaccacagcaccccggcgctggtggtgccggacgccttcgaggacctccacgcatgcgagaactggctgccgcggagggtgatgagcgcgtggcgcgcggcgggcatcgtgcacgcgctcgaaggctgggacgcgcacgagtgcggcgccagggtcaccggcgtcgacaaggcctggcgcgccgcgctcgcccacggcttccgcccctacgaccgctatggcgccaactaatacgtgaagtgaccattacgaacgacgacgactacgaagcgtacctgtgcatgg

SEQ ID NO: 119971 - DNA, 2308 bp, Zea Mays
gctgccgtctgcacctaaagttttgcagtgaatttattgagtcactactgccagctacagagggacgacgacgagcattgggaccagagcgcgcggtaaaaaaaataaataaaagcgtgtactttagttgattttgggcctccattgctaggagactacgtactcgattcctttggcacctctccccttctccctctactcctctctaccagtgtacctatataaagatggcaatgggcatgccctctacagctgaaagagctaaactaccacacacacacacatcctacgcatcttctcgcagccatctttgtggaagcaaggcgggcaacatcgtgtggctagccagcaagagggagagaaacaagcacaagtatggcctcaaaacctggccctctgagtcgctggccatggcaagatcttggaaactacaagtacgcgctggtggctccatgggcggtgcgcagcacgtacaggttcgtgaggagcgggagcggggagcgggacctgctcgccttcgccgtgctgccggtgctcctcctccgcctcctctacagccagctctggatcaccgtgtcccgccaccagacggcccggagcaggcacaggatcgtcaacaagagcctcgacttcgagcaggtcgacagggagaggaactgggacgaccagatcctgctgacggcgctgctcttctacgcggtgaacgcggcggtgccggtggcgcagtcggtgccgtggtgggactcgagggggctgctggtggcggcgctcctccacgtgggtcccgtggagttcctctactactggctccaccgcgcgctgcaccaccactacctctacgcccgcggtgatccatccgttcgcggaggagctggtgtacttcaccctgttcgccatcccgctgctcaccatggtgggcaccggcaccgcctccgtggccgtggccaacggctacctcgcctacatcgacttcatgaactacctcggccactgcaacttcgagctcgtccccaggctgctcttcgacgtcttccctcccctcaagtacctcatgtacacgccatcgttccactcgctgcaccacacgcagttccgcagcaactactcgctcttcatgccgctctacgaccacctgtacggcacggcggacaagtcaagcgacgacctgtacgagcgcgcgctgcagggccgcgccggggaggacgcgcccgacgtcgtccacctcacgcacctcaccacgccggcctccctcctccgcctccgcctcggcttcgcgtccctcgccgccgcgccggcgccgcccgcgtcccgctacggcgccggcagcagcagcagcagcagcagcagcctggcggcggtggcgtgcccgctggccgcgctcctcggctggacccggaccgccttcaggtccgaggccaacaggctccacaagctcaagctcgagacgtgggtcgttccaagatacacctctcagtacctgtccaagcaaggcctgtacgcagtggggcgtgtggtggagaaggcggtggcggacgcggaggcgagtggcgcgagagtactcacgctgggtctactgaaccaggcaaacgagctgaacaaaaacggcgagctgtacgtcatcaggaagcccagcatgaggaccaagatcgtcgacgggacaagcctggccgccgccgccgtgctccacatgatccctgagggcaccgacgaggtgctcctcctgggagacgccggcggcaataagatggcgggcgtgctggcttcggcgctctgcgaacgcgagattcaggttcacgtggtcgacaaggacctgtacgagtccgtgaagcagcagctgcgcccagagacgcacgagcatctcctccacctcgctgagtggtggagtcacagcgccaagacgaccaaggtatggctcgtcggcgacaggctgacgggcgaggagcagaggagggcgcagggcggcgcccacttcgttccctactcgcagttccctcctggcgccgtcgtccgcgccgactgcgtctaccacagcaccccggcgctggtggtgccggacgccttcgaggacctccacgcatgcgagaactggctgccgcggagggtgatgagcgcgtggcgcgcggcgggcatcgtgcacgcgctcgaaggctgggacgcgcacgagtgcggcgccagggtcaccggcgtcgacaaggcctggcgcgccgcgctcgcccacggcttccgcccctacgaccgctatggcgccaactaatacgtgaagtgaccattacgaacgacgacgactacgaagcgtacctgtgcatgg

SEQ ID NO: 119972 - DNA, 2820 bp, Zea Mays
gctgccgtctgcacctaaagttttgcagtgaatttattgagtcactactgccagctacagagggacgacgacgagcattgggaccagagcgcgcggtaaaaaaaataaataaaagcgtgtactttagttgattttgggcctccattgctaggagactacgtactcgattcctttggcacctctccccttctccctctactcctctctaccagtgtacctatataaagatggcaatgggcatgccctctacagctgaaagagctaaactaccacacacacacacatcctacgcatcttctcgcagccatctttgtggaagcaaggcgggcaacatcgtgtggctagccagcaagagggagagaaacaagcacaagtatggcctcaaaacctggccctctgagtcgctggccatggcaagatcttggaaactacaaggtacacacacatacaagccggtattgttgcatgcatttttcttttaatttgcacggcaccaaaactgtcgttctatgcgcatgcatgcatgtatgcaaggaaacgcaattaattatggtggatgaacgaagaagaagaagaacaagaaatggctgcttcttgcactgcatgttaagtgtaagtgtgtaacgaatagctgacgatgcttatttgttgcctgccctgcctgtgcgctgacgacgacgaactgaataatcaagtacgcgctggtggctccatgggcggtgcgcagcacgtacaggttcgtgaggagcgggagcggggagcgggacctgctcgccttcgccgtgctgccggtgctcctcctccgcctcctctacagccagctctggatcaccgtgtcccgccaccagacggcccggagcaggcacaggatcgtcaacaagagcctcgacttcgagcaggtcgacagggagaggaactggtaatatgactaggcggagagccagaaggaaggccgcagcagtatactgtttgcgtgcgtttaatttatatagtatatggcaacgaacgacaaataatgtgcagggacgaccagatcctgctgacggcgctgctcttctacgcggtgaacgcggcggtgccggtggcgcagtcggtgccgtggtgggactcgagggggctgctggtggcggcgctcctccacgtgggtcccgtggagttcctctactactggctccaccgcgcgctgcaccaccactacctctacgcccggtaccactcgcaccaccacgcctccatcgtcaccgagcccatcacatcggtgatccatccgttcgcggaggagctggtgtacttcaccctgttcgccatcccgctgctcaccatggtgggcaccggcaccgcctccgtggccgtggccaacggctacctcgcctacatcgacttcatgaactacctcggccactgcaacttcgagctcgtccccaggctgctcttcgacgtcttccctcccctcaagtacctcatgtacacgccatcgttccactcgctgcaccacacgcagttccgcagcaactactcgctcttcatgccgctctacgaccacctgtacggcacggcggacaagtcaagcgacgacctgtacgagcgcgcgctgcagggccgcgccggggaggacgcgcccgacgtcgtccacctcacgcacctcaccacgccggcctccctcctccgcctccgcctcggcttcgcgtccctcgccgccgcgccggcgccgcccgcgtcccgctacggcgccggcagcagcagcagcagcagcagcagcctggcggcggtggcgtgcccgctggccgcgctcctcggctggacccggaccgccttcaggtccgaggccaacaggctccacaagctcaagctcgagacgtgggtcgttccaagatacacctctcagtacctgtccaagcaaggcctgtacgcagtggggcgtgtggtggagaaggcggtggcggacgcggaggcgagtggcgcgagagtactcacgctgggtctactgaaccaggcaaacgagctgaacaaaaacggcgagctgtacgtcatcaggaagcccagcatgaggaccaagatcgtcgacgggacaagcctggccgccgccgccgtgctccacatgatccctgagggcaccgacgaggtgctcctcctgggagacgccggcggcaataagatggcgggcgtgctggcttcggcgctctgcgaacgcgagattcaggttcacgtggtcgacaaggacctgtacgagtccgtgaagcagcagctgcgcccagagacgcacgagcatctcctccacctcgctgagtggtggagtcacagcgccaagacgaccaaggtatggctcgtcggcgacaggctgacgggcgaggagcagaggagggcgcagggcggcgcccacttcgttccctactcgcagttccctcctggcgccgtcgtccgcgccgactgcgtctaccacagcaccccggcgctggtggtgccggacgccttcgaggacctccacgcatgcgagaactggctgccgcggagggtgatgagcgcgtggcgcgcggcgggcatcgtgcacgcgctcgaaggctgggacgcgcacgagtgcggcgccagggtcaccggcgtcgacaaggcctggcgcgccgcgctcgcccacggcttccgcccctacgaccgctatggcgccaactaatacgtgaagtgaccattacgaacgacgacgactacgaagcgtacctgtgcatggaatgatgagtagcatctatctatgaagacgaggaaaaaaacacttctttgtttatcgttcaagatgcaaaaagaaaaacaaagattcgtctttgacagttc

SEQ ID NO: 119973 - DNA, 3125 bp, Zea Mays
gctgccgtctgcacctaaagttttgcagtgaatttattgagtcactactgccagctacagagggacgacgacgagcattgggaccagagcgcgcggtaaaaaaaataaataaaagcgtgtactttagttgattttgggcctccattgctaggagactacgtactcgattcctttggcacctctccccttctccctctactcctctctaccagtgtacctatataaagatggcaatgggcatgccctctacagctgaaagagctaaactaccacacacacacacatcctacgcatcttctcgcagccatctttgtggaagcaaggcgggcaacatcgtgtggctagccagcaagagggagagaaacaagcacaagtatggcctcaaaacctggccctctgagtcgctggccatggcaagatcttggaaactacaagtacgcgctggtggctccatgggcggtgcgcagcacgtacaggttcgtgaggagcgggagcggggagcgggacctgctcgccttcgccgtgctgccggtgctcctcctccgcctcctctacagccagctctggatcaccgtgtcccgccaccagacggcccggagcaggcacaggatcgtcaacaagagcctcgacttcgagcaggtcgacagggagaggaactgatcctgctgacggcgctgctcttctacgcggtgaacgcggcggtgccggtggcgcagtcggtgccgtggtgggactcgagggggctgctggtggcggcgctcctccacgtgggtcccgtggagttcctctactactggctccaccgcgcgctgcaccaccactacctctacgcccggtaccactcgcaccaccacgcctccatcgtcaccgagcccatcacatcggtgatccatccgttcgcggaggagctggtgtacttcaccctgttcgccatcccgctgctcaccatggtgggcaccggcaccgcctccgtggccgtggccaacggctacctcgcctacatcgacttcatgaactacctcggccactgcaacttcgagctcgtccccaggctgctcttcgacgtcttccctcccctcaagtacctcatgtacacgccatcgttccactcgctgcaccacacgcagttccgcagcaactactcgctcttcatgccgctctacgaccacctgtacggcacggcggacaagtcaagcgacgacctgtacgagcgcgcgctgcagggccgcgccggggaggacgcgcccgacgtcgtccacctcacgcacctcaccacgccggcctccctcctccgcctccgcctcggcttcgcgtccctcgccgccgcgccggcgccgcccgcgtcccgctacggcgccggcagcagcagcagcagcagcagcagcctggcggcggtggcgtgcccgctggccgcgctcctcggctggacccggaccgccttcaggtccgaggccaacaggctccacaagctcaagctcgagacgtgggtcgttccaagatacacctctcagtacctgtccaagcaaggcctgtacgcagtggggcgtgtggtggagaaggcggtggcggacgcggaggcgagtggcgcgagagtactcacgctgggtctactgaaccaggcaaacgagctgaacaaaaacggcgagctgtacgtcatcaggaagcccagcatgaggaccaagatcgtcgacgggacaagcctggccgccgccgccgtgctccacatgatccctgagggcaccgacgaggtgctcctcctgggagacgccggcggcaataagatggcgggcgtgctggcttcggcgctctgcgaacgcgagattcaggttcacgtggtcgacaaggacctgtacgagtccgtgaagcagcagctgcgcccagagacgcacgagcatctcctccacctcgctgagtggtggagtcacagcgccaagacgaccaaggtatggctcgtcggcgacaggctgacgggcgaggagcagaggagggcgcagggcggcgcccacttcgttccctactcgcagttccctcctggcgccgtcgtccgcgccgactgcgtctaccacagcaccccggcgctggtggtgccggacgccttcgaggacctccacgcatgcgagaactggctgccgcggagggtgatgagcgcgtggcgcgcggcgggcatcgtgcacgcgctcgaaggctgggacgcgcacgagtgcggcgccagggtcaccggcgtcgacaaggcctggcgcgccgcgctcgcccacggcttccgcccctacgaccgctatggcgccaactaatacgtgaagtgaccattacgaacgacgacgactacgaagcgtacctgtgcatggaatgatgagtagcatctatctatgaagacgaggaaaaaaacacttctttgtttatcgttcaagatgcaaaaagaaaaacaaagattcgtctttgacagttcacaccacggcccatactgctctttcacgtaaaccgggtgaattccgtgtacgtacggtacgtgtgtgtactaccctacaattaattactactagttgggccaggtccggcaaggcggcaacgatcacagagtcctcagcggcccatggtaaaacccaaaccgctggttccaaacaattcacggagcgggaaggacggggacggacacctggctcgcccgactggccccgaactgtctatcagtctctcgctcaaagtcaaaaccggcatctttgacccatcctccgtcccttccctttcgcgggaagacgtcgatatagtcgatcacagccattcgtgtgggagtggacgacgcagatggaccagtaccgcatgtctccaacccaactcgagacgctccgccgaaccagggtagtggtggtgagttgggtgtcgtgggcgattgtgttggaaatcatactctggtcagtaagtaagagtagtaattagatggttgtctgttgcggttcagctgtccaagagcagtgagtttgttgataggtggttgcatttatcctgacaggctgtttgtgagtagctcagaaacaagaaaaaaaagaatataacatgggctgaaaaggtgtccgtatgtgttattcttgtttacattctttgtttttaattggaactcgctgtgattt

SEQ ID NO: 119974 - DNA, 3215 bp, Zea Mays
gctgccgtctgcacctaaagttttgcagtgaatttattgagtcactactgccagctacagagggacgacgacgagcattgggaccagagcgcgcggtaaaaaaaataaataaaagcgtgtactttagttgattttgggcctccattgctaggagactacgtactcgattcctttggcacctctccccttctccctctactcctctctaccagtgtacctatataaagatggcaatgggcatgccctctacagctgaaagagctaaactaccacacacacacacatcctacgcatcttctcgcagccatctttgtggaagcaaggcgggcaacatcgtgtggctagccagcaagagggagagaaacaagcacaagtatggcctcaaaacctggccctctgagtcgctggccatggcaagatcttggaaactacaaggaaacgcaattaattatggtggatgaacgaagaagaagaagaacaagaaatggctgcttcttgcactgcatgttaagttacgcgctggtggctccatgggcggtgcgcagcacgtacaggttcgtgaggagcgggagcggggagcgggacctgctcgccttcgccgtgctgccggtgctcctcctccgcctcctctacagccagctctggatcaccgtgtcccgccaccagacggcccggagcaggcacaggatcgtcaacaagagcctcgacttcgagcaggtcgacagggagaggaactgggacgaccagatcctgctgacggcgctgctcttctacgcggtgaacgcggcggtgccggtggcgcagtcggtgccgtggtgggactcgagggggctgctggtggcggcgctcctccacgtgggtcccgtggagttcctctactactggctccaccgcgcgctgcaccaccactacctctacgcccggtaccactcgcaccaccacgcctccatcgtcaccgagcccatcacatcggtgatccatccgttcgcggaggagctggtgtacttcaccctgttcgccatcccgctgctcaccatggtgggcaccggcaccgcctccgtggccgtggccaacggctacctcgcctacatcgacttcatgaactacctcggccactgcaacttcgagctcgtccccaggctgctcttcgacgtcttccctcccctcaagtacctcatgtacacgccatcgttccactcgctgcaccacacgcagttccgcagcaactactcgctcttcatgccgctctacgaccacctgtacggcacggcggacaagtcaagcgacgacctgtacgagcgcgcgctgcagggccgcgccggggaggacgcgcccgacgtcgtccacctcacgcacctcaccacgccggcctccctcctccgcctccgcctcggcttcgcgtccctcgccgccgcgccggcgccgcccgcgtcccgctacggcgccggcagcagcagcagcagcagcagcagcctggcggcggtggcgtgcccgctggccgcgctcctcggctggacccggaccgccttcaggtccgaggccaacaggctccacaagctcaagctcgagacgtgggtcgttccaagatacacctctcagtacctgtccaagcaaggcctgtacgcagtggggcgtgtggtggagaaggcggtggcggacgcggaggcgagtggcgcgagagtactcacgctgggtctactgaaccaggcaaacgagctgaacaaaaacggcgagctgtacgtcatcaggaagcccagcatgaggaccaagatcgtcgacgggacaagcctggccgccgccgccgtgctccacatgatccctgagggcaccgacgaggtgctcctcctgggagacgccggcggcaataagatggcgggcgtgctggcttcggcgctctgcgaacgcgagattcaggttcacgtggtcgacaaggacctgtacgagtccgtgaagcagcagctgcgcccagagacgcacgagcatctcctccacctcgctgagtggtggagtcacagcgccaagacgaccaaggtatggctcgtcggcgacaggctgacgggcgaggagcagaggagggcgcagggcggcgcccacttcgttccctactcgcagttccctcctggcgccgtcgtccgcgccgactgcgtctaccacagcaccccggcgctggtggtgccggacgccttcgaggacctccacgcatgcgagaactggctgccgcggagggtgatgagcgcgtggcgcgcggcgggcatcgtgcacgcgctcgaaggctgggacgcgcacgagtgcggcgccagggtcaccggcgtcgacaaggcctggcgcgccgcgctcgcccacggcttccgcccctacgaccgctatggcgccaactaatacgtgaagtgaccattacgaacgacgacgactacgaagcgtacctgtgcatggaatgatgagtagcatctatctatgaagacgaggaaaaaaacacttctttgtttatcgttcaagatgcaaaaagaaaaacaaagattcgtctttgacagttcacaccacggcccatactgctctttcacgtaaaccgggtgaattccgtgtacgtacggtacgtgtgtgtactaccctacaattaattactactagttgggccaggtccggcaaggcggcaacgatcacagagtcctcagcggcccatggtaaaacccaaaccgctggttccaaacaattcacggagcgggaaggacggggacggacacctggctcgcccgactggccccgaactgtctatcagtctctcgctcaaagtcaaaaccggcatctttgacccatcctccgtcccttccctttcgcgggaagacgtcgatatagtcgatcacagccattcgtgtgggagtggacgacgcagatggaccagtaccgcatgtctccaacccaactcgagacgctccgccgaaccagggtagtggtggtgagttgggtgtcgtgggcgattgtgttggaaatcatactctggtcagtaagtaagagtagtaattagatggttgtctgttgcggttcagctgtccaagagcagtgagtttgttgataggtggttgcatttatcctgacaggctgtttgtgagtagctcagaaacaagaaaaaaaagaatataacatgggctgaaaaggtgtccgtatgtgttattcttgtttacattctttgtttttaattggaactcgctgtgatttag

SEQ ID NO: 119975 - DNA, 3090 bp, Zea Mays
gctgccgtctgcacctaaagttttgcagtgaatttattgagtcactactgccagctacagagggacgacgacgagcattgggaccagagcgcgcggtaaaaaaaataaataaaagcgtgtactttagttgattttgggcctccattgctaggagactacgtactcgattcctttggcacctctccccttctccctctactcctctctaccagtgtacctatataaagatggcaatgggcatgccctctacagctgaaagagctaaactaccacacacacacacatcctacgcatcttctcgcagccatctttgtggaagcaaggcgggcaacatcgtgtggctagccagcaagagggagagaaacaagcacaagtatggcctcaaaacctggccctctgagtcgctggccatggcaagatcttggaaactacaagtacgcgctggtggctccatgggcggtgcgcagcacgtacaggttcgtgaggagcgggagcggggagcgggacctgctcgccttcgccgtgctgccggtgctcctcctccgcctcctctacagccagctctggatcaccgtgtcccgccaccagacggcccggagcaggcacaggatcgtcaacaagagcctcgacttcgagcaggtcgacagggagaggaactgggacgaccagatcctgctgacggcgctgctcttctacgcggtgaacgcggcggtgccggtggcgcagtcggtgccgtggtgggactcgagggggctgctggtggcggcgctcctccacgtgggtcccgtggagttcctctactactggctccaccgcgcgctgcaccaccactacctctacgcccgcggtgatccatccgttcgcggaggagctggtgtacttcaccctgttcgccatcccgctgctcaccatggtgggcaccggcaccgcctccgtggccgtggccaacggctacctcgcctacatcgacttcatgaactacctcggccactgcaacttcgagctcgtccccaggctgctcttcgacgtcttccctcccctcaagtacctcatgtacacgccatcgttccactcgctgcaccacacgcagttccgcagcaactactcgctcttcatgccgctctacgaccacctgtacggcacggcggacaagtcaagcgacgacctgtacgagcgcgcgctgcagggccgcgccggggaggacgcgcccgacgtcgtccacctcacgcacctcaccacgccggcctccctcctccgcctccgcctcggcttcgcgtccctcgccgccgcgccggcgccgcccgcgtcccgctacggcgccggcagcagcagcagcagcagcagcagcctggcggcggtggcgtgcccgctggccgcgctcctcggctggacccggaccgccttcaggtccgaggccaacaggctccacaagctcaagctcgagacgtgggtcgttccaagatacacctctcagtacctgtccaagcaaggcctgtacgcagtggggcgtgtggtggagaaggcggtggcggacgcggaggcgagtggcgcgagagtactcacgctgggtctactgaaccaggcaaacgagctgaacaaaaacggcgagctgtacgtcatcaggaagcccagcatgaggaccaagatcgtcgacgggacaagcctggccgccgccgccgtgctccacatgatccctgagggcaccgacgaggtgctcctcctgggagacgccggcggcaataagatggcgggcgtgctggcttcggcgctctgcgaacgcgagattcaggttcacgtggtcgacaaggacctgtacgagtccgtgaagcagcagctgcgcccagagacgcacgagcatctcctccacctcgctgagtggtggagtcacagcgccaagacgaccaaggtatggctcgtcggcgacaggctgacgggcgaggagcagaggagggcgcagggcggcgcccacttcgttccctactcgcagttccctcctggcgccgtcgtccgcgccgactgcgtctaccacagcaccccggcgctggtggtgccggacgccttcgaggacctccacgcatgcgagaactggctgccgcggagggtgatgagcgcgtggcgcgcggcgggcatcgtgcacgcgctcgaaggctgggacgcgcacgagtgcggcgccagggtcaccggcgtcgacaaggcctggcgcgccgcgctcgcccacggcttccgcccctacgaccgctatggcgccaactaatacgtgaagtgaccattacgaacgacgacgactacgaagcgtacctgtgcatggaatgatgagtagcatctatctatgaagacgaggaaaaaaacacttctttgtttatcgttcaagatgcaaaaagaaaaacaaagattcgtctttgacagttcacaccacggcccatactgctctttcacgtaaaccgggtgaattccgtgtacgtacggtacgtgtgtgtactaccctacaattaattactactagttgggccaggtccggcaaggcggcaacgatcacagagtcctcagcggcccatggtaaaacccaaaccgctggttccaaacaattcacggagcgggaaggacggggacggacacctggctcgcccgactggccccgaactgtctatcagtctctcgctcaaagtcaaaaccggcatctttgacccatcctccgtcccttccctttcgcgggaagacgtcgatatagtcgatcacagccattcgtgtgggagtggacgacgcagatggaccagtaccgcatgtctccaacccaactcgagacgctccgccgaaccagggtagtggtggtgagttgggtgtcgtgggcgattgtgttggaaatcatactctggtcagtaagtaagagtagtaattagatggttgtctgttgcggttcagctgtccaagagcagtgagtttgttgataggtggttgcatttatcctgacaggctgtttgtgagtagctcagaaacaagaaaaaaaagaatataacatgggctgaaaaggtgtccgtatgtgttattcttgtttacattctttgtttttaattggaactcgctgtgatttag

SEQ ID NO: 119976 - DNA, 3125 bp, Zea Mays
gctgccgtctgcacctaaagttttgcagtgaatttattgagtcactactgccagctacagagggacgacgacgagcattgggaccagagcgcgcggtaaaaaaaataaataaaagcgtgtactttagttgattttgggcctccattgctaggagactacgtactcgattcctttggcacctctccccttctccctctactcctctctaccagtgtacctatataaagatggcaatgggcatgccctctacagctgaaagagctaaactaccacacacacacacatcctacgcatcttctcgcagccatctttgtggaagcaaggcgggcaacatcgtgtggctagccagcaagagggagagaaacaagcacaagtatggcctcaaaacctggccctctgagtcgctggccatggcaagatcttggaaactacaagtacgcgctggtggctccatgggcggtgcgcagcacgtacaggttcgtgaggagcgggagcggggagcgggacctgctcgccttcgccgtgctgccggtgctcctcctccgcctcctctacagccagctctggatcaccgtgtcccgccaccagacggcccggagcaggcacaggatcgtcaacaagagcctcgacttcgagcaggtcgacagggagaggaactgggacgaccagatcctgctgacggcgctgctcttctacgcggtgaacgcggcggtgccggtggcgcagtcggtgccgtggtgggactcgagggggctgctggtggcggcgctcctccacgtgggtcccgtggagttcctctactactggctccaccgcgcgctgcaccaccactacctctacgcccggtaccactcgcaccaccacgcctccatcgtcaccgagcccatcacatcggtgatccatccgttcgcggaggagctggtgtacttcaccctgttcgccatcccgctgctcaccatggtgggcaccggcaccgcctccgtggccgtggccaacggctacctcgcctacatcgacttcatgaactacctcggccactgcaacttcgagctcgtccccaggctgctcttcgacgtcttccctcccctcaagtacctcatgttccactcgctgcaccacacgcagttccgcagcaactactcgctcttcatgccgctctacgaccacctgtacggcacggcggacaagtcaagcgacgacctgtacgagcgcgcgctgcagggccgcgccggggaggacgcgcccgacgtcgtccacctcacgcacctcaccacgccggcctccctcctccgcctccgcctcggcttcgcgtccctcgccgccgcgccggcgccgcccgcgtcccgctacggcgccggcagcagcagcagcagcagcagcagcctggcggcggtggcgtgcccgctggccgcgctcctcggctggacccggaccgccttcaggtccgaggccaacaggctccacaagctcaagctcgagacgtgggtcgttccaagatacacctctcagtacctgtccaagcaaggcctgtacgcagtggggcgtgtggtggagaaggcggtggcggacgcggaggcgagtggcgcgagagtactcacgctgggtctactgaaccaggcaaacgagctgaacaaaaacggcgagctgtacgtcatcaggaagcccagcatgaggaccaagatcgtcgacgggacaagcctggccgccgccgccgtgctccacatgatccctgagggcaccgacgaggtgctcctcctgggagacgccggcggcaataagatggcgggcgtgctggcttcggcgctctgcgaacgcgagattcaggttcacgtggtcgacaaggacctgtacgagtccgtgaagcagcagctgcgcccagagacgcacgagcatctcctccacctcgctgagtggtggagtcacagcgccaagacgaccaaggtatggctcgtcggcgacaggctgacgggcgaggagcagaggagggcgcagggcggcgcccacttcgttccctactcgcagttccctcctggcgccgtcgtccgcgccgactgcgtctaccacagcaccccggcgctggtggtgccggacgccttcgaggacctccacgcatgcgagaactggctgccgcggagggtgatgagcgcgtggcgcgcggcgggcatcgtgcacgcgctcgaaggctgggacgcgcacgagtgcggcgccagggtcaccggcgtcgacaaggcctggcgcgccgcgctcgcccacggcttccgcccctacgaccgctatggcgccaactaatacgtgaagtgaccattacgaacgacgacgactacgaagcgtacctgtgcatggaatgatgagtagcatctatctatgaagacgaggaaaaaaacacttctttgtttatcgttcaagatgcaaaaagaaaaacaaagattcgtctttgacagttcacaccacggcccatactgctctttcacgtaaaccgggtgaattccgtgtacgtacggtacgtgtgtgtactaccctacaattaattactactagttgggccaggtccggcaaggcggcaacgatcacagagtcctcagcggcccatggtaaaacccaaaccgctggttccaaacaattcacggagcgggaaggacggggacggacacctggctcgcccgactggccccgaactgtctatcagtctctcgctcaaagtcaaaaccggcatctttgacccatcctccgtcccttccctttcgcgggaagacgtcgatatagtcgatcacagccattcgtgtgggagtggacgacgcagatggaccagtaccgcatgtctccaacccaactcgagacgctccgccgaaccagggtagtggtggtgagttgggtgtcgtgggcgattgtgttggaaatcatactctggtcagtaagtaagagtagtaattagatggttgtctgttgcggttcagctgtccaagagcagtgagtttgttgataggtggttgcatttatcctgacaggctgtttgtgagtagctcagaaacaagaaaaaaaagaatataacatgggctgaaaaggtgtccgtatgtgttattcttgtttacattctttgtttttaattggaactcgctgtgatttag

SEQ ID NO: 119977 - DNA, 3137 bp, Zea Mays
gctgccgtctgcacctaaagttttgcagtgaatttattgagtcactactgccagctacagagggacgacgacgagcattgggaccagagcgcgcggtaaaaaaaataaataaaagcgtgtactttagttgattttgggcctccattgctaggagactacgtactcgattcctttggcacctctccccttctccctctactcctctctaccagtgtacctatataaagatggcaatgggcatgccctctacagctgaaagagctaaactaccacacacacacacatcctacgcatcttctcgcagccatctttgtggaagcaaggcgggcaacatcgtgtggctagccagcaagagggagagaaacaagcacaagtatggcctcaaaacctggccctctgagtcgctggccatggcaagatcttggaaactacaagtacgcgctggtggctccatgggcggtgcgcagcacgtacaggttcgtgaggagcgggagcggggagcgggacctgctcgccttcgccgtgctgccggtgctcctcctccgcctcctctacagccagctctggatcaccgtgtcccgccaccagacggcccggagcaggcacaggatcgtcaacaagagcctcgacttcgagcaggtcgacagggagaggaactgggacgaccagatcctgctgacggcgctgctcttctacgcggtgaacgcggcggtgccggtggcgcagtcggtgccgtggtgggactcgagggggctgctggtggcggcgctcctccacgtgggtcccgtggagttcctctactactggctccaccgcgcgctgcaccaccactacctctacgcccggtaccactcgcaccaccacgcctccatcgtcaccgagcccatcacatcggtgatccatccgttcgcggaggagctggtgtacttcaccctgttcgccatcccgctgctcaccatggtgggcaccggcaccgcctccgtggccgtggccaacggctacctcgcctacatcgacttcatgaactacctcggccactgcaacttcgagctcgtccccaggctgctcttcgacgtcttccctcccctcaagtacctcatgtacacgccatcgttccactcgctgcaccacacgcagttccgcagcaactactcgctcttcatgccgctctacgaccacctgtacggcacggcggacaagtcaagcgacgacctgtacgagcgcgcgctgcagggccgcgccggggaggacgcgcccgacgtcgtccacctcacgcacctcaccacgccggcctccctcctccgcctccgcctcggcttcgcgtccctcgccgccgcgccggcgccgcccgcgtcccgctacggcgccggcagcagcagcagcagcagcagcagcctggcggcggtggcgtgcccgctggccgcgctcctcggctggacccggaccgccttcaggtccgaggccaacaggctccacaagctcaagctcgagacgtgggtcgttccaagatacacctctcagtacctgtccaagcaaggcctgtacgcagtggggcgtgtggtggagaaggcggtggcggacgcggaggcgagtggcgcgagagtactcacgctgggtctactgaaccaggcaaacgagctgaacaaaaacggcgagctgtacgtcatcaggaagcccagcatgaggaccaagatcgtcgacgggacaagcctggccgccgccgccgtgctccacatgatccctgagggcaccgacgaggtgctcctcctgggagacgccggcggcaataagatggcgggcgtgctggcttcggcgctctgcgaacgcgagattcaggttcacgtggtcgacaaggacctgtacgagtccgtgaagcagcagctgcgcccagagacgcacgagcatctcctccacctcgctgagtggtggagtcacagcgccaagacgaccaaggtatggctcgtcggcgacaggctgacgggcgaggagcagaggagggcgcagggcggcgcccacttcgttccctactcgcagttccctcctggcgccgtcgtccgcgccgactgcgtctaccacagcaccccggcgctggtggtgccggacgccttcgaggacctccacgcatgcgagaactggctgccgcggagggtgatgagcgcgtggcgcgcggcgggcatcgtgcacgcgctcgaaggctgggacgcgcacgagtgcggcgccagggtcaccggcgtcgacaaggcctggcgcgccgcgctcgcccacggcttccgcccctacgaccgctatggcgccaactaatacgtgaagtgaccattacgaacgacgacgactacgaagcgtacctgtgcatggaatgatgagtagcatctatctatgaagacgaggaaaaaaacacttctttgtttatcgttcaagatgcaaaaagaaaaacaaagattcgtctttgacagttcacaccacggcccatactgctctttcacgtaaaccgggtgaattccgtgtacgtacggtacgtgtgtgtactaccctacaattaattactactagttgggccaggtccggcaaggcggcaacgatcacagagtcctcagcggcccatggtaaaacccaaaccgctggttccaaacaattcacggagcgggaaggacggggacggacacctggctcgcccgactggccccgaactgtctatcagtctctcgctcaaagtcaaaaccggcatctttgacccatcctccgtcccttccctttcgcgggaagacgtcgatatagtcgatcacagccattcgtgtgggagtggacgacgcagatggaccagtaccgcatgtctccaacccaactcgagacgctccgccgaaccagggtagtggtggtgagttgggtgtcgtgggcgattgtgttggaaatcatactctggtcagtaagtaagagtagtaattagatggttgtctgttgcggttcagctgtccaagagcagtgagtttgttgataggtggttgcatttatcctgacaggctgtttgtgagtagctcagaaacaagaaaaaaaagaatataacatgggctgaaaaggtgtccgtatgtgttattcttgtttacattctttgtttttaattggaactcgctgtgatttag

SEQ ID NO: 119978 - DNA, 100 bp, Zea Mays
ggccttttgccgaatataccattttgtctgttcctcatctccatttctatctgcttgtttattggcagtcagatatgtagaaccatgaacgaagttatgc

SEQ ID NO: 119979 - DNA, 1355 bp, Zea Mays
ttcctgtcgttgttcataataccaaaaatctcctctcaccctggcaacatccaaagaagagcaaagtggagagatgttttcaatggcaccatcaccaactctggtaactcgagcccaccgtgctcaagggaggagaccaacgccaaggagtacaacatttttcttcaggtgtaatgaggtgttgtttcatctcaactagagacgaagaaaagtgagcaactattcaatatcaatatatgatgtgtgatttgtattattgcaaaacgcaatatctgtgttgcccttgaatatttatttattccattttaattttttgtgcttgtatttcctaacagttttttctaacagtcatcatcagcagggtggcaacatatgcttttcatttcacttccaccatgaatttgttttcctaattggttaatagttctttaaaggaatcagctaacagttggccttcctatgtggctatggttatgtaatgtcttcgtttaaagctaatcttatttctctctgttttttccctaggtgcccaaacctgcactatttcagccttcctagcacctgtatgacttacgatcagttctgcaaggcgataggtggacttcaatcgcttaaaggcatggtagtggacgagagtctgattaattatgatgtcctcctgcatgtgcaccagtgctgcccagactttgtggggctgaaggtgtctgcactgtacgtggatgaagagatggcctcagtcatctgcaactctcttcctcgactgaaaaagttggagataccaagttgtgacatgtcttccgctgcgattataagttccttgattgcctagagcagctcgagcacctggacatctcaggttacgagacatcagccatctcaagcacggttcttgagaaagcttcgtggctcaaggtctttctctggaattcgaaatttgagcttggggagttcgtggactgttccaattgtggagagcacaacattaaccctcaagaaccctgcaagtgcatgatggagcacaaggtcatggactggctggctggaccttcataagcttcctgaaccaaatgcgtttcttcttgtgtcttgttaaatcaagacgttttcctggctgtaaaattccaacctctgtcaaagttggtgtctgagctgtatgcacaaggaaatatgctacttcaaatgtttagcgcgccttagagaggtctgcaactttttaatgtaacaaatcgttgtatcaagtgttaatggaacctcttctttacaccaatgagccggtacgaaacatctgtgcttattttgaagcgatttcaccttggagtcaaaccttgttgtgtggtgagtttttgcttcggcta

SEQ ID NO: 119980 - DNA, 1657 bp, Zea Mays
ctttatgtgaagcttacttgagctgaattgtagaagtgaaacataaatttatggagttggagttggacctatgtcaaccagggcctgatgatagtactatatatatgtaaacacccacaagctaaacacctcagcaaagaagaagaatggcgttgctcggcgagtacagcagtcaggagctcctccagggtcagctccagctctggcaccagtccctgggcttcttcaagtccctcgcgctcgcggtcgccatggacctccgcatcgccgacgccatccaccgcctcggtggcgccgccacccttccccagatactcgcggaggccgggatcaagatcgacccgtgcaacaacaagctccgcgacctgcgccgcgtcatgcgcgcgctcaccgtgtcgggcatcttcaccgtcgtccagcgaccagcgtcgtcgtcagatggaggcggcaggcgtggcgcagaagcggaaggtccggtctacaagctgacggcggcctcccgcctcctcgtcgtcggagagaaggagagctcgacgacggcgacgacgaggcagctgcctcctcctccttctctgaccgtttatgtgcagctcttactcgaaacctgccgaggatccgcgttcagcagggccgtgcgcgagtggttccagttccagcagccgccgcaggatgatgggcagcaccagcagccggctggccgcctgtcgtccccgttcgccctggcgtgcggcgggcagacgatctgggagcgagccgagcgcgacgcccacgcgttcccgttcgacgacgccatggcctcggacaccgccttcctcatgccgatcgtgctgagggagtgcggcgacgaggtgttcggccgtggcctgacctccctcgtcgacgtcgccggcggcctcggcggggctgccgccaccatcgcggcggccttcccggacctcagctgcaccgtcctggacctcccgcatgtcgtcgcaaaggcagctgccggcaccaccgacagcaacgtccagtacgttgccggtgacatgtttcaatgcatcccaccggcggacgcggtgttgctcaagtggattcttcacgactggagcgacgacgagtgtgtgaggatactgaagaactgcaagcaagccatacccccacgagcggcgggagggaaggtgataatcatagacatggtggtggccggaccaggatcaggatccgcggacgatgagccgtcggagtcggacttgaggcacgtagagacgcagatcttgtttgacctcttgatgatgtgcgtcaacggagtggagcgagacgagcaggagtggaagaagatcttctccgaggctgggtttcaggactacaggattatgccgcttctgggcgttcgatccatcatcgagctctatcctaattaaaattagtatactgaattgaaagctaagctcgccactcgcgacaagcttgttgtggttgtggctgggcgtgtggtggtgatcgaacgtgtgtttgccatgctcagggatccatgcatgctatatgtactccctccgtttctttttatttgtcgctggatagttcaattttgtactatttagcgacaaataaaacgaaacggagggagtaataaaataacatccactacatgattgattatatcggtttcgatccatca

SEQ ID NO: 119981 - DNA, 3574 bp, Zea Mays
gagggggggcaaccggcggcggtcggtcgcggaggatggtgaagttctcgcgggagtacgaggccagcatcatccccgagtggaaggccgccttcgtcgactacaggtgcctcaagaagctcgtcaagaggatcaagatcgcccgccgcgacgccaccagggaagctgggggaggtagcagcagcgacgccaccagcagctacggcttctccgtcctcgaccccgtccgcgccctcgccgcccacttcgcctccgcaacgccgccggcggtctcaccagtacgtacgccgtgtcccggccggctcgcatgccgcatgccgtcctgcacgcatgagcgagagtttttggagaaggcgggcgaggagctggagaaggtgaacaagttctacgcggcgcaggaggcggacatgctggcgcgcggcgccgcgctcgtcgagcagctccgcatcctggccgacgtcaagcgcatcctcgccaaccacgcggtggcgtcccggcgcagccggcccgccggagactcgccgccgcccccgccgtccgcggacgggcggtccaacagcggccgccacctcctctcctcctcctccccattcctgcaggcctcgccgcagtccatgttagatgggagcgcggagctgccgcaggcgcgcgtggcggaggaggtgatggcggcgctggagcgcaacggcgtgagcttcgtgggcagcgggctgggcagcaaggccaagaaggacggcggcgggaagcagctcacggggcgcgcggccgcgctgccggccacggtgcgcatcgacgtcccgcccaccagccccggccgggcggcgctcaaggtgtgggaggagctcgtcaacgtgctccgcaaggacggcgccgaccccgccgccgccttcgtccaccgcaagaaggtccagcacgccgagaagagcatccgcgacgccttcctcgccctctaccgcggcctcgacctcctcaacaagttcagctccctcaatgtgaaggctttcaccaaaatattgaagaaattcgtcaaggtgtcggagcagcagcggaagactgacctgttctcggagaaggtgaagaggtcgccgttcagcagctctgacaaggtgcttcagctggcagacgaggtggagtgcatcttctcgaggcacttcgcgggcaacgacaggaaggtggccatgaagtacctgaagccgcagcagcccaggaacacccacatgatcaccttcctcgtaggcctcttcacaggcacattcgtgtccctgttcatcatatactcggtcctagcccatgtcgccggcatcttctcttcgacaggaaacacagcctacatggagatcgtctaccacgtcttcagcatgtttgcactcatcagcctgcacgtcttcctgtacgggtgcaacctcctggcgtggaagagcagcaggattagccacaacttcatattcgacttctcccccagcaccgccctgacgcaccgcgacgccttcctcttgtcggcgtccatcatgtgcaccgtcgtcgcggcgctggtcgtcaacctcttcctcagcaacgccggggcgacctacgccaacgcgttgcccggcgcacttctgcttctgtcagcagcggctctcttctgcccattcaacgtcttctaccgctccacgcgctactgcttcatgcgcgtcatgcgcaacatcatgctgtcgccgttctacaaggttctgatggcggatttcttcatggctgaccagctaacaagccagatcgcactgctaagacacctcgagttcacggggtgctacttcatggctggaaccttcacgactcacgcgtatgggagctgcaccagcagctcccagtacaagaacctggcgtacgtgctttccttcctgccttactactggagagcaatgcagtgtctgagaaggtacctggaagaaggccatgacatcgaccagctcgccaacgcgggcaagtacatatcggcgatggtagcagctgctgtcaggttcaagtacgccgcggcaccgacgccgttctggatgtggatggtcatagtgtcgtccacaggcgccaccatctaccagctctactgggatttcgtcatggactggggcttcttagacctcagatctaagaaccgttggctccgagaccagctcatcctcaagaacaagccgatctactatgcttccatgatgctcaaccttgtgctgcgcctggcctgggccgagagcgtgatgaagctccgtctcggtatggtggagtctcgcctgctggatttctcactcgcttcactggaaatcatccggcgagggcactggaacttctacaggctggagaatgaacacttgaacaacgctggaaagttcagggcagtgaagaccgtcccgttaccattccgtgaacttgaaactgattgatcaagtcaaagataagaacttgccagcatgttcccaggaatttaaggaggggggcaagagttccaggaatggacacactgcccctgctagtgcttgcgcaaggattggtgttcaagtgggtaataaaacaaatcagagagcataactgcacaagagcaagacgctgcagatttttaaagatggaattagctcagacggtgccgtgtagttgaggcgccagggtcaggaaagatgatgtgcgtttactctttattggttgattgaggattgttgcatgctaatcgactaacaaatccttgacttcgtcgattcattaacctatgaatgtatctgggaactgatgactgaaaaatattgcatgaaaatacatggtggtcaaacagaatttgaaccatgtttccataaatagtgtttcaaccaagagatgagaaacagcatgaaaacatgcaaggcacaaaataagagagaagtacagaagactgaaaataatttataattgcaggggtaaaaactagataatattacagtgaaagcgcgagatggttgacacggcagatgacaccacatgtgaagcataaacaaagtgcatatattacatggcatgttgcacacaaaataaacaagaaatagctagctacagcctacaagtacctccaatgtgccgggcggtctcttgagacgagaagaacccttgatgatgagtagtcaaatgtaggacagtacagatcatcagggccaatagcttctctcgctgcaatggtgtttccacggtcaaagctgtaggttggctgcgtgtcttccttaaacgtgtcaaaggcgaacagccccataccacatgcagccaagacaaggtttgagtcgccccatacttgggttatcgcagagtgatggatatgagcgttgaattcgggtaactcataggtggcgacaagtttcccctttctcaacgagtattgctgaactcgtgatcttgaccctccttttatttgcagccttccttctgtgctaccaataaataccgagtccccacgtgaaaagattgagtttgctgtgccgccatgtcttgctattttaagcccaatgccagcaggtacacgaaaatcaaatacattgacactttcctgtgtgctgaaaacaccatcatttccttccacctcagatga

SEQ ID NO: 119982 - DNA, 780 bp, Zea Mays
gcgctggatgcggaagccgtcgaagccagcgagcgtcatgtcggtccggagcgcggcgccgcgcttccagatgcggtaggtgtcggagggcgcgatgcggccgatgaacgggatgacggaggactcgaagtggaaggagatctccatgtagaagtcgcggatgcgggagatggaggcgaggatgcgcgggaggcggcggcaccacttggcccaggcgagcggctggtagtggcgcgcgatgatggtggcgatggcctcctcgcgcgtgcagacggcctcctggagcgcggaccagccgtcggcgttctgcagcgaccagtcggcgccggccgacatgaggatgtcggcggcgacggggtcccggaggcgcacggcgaggtggagcggggtctccctccgcggcacgtcgcggcggtcgatgacggccgagaccgcgtccgccacggcctcccccgcgacggactcctcctcggtggccacctccccggcgcgcggcaggcgcgggagggccgccaccagtcgacgcagcgccgcgtggtcgcgccgcaggacggcgaggtgcgccgggctgtgcgcatacttggacacgtcatccatggcggggggtggggcgggtccggccggccggtcctgcgggcggggccagatctggcgcggcgcgggtgcggacgctcctccgggtcgcgctccggcgccggtgccggcgccggtggtgcgggcgaggggcggacgagcggtgggagggaggggcgggttggccggagtcggaggggagggaag

SEQ ID NO: 119983 - DNA, 3022 bp, Zea Mays
gctccctcctccatctctcgcctcgccgcgtccccttcctctccacgggctcccacgaaccatagagctcgcccgtctacggagcacgggctcaccagcagcggatccccaggtcgtacctgctcccgaaaccctagctcagctgatcccacacacacaccccgatggcgccgccgcccaccccgcctacacgtccggcgccggcgcctcaggccacgggcgcgaccgcgacgcccctcaggacgcccgcgtccaagcaccgtctccacttccccgccgccaccccgaggaacgccaaccacggcggcgccacggagcacccggtcgaggtgatcggccgcatccggaacctcgcctcgggtgtctcgtccgcgctggagttcgcgggcggcgggacggccgtgcgcgtgcgcggcgacgccggcgggtgccgcgacttcaccctcgacggcgtctccgtgtcggaggaggaggacctcgaggggttctaccgccggttcgtgcgctccaggatccagggcgtccgggtcggcgccaagtgcaccgtcatggtctacgggcccacggggtccgggaagagccacaccatgttcggctgcgccaggcagcccgggatcgtgtaccgtgccctcagggacatcctggagggaggcggaggtagcgaaggcgactctgcagaggatgacgccggcctcttcgttcaggtcgcggtgctggagatctataacgaggaggtctacgatttgctcgtgggcagcggggccgctgctaaaggaaacgcccccaaggcgagactagaagtaatggggaagaaagctaagaatgcaacctatatatctggaaatgaacctggaaggatatcaagagaagtttctaaagttgaaaagcgaagaactgtgaagagcacactttgtaatgagagaagttcacggagccattgcgtgattatcctggatgtcccagctgtgggaggaaggttgatgcttgtggacatggctggatctgaaaacatagaagcagcaggtcaaacgggatttgaagccaagatgcagacagcaaaaatcaaccaagggaacactgctttgaagcgagtggttgaatctatagctaatggtgattcccatgttccatttagggacagcaagctcacaatgctactacaggattcattcgaggatgacaaatcaaaaatcctaatgattctgtgtgctagtcctgacccaaaggaactgcacaagacagtttctactttagaatatggtgccaaggcaaagtgtattatccgtgctgctcatgccgcaacacctagggacaaaatgagctccgaggagtcatctgcaatgctcaattcaagaattgttgcaatgaaccagttcatccacaagcttcaaaaagagaacaaattgagggagaaagagcgcaatgaggctcgcaatgtgctaaagctgagggaagaggagctagcacaattaagagcaaagctcaacttgatagaaaggcagggaaaagctactgagaatgagatcaattcaaaagttatggagaaaacccagacattgaggggtgaactcatgaagatggaagaagcgatgtataagcagcagcaagagctctgtgtgctaaggcagcgactgcaggaggttgagcgtgaaaaggctgatagttgtcagccagggcagcaggatgtaattggaggtagactgctggcacggctatcagagatgcctgcaggccttgatcaatcaatggcaatcgacatgtctatggacttagatatgggagatcagacgtccatgcaagatgtcaaggtaataaaggaggatacttgccagcagggccaaatatggaatcacacaaccacagcagcaagtgcttgcacagggtctttggtgcaagaagatgatgtcaggctgtccgggtatcctgaaaagactgtcctcagcactgtgtttgaggagggagatgaagattatgcagagaagaaatgtggccttcaagaggaggtacgcaaggaggttgtagatgagaactttaaggtggacatagcacaacatacactttctgagccagatcatcctgcaacaaggaagcatcatattgagaacatgttcaggctctgtggcaaccatcgtgaaatagctaagaagccaaaggttcagtcaccagcaaaggaaatgttctggaatgagaaccagtctccagcaaagcaagtgtttgggaatcagaacaaatcaccagcaaacaaaatttttggagacgaaaacaaggagccgttggcatggggagctatagagacccccatgtgtgacgtcagagtgactgacagcccagtgtcttctcagctttctccaatcgtatgccaagttgtggatgcgccattatcggcgcaaccggatacatgcagtgcagtggaagagagtgatccgaacaaggagaacagccttgctggacagaaggatggcggcctcttggaagtttacataaaatgggagtctggcaacctgatcaaagggctgaagctactgcacaactcgtgcctttcagatctgaggaagtttatagaggctcacttcgaagaagcaggcagcaaacagaagcatcagttcaccttccttctcctcggggatccgtccggtgctccggtgtcccgggacacggaagcttcggtgcagataagcaggctgcctcactggaacaaccagccggacagctacctggcgtgcctgcgcgcggccaagaagccgtctgcggaccacgtgcccttcagcccgctggacagcaatctgaacacggttcacctcgccggtgcggtgtcgcccaaggtcaaccagatgagccccagctacatccgggagctgagagcttgagctcccgtggtatctgttgcttgtccctcgtggatcgattatgttttgtgtaagatttgattgctagtctggtttgctaaccggaactactgcaacccgtgaccaagataattgcagcgaggagatgacaaatgccacctctccaaagttgtgtg

SEQ ID NO: 119984 - DNA, 2217 bp, Zea Mays
gccgcggccgccccgcgaagagaggtgacgcggcgagcacacggccatagaggttactgctctcctgggctgtgaggctgtgaggctgtgaccaaacgctctacgctcccacttcccaccaactcccaaatcctccctgaaaataagaatacgagggtgagcgatcgagcggtcgagggggttgtgcttgtgcgtcagatcaaccgactggtggcgaggctgcgggaggagatggccggcgaagggaatggggatgaagggtggaggcggagcggcatcgaggtcagcgccctgcagttcggctacgacgggcagccgccgctcttcgcgcgcttcaacctctgcgtcgcacccggctcccgctgcctcctcgtcggcgccaacggatcagaatttgtctacctccaaagttggtgtgtaacaggagggagttcattatccatttcagataagtcttatgtgatgtacagtcatacagatggcccctagtgcttcatgtagcgctttccagccgagatgtggtttccagctttgctgagtaaattttatgtacaacggcttatgcacttacttatgccaatactcaggcaagaccacactcttgaagattcttgcgggaaagcatatggttggaggaagagatgtggtccgtgtcctcaatggttccgcttttcatgatacacagctagtgtgcaatggtgacctttcgtacttgggtggttcttggagccgtactattggttcagctggggatgttccactgcaaggcgacttctctgctgagcacatgatttttggagttgatggggttgatcctgtcaggcgagagaagctggttgatctgctagacattgatctgcagtggcgcatgcataaagtttcagatgggcagcgccgcagggtgcaaatctgcatgggtcttcttcatccatacaaggtgcttttgctcgatgagatcacggttgatctggacgtggtgaccaggatggacctgcttggtttcttcaaggaagagtgcgagcagagggaagctaccatcgtgtacgccacccatatatttgacggactcgagacgtgggctaccgactttgcgtacatccaagaaggcgagctgagaaggtccgggagatactccgacatcgaggagctaaggagcgccaagaacttgctgtcggtagtcgagtcgtggctgaggtcagagaccaaacttccgaagaaggaacccccaccacgtcctgagacccaggccaggcgttcctcgccgttcgatgcttctcctttccgttcgtcacgccacatggcctactaccgttgatggtttcccaactcgtactacaccattgcctcttgttctgcgctatatatatatatttttgttgtcgctcatatcgtatagtagctgtggagtttaatatgtgtcctcttcacggcccttgtagacatcaatcaatatatagcaggcagcacagaaataaaagtttggttcggttggtcttgcgttgatgagcagttggtgacatgacttggtgcccagcacgttcttcttcatcgctcgtcacggcgctgctcgctgtttctgagaatcttatgccatagcctttagatattcagaaaacttttcccacgagaaagttgtgtcgacctttttaggctataaacttttcagctaaccctgtctggctggcggtcaactttggcaaccagcttgtaacctaacgtaattacactaccctaattgcttaggtaaatgatgcttctctttggctgtagtaactgtaatgcatgtgctagccagtgtgctatcctaaaccaaagggccccaccgcttggcagcttgcctgctttgctttgtttaccctttgctaacattatccgtaacgcgcttcacatgaccattaccgcgtacagtgggaaggaaacacgtcaacgtgcagggcttgtatctgtcggtatggccgtacttgccgtccacgcccgtctgctgcccccgtctgatgacgtacatgtgtctctctctctctctctctccgtctctctgtttgtgctatcatttgacttggtggcttcacgtgcccgtctcaccaacccgtgtgtccagtggtgaccggaatcacaaatcagtgcaagtactcgtgacgactggcgtggcctttttggcattccgtggcatggcagcggctcctctgtgtagtgtagcgtaggcaaagcggtgcgaag

SEQ ID NO: 119985 - DNA, 1347 bp, Zea Mays
cgcgaagagaggtgacgcggcgagcacacggccatagaggttactgctctcctgggctgtgaggctgtgaggctgtgaccaaacgctctacgctcccacttcccaccaactcccaaatcctccctgaaaataagaatacgagggtgagcgatcgagcggtcgagggggttgtgcttgtgcgtcagatcaaccgactggtggcgaggctgcgggaggagatggccggcgaagggaatggggatgaagggtggaggcggagcggcatcgaggtcagcgccctgcagttcggctacgacgggcagccgccgctcttcgcgcgcttcaacctctgcgtcgcacccggctcccgctgcctcctcgtcggcgccaacggatcaggcaagaccacactcttgaagattcttgcgggaaagcatatggttggaggaagagatgtggtccgtgtcctcaatggttccgcttttcatgatacacagctagtgtgcaatggtgacctttcgtacttgggtggttcttggagccgtactattggttcagctggggatgttccactgcaaggcgacttctctgctgagcacatgatttttggagttgatggggttgatcctgtcaggcgagagaagctggttgatctgctagacattgatctgcagtggcgcatgcataaagtttcagatgggcagcgccgcagggtgcaaatctgcatgggtcttcttcatccatacaaggtgcttttgctcgatgagatcacggttgatctggacgtggtgaccaggatggacctgcttggtttcttcaaggaagagtgcgagcaggtacacaagttttagtttgctctgaattgcttcctccccgcataacacgaaacgctcgctcgctcgccacagagggaagctaccatcgtgtacgccacccatatatttgacggactcgagacgtgggctaccgactttgcgtacatccaagaaggcgagctgagaaggtccgggagatactccgacatcgaggagctaaggagcgccaagaacttgctgtcggtagtcgagtcgtggctgaggtcagagaccaaacttccgaagaaggaacccccaccacgtcctgagacccaggccaggcgttcctcgccgttcgatgcttctcctttccgttcgtcacgccacatggcctactaccgttgatggtttcccaactcgtactacaccattgcctcttgttctgcgctatatatatatatttttgttgtcgctcatatcgtatagtagctgtggagtttaatatgtgtcctcttcacggcccttgtagacatcaatcaatatatagcaggcagcacagaaataaaagtttggt

SEQ ID NO: 119986 - DNA, 846 bp, Zea Mays
gtgacgcggcgagcacacggccatagaggttactgctctcctgggctgtgaggctgtgaggctgtgaccaaacgctctacgctcccacttcccaccaactcccaaatcctccctgaaaataagaatacgagggtgagcgatcgagcggtcgagggggttgtgcttgtgcgtcagatcaaccgactggtggcgaggctgcgggaggagatggccggcgaagggaatggggatgaagggtggaggcggagcggcatcgaggtcagcgccctgcagttcggctacgacgggcagccgccgctcttcgcgcgcttcaacctctgcgtcgcacccggctcccgctgcctcctcgtcggcgccaacggatcaggcaagaccacactcttgaagattcttgcgggaaagcatatggttggaggaagagatgtggtccgtgtcctcaatggttccgcttttcatgatacacagctagtgtgcaatggtgacctttcgtacttgggtggttcttggagccgtactattggttcagctggggatgttccactgcaaggcgacttctctgctgagcacatgatttttggagttgatggggttgatcctgtcaggcgagagaagctggttgatctgctagacattgatctgcagtggcgcatgcataaagtttcagatgggcagcgccgcagggtgcaaatctgcatgggtcttcttcatccatacaaggtgatgttctgttccttcttttgtgatttttccgttcaggcagcatgatgcttaagctaatatggagtgcgaacttgatgtggtaggataagaacagcccaggacactctaccgttagttatttttttt

SEQ ID NO: 119987 - DNA, 1296 bp, Zea Mays
gtgacgcggcgagcacacggccatagaggttactgctctcctgggctgtgaggctgtgaggctgtgaccaaacgctctacgctcccacttcccaccaactcccaaatcctccctgaaaataagaatacgagggtgagcgatcgagcggtcgagggggttgtgcttgtgcgtcagatcaaccgactggtggcgaggctgcgggaggagatggccggcgaagggaatggggatgaagggtggaggcggagcggcatcgaggtcagcgccctgcagttcggctacgacgggcagccgccgctcttcgcgcgcttcaacctctgcgtcgcacccggctcccgctgcctcctcgtcggcgccaacggatcaggcaagaccacactcttgaagattcttgcgggaaagcatatggttggaggaagagatgtggtccgtgtcctcaatggttccgcttttcatgatacacagctagtgtgcaatggtgacctttcgtacttgggtggttcttggagccgtactattggttcagctggggatgttccactgcaaggcgacttctctgctgagcacatgatttttggagttgatggggttgatcctgtcaggcgagagaagctggttgatctgctagacattgatctgcagtggcgcatgcataaagtttcagatgggcagcgccgcagggtgcaaatctgcatgggtcttcttcatccatacaaggtgcttttgctcgatgagatcacggttgatctggacgtggtgaccaggatggacctgcttggtttcttcaaggaagagtgcgagcagagggaagctaccatcgtgtacgccacccatatatttgacggactcgagacgtgggctaccgactttgcgtacatccaagaaggcgagctgagaaggtccgggagatactccgacatcgaggagctaaggagcgccaagaacttgctgtcggtagtcgagtcgtggctgaggtcagagaccaaacttccgaagaaggaacccccaccacgtcctgagacccaggccaggcgttcctcgccgttcgatgcttctcctttccgttcgtcacgccacatggcctactaccgttgatggtttcccaactcgtactacaccattgcctcttgttctgcgctatatatatatatttttgttgtcgctcatatcgtatagtagctgtggagtttaatatgtgtcctcttcacggcccttgtagacatcaatcaatatatagcaggcagcacagaaataaaagtttggttcggttggtcttgcgttgatgagcagttggtg

SEQ ID NO: 119988 - DNA, 845 bp, Zea Mays
ttgcggtttagtttttcctagtttaatcatgcctttagttagaagattggcactaaggccatcatttctgctggtagaaaacctactggcttatcacttgtttcgttctgtaccctgaaatatgagcagttgatggggttgatcctgtcaggcgagagaagctggttgatctgctagacattgatctgcagtggcgcatgcataaagtttcagatgggcagcgccgcagggtgcaaatctgcatgggtcttcttcatccatacaaggtgcttttgctcgatgagatcacggttgatctggacgtggtgaccaggatggacctgcttggtttcttcaaggaagagtgcgagcagagggaagctaccatcgtgtacgccacccatatatttgacggactcgagacgtgggctaccgactttgcgtacatccaagaaggcgagctgagaaggtccgggagatactccgacatcgaggagctaaggagcgccaagaacttgctgtcggtagtcgagtcgtggctgaggtcagagaccaaacttccgaagaaggaacccccaccacgtcctgagacccaggccaggcgttcctcgccgttcgatgcttctcctttccgttcgtcacgccacatggcctactaccgttgatggtttcccaactcgtactacaccattgcctcttgttctgcgctatatatatatatttttgttgtcgctcatatcgtatagtagctgtggagtttaatatgtgtcctcttcacggcccttgtagacatcaatcaatatatagcaggcagcacagaaataaaagtttggttcggttggtcttgcgttgatgagcagttggtg

SEQ ID NO: 119989 - DNA, 2440 bp, Zea Mays
ggcttctcggataattgttcgcttaaccatacgagcaagagcaacagagcaaagcaagcgaaaggcggccacaggcgcagcgtagttgtccctgtccgtcgcttgcgccaacctgctgcccaccgttaatcagttttctttaaccccagctgctgcccgtttactaatcaaatcatcgtccccctccggcccctcctttcccttccgcgcctccctcgtcttcttctcgtctccactccccctctcccaagtcccacccgccgctcccgcccccgtgcgctcgccgacacggtcagtagttccactcggagaaaggaacgcttccccctgcctgtctcgccggatccgttgccccgctgcagtttcgcccgccgctttcactttcgctttcactcgatttagattccatttccgttcgttcgttcctgtttcccttgctcgttcgttcgattggagctagccgccgcctggatctggcctagccgagccccggctgctctgaatcccgattcggttcggctcccttgctctgcggtcgcttccgaggcgtgctcggatctcgtcggagtagagggcctcgcggctcgcttcgggggcgagatggatcatgtggtcgggggcaagttcaagctcggcaagaagatcgggagtggatcgttcggggagctcttcctcgccgtgaatgtgcagaccggggaggaggtcgccgtcaagctggaaaatgtcaagacaaagcacccgcagcttcattacgagtccaagctatacatgcttctccaaggaggaactggcattccgcacctcaagtggttcggcgtcgagggggactacaatgtgatggtgatcgaccttctcggccctagccttgaggacttgttcaactactgcagcagaaagttctctctgaagactgtgctcatgctcgctgaccaaatgattaaccgggttgagtacatgcatcaaaaggggtttcttcaccgtgatataaagcctgataatttcctcatggggcttggtaggaaagccaatcaggtatatataatagactatggactagcgaaaaaatatagggaccttcaaactcataagcacatcccgtacagagagaacaagaacctcactggaactgcacgatatgcaagtgtcaacacccaccttggtgttgagcaaagcaggcgagatgatttagaatccctcggttatgttcttatgtacttccttaggggcagcctaccatggcaggggctgaaggcaggaaccaagaagcagaaatatgacaagatcagcgagaaaaagatgctcactcctgtggaggtactctgcaaatcgtacccatcagagttcatctcctacttccactactgccgttcgttgcggtttgaagacaagcctgactattcttacctgaagagactattccgcgatctctttatccgggaaggataccagttcgactacgtgtttgactggaccattctaaagtatcctcaaataggctccaacccacggaccagggccggtgaaagaactagtggcgctgctggaccctcaatggataggattgagaagaccccaggagaagcgtccggtagaaggaaccctagtggtcctgtgaatcagagcgacagttacgcgcaacggccacgcgagaccgtatccatgtcgctaaaggagattatgcatagcactgaccggtctggggaaaggactgtggagagaccacgcacgtcctcacgcacaggcagcgcatcccgcagagccgttgcgtcaagcagcaggccagcaacctcgtccatggaaccaagcgagcagcagtatagccgggcgagcagactgttctctagcaacagtggcagccggccatccagcgcccagagagtcaaccctgcgccgggcgagtctagggccacctccctttcgcgggcagcggtcgcgagaggctcccgcgacgagccactccaccgcagcctggagctcctttcccttggcagcggcaagaggaaatagcgggaaggaagccgatctgatagcggaagggaaaagaatgcctgttggcgactctgtaaatgacggggcatgtcacctgttcttcgccagcagttcttcccctggggcatcccgtaatttcatggtgcccgccccggccttttaccatggctccgtagatagcaataattcgttgttgaatgtgcgtgctgtgttgcagtcgcgttagggccaagtcctagcctttgtggtgattagatttagggggtggtcaagattcacatatttatgtttcttaaccctctcctggacttggcgactcttttttttaccccctcccgagacaagtgcccgtgcgtttcttgttgaactctgaatttgcttattcaacagaagttgataatgataataaaagaagaggcatcctgtgtaaatcgatgcctcattttcttac

SEQ ID NO: 119990 - DNA, 108 bp, Zea Mays
cttcacaaattcacagcaaactttcttttagcgcataattattttgttgcaactggtatcattttttggtttcttcaactatctgcaagcaggaccactacaatataa

SEQ ID NO: 119991 - DNA, 956 bp, Zea Mays
ttccatcttctccaaccaagaaggtgggaaatctaggcctacctcccgtggagctcgatctggagtgggacatcgattctgctaatttgtgacagatcatgcaggaataggaggccaagagaatttctacaaccacaatgaagacgacaccaggacgatgaagtccggtcgaccggattttgtagttcctaggcaagttcaagaggcggggggacgcaaattcgtaagtggtggattcctctcggggcaccgcgggcgggcagccgcctgtggaacctgctaagatgaagggccttctcaagggcctccgatacatctcgcaaatttttgatgcgaaggagccggagatgcagatcgggaagccgaccgacgtgaagcacgtggcgcacatcggctgggacaacgcctccgtcaccgcgcccagctgggtagccgcttccgttccagttccacccccgaccacgccgttcccgtgctccgcgccgcgtccgaatgtccgaactccaactaacagctgcggttgggcgtgtcatgtgctgcagatggacgaattcaaggcttcgccggggacggcgagaggcagcgatcctgagccctcgcagcccggtggatcggaaggatgcggagaggagcaggccggaggaggagaagacggcggcggcaaggcggagcggccgcggagggcgagggggaacaaggggtcgggcggcaacgagccggcgaagcggcgggactgcgcggccgaggggttgcggcgcgaccggcgggtcgcgaaggcggcggacgcggcagagggcgccgagggccagggggacgccgcggcggcggcgccgaagcagcggcggaggaagccccgggcggcgtccgggggcaggtccaagtcatcgtcgggaggcgccgccgcctcggactcggcgggggcgccgccggacgaggacgatcgctgcggctgttga

SEQ ID NO: 119992 - DNA, 1892 bp, Zea Mays
cattttccctcctccttcccctccgcccacgtatcggctgtcgctcgcgttagtgctgcgcaagcgcatcgcgcgccggcgaatgccacaggcgcgcacgcgtcacctccgatgatcctctcctccggcctctctcccgcggtcccgccccatgtccggcccgtgctgcctgcgtccggcgcaaggggcgacagagacgtcaatcatggatgaacagtgcgtctgatacgatctatctcctccctctccgcgcgccgtatatacctgtagaccgatagatggaatggaaccggcggggtcgttgtcgtcgtcgtcgtcttccctccgatccccttctctcatcatcctgcatcgtacacgtatacctgtcgatcgcatgcgctaacggcgtacgcccccggcctcctctctcaggctagatctcagctccgtcctcgtcctcctcctcgatccatctctgcctctgcctctgcccgggctgggattaattgtagtaccagcagcacccctccgatcgatctccttgaatctgttgttgcttgcttccccaaacttcttgttttatttctttctcgatctctcttcccctatctagctatatatatcttcttcctctatttatgtatctaataataactacacatataatgattaaatagtcccggcagtcggcaccaagctatatatatactcccatcctttcctaccagccactgccagaggccaccacaaacccatccggctacagcaagcaaccgtagcagtcgtagatgtgtgcagcgcgcgcagcgcagccaattccttcttagttcttactccccggggccttccctctgtctctctcctcttctcttcagatcgacgtgctggttgcagagtgcagactgcgtatataatatacagttcgttgttcttccagctccgcacataaagatagatagatatacagggaaaaagtgtagtagctggagcagaagctagctagcatggggctgcgggacatcgagctcacgctgccgccggggttccggttctaccccagcgacgaggagctggtgtgccactacctgcacggcaaggtggccaacgagcagctcgcaggcgccggcgcagccatggtggaggtggatctgcacacccacgagccgtgggagctccctgacgtggcgaagctgagcaccaacgactggtacttcttcagcttccgcgaccgcaagtacgcgacggggcagcgcgccaaccgcgccaccaggtcgggctactggaaggccaccggcaaggaccgcgccatccacgaccccaggtccgccatcgtcgtcggcatgcgcaagaccctcgtcttctaccgcggccgcgcgcccaacggcgtcaagaccagctgggtgatgcacgagttccggatggtggaggacccccacgccccgcccaaggaggactgggttctatgcagggttttctacaagacgaaggccgacgacgccacggccgacagcgagcaagacgccgtgcgtatgcctcgcggcggcggcggcagcgctgatccgagctgctactcgcctcctccgttccccgcggcgctcggcggcagccaccaccaccaccaccatctgccgccgccgccgccgtcttcagaccgccgccacggcgccggctcccccgacgacgacttccccggaggcatggcgctgctgcagcacagcagcggcatgttcgacttccacggcggccagcctcgccctcacgacggcgtcgtcctcgctgggccggctgctgcagcggcggcgccggcgtcaagagacggcggcgatcagtgtggcagcggcgcgctcattgacctaggactggacgagcactacacctacaacagcctgctgcagatgtgatatatcacg

SEQ ID NO: 119993 - DNA, 700 bp, Zea Mays
gcccaaccatataccttgtgtcttgtgtgtttattatgtcgtgcttctgggaagggagacgagttctctacaacttctcgcgcctaatctgctgacgggagggaagggtgcggatctagtgatctgtggtaacgtagttctcaacacgttatcagcacgctctacctcgacgttgctgttggatccggtctgcaccgactcttcaccatgccggcaggtctccggcctagccgaactgtcctacgcgacaggttttcaattcatctacgtaattaagcggtatgttttctgttcttcttgatctgttccgatcaatcggaagagcaatcaacgcacgtcaccgcggagcaacgccggaagtcgcgcccgcgtaccgaagaatcccgcctgccttgctggagccgtgctcgcgccggaagccgcaccgtgctggaggtcacacccatgtctggcagaccagctccgagctcaggctagcgtttatggcctgcgatcgagtccctggcggccgagcgcccgaacccacatgcagtggccaagctctacctgccggctcctgctaactgatcactcacgttgtggcggagcggcggcctggagggcgaggaaacgggtcgttgggaccgacgacgtctcgatcttgacgaggccgtctgggattttcacttaccaaaagaaacaaatcgatcgttcttttttt

SEQ ID NO: 119994 - DNA, 318 bp, Zea Mays
ggattcgtcgctgccttttttctttctttctttctggtactgctatctatccatctctttccattttcctcatgtccctgtttctgtttgaccgcatagccgccatgttgcattctattttggctcatcataaatcataaagaaaaaaaacactcatgaacatccgaatccggttggacgtttggaccaggggctgctcgtggatctgcttctgggtctttttggtttgtgcttcgtttggcggcattcaagccagatcatctgctgcagtttttctgcattttgattgcccaacctacgataaaaaggctctgttgc

SEQ ID NO: 119995 - DNA, 1514 bp, Zea Mays
ctcctctacagctctactctcccctcccgcggaggcgtggacggcatggagttgggggagcccggggcccgtggatgccgtggtcccgtgcgattactgtgcgtggctggctgttcgctctcctccctccccgcgtgttttcaggggcggccttgctcagttcaatgatgggaacagagtgcatcatggccacactcggcggggatcctgaaccctcaattccacctggattcggaccttttgttgccctcgcgctacagggcatccaaaacaatgccaaatcagctgatgctcattctagttctgctcaagcagcacactgcatggagaaagatgttgaagttctggaacacggttcggcgcatggttggagtgacactcctgctagtacttcagggacccatagttgcaggaggtcacttcgtaacaggcctccaatagactatagccagttcgaccttatctcggacgaagaatctgatgttgaatcagcagaaaagggagtgggattagtgagacgcagacgacaattaccgaaaggagtacttcggggatgcgcacaatgtgctgattgtcaaaaggttgttgcaaggtggaatccatctggtgcaaggaggcctgttcttgaggaagctcctgttttctatccatccgaagaggaattcaaggacaccttaaaatacattgagagtatacggtctacagcagaaccatatggaatttgtcgtattgtcccgccgccttcatggaaacctccatgccttcttaaagagaagaacatatgggaatgctcaaaattttgtactcgggtacagaaggttgacaagctccaaaaccgtaaatcatccaagaagggcagaagaggtgggatgatgaagaagcggaggaagcttttagagctggaagataacaataatattaatcacaatcaaactggggtgcagcaaaaccaagagaggtttggatttgaacctggacctgagttcacacttcagacatttaagaagtatgcagatgatttccgtgaacaatattttaagaaagaagtgcccgcggactcaccaccatcagtagaagacattgaaggcgagtattggcgtatagtcgaaaagcctactgaagagatagaggtagtatatggtgctgatttggagactggaacttttggtagcggcttcccaaagtcttctcccgaagtaaaatatgatgttgagcataagtacttagagtctggttggaacctaaacaacttgcctagactacaaggttcagtactatcttttgagggcggtgacatctctggtgttttggtcccttggctgtatgtcggaatgtgcttttcatcattctgctgggtaagatgcttgttggcatgtctacttctcttacaattaagattgttgtcattatccaaatttaacattcatgttctgagattttacactggcatgtctctgctgacagcatgttgaagaccatcatttgtactcactgaactacatgcattggggtgc

SEQ ID NO: 119996 - DNA, 4339 bp, Zea Mays
ctcctctacagctctactctcccctcccgcggaggcgtggacggcatggagttgggggagcccggggcccgtggatgccgtggtcccgtgcgattactgtgcgtggctggctgttcgctctcctccctccccgcgtgttttcaggggcggccttgctcagttcaatgatgggaacagagtgcatcatggccacactcggcggggatcctgaaccctcaattccacctggattcggaccttttgttgccctcgcgctacagggcatccaaaacaatgccaaatcagctgatgctcattctagttctgctcaagcagcacactgcatggagaaagatgttgaagttctggaacacggttcggcgcatggttggagtgacactcctgctagtacttcagggacccatagttgcaggaggtcacttcgtaacaggcctccaatagactatagccagttcgaccttatctcggacgaagaatctgatgttgaatcagcagaaaagggagtgggattagtgagacgcagacgacaattaccgaaaggagtacttcggggatgcgcacaatgtgctgattgtcaaaaggttgttgcaaggtggaatccatctggtgcaaggaggcctgttcttgaggaagctcctgttttctatccatccgaagaggaattcaaggacaccttaaaatacattgagagtatacggtctacagcagaaccatatggaatttgtcgtattgtcccgccgccttcatggaaacctccatgccttcttaaagagaagaacatatgggaatgctcaaaattttgtactcgggtacagaaggttgacaagctccaaaaccgtaaatcatccaagaagggcagaagaggtgggatgatgaagaagcggaggaagcttttagagctggaagataacaataatattaatcacaatcaaactggggtgcagcaaaaccaagagaggtttggatttgaacctggacctgagttcacacttcagacatttaagaagtatgcagatgatttccgtgaacaatattttaagaaagaagtgcccgcggactcaccaccatcagtagaagacattgaaggcgagtattggcgtatagtcgaaaagcctactgaagagatagaggtagtatatggtgctgatttggagactggaacttttggtagcggcttcccaaagtcttctcccgaagtaaaatatgatgttgagcataagtacttagagtctggttggaacctaaacaacttgcctagactacaaggttcagtactatcttttgagggcggtgacatctctggtgttttggtcccttggctgtatgtcggaatgtgcttttcatcattctgctggcatgttgaagaccatcatttgtactcactgaactacatgcattggggtgctccaaagatgtggtatggagttccaggaaaggatgctgtaaatttggaggcagcaatgaggaaacacctacctgacttgtttgaggaacaacctgatttgcttcacaacctggttactcaattttcaacatcattgcttaaatctgaaggagtaccagtctaccgatgtgttcagcatgagggagagtttgtcctaacgttccctcgggcataccatgctggtttcaactgtggcttcaattgtgcagaagctgttaatgtggcaccaattgattggttaccaattggacaggatgcagtcgagctttatcgtaagcaagctcggaaaattactgtttcccatgataagctgttgctaggggctgctagagaagcaataagagctcattgggatattctgttccttaagagaaatactgctgataacttgaggtggaaaagcatgtgtggacttgacagcactatatgcaaatcgcttaaggcaagaatcgatttggagttggcgcaaagacaaaatatatgctctccatctcaatctagaaaaatggatgctgaatttgattctactgatagagagtgtgcattgtgctattatgatctgcatctttctgcttctggctgtccatgttgcccagggaaatatacctgccttgtacatgcaaagcagctttgctcatgtgactgggacaaaagatttttccttttccgttatgatatcaatgagttaaatatgttggctgatgctttaggtgggaagttaagtgcaattcacagatggggtgtctctcatcttggattaagtttgagatcatgtgtcaaaagagaaaaagaccaagattcgaagactcctcgcagagtagctgatggccccagaaggtcctacatgtctcaggcgtcaacagtatcattggcaccttcgttggtttgcaatgaacagaacaacaatggtaataagatgctggacaaagctagtttggaaacggatacttgtccttttacagagcaaataaaatctggaactatttcactacaggaggcacacatgaagactgaggtatcctgtacactaaacagcagtgtcattcctgaaggccataaaagctcactaagcttgccagttccttctggccactcactttcttccaattttgcgacaaggtctttaagtactgcaggagaatctgtgaaaaacacatatgacttggtagtatttaaagggagtagagaatcttcgcgggctggagactgtatctcttcgcctggtgtgcatcataacataccgccaataatgattgatcaaggaagcaacatgaatcctagtatggagagctcaaacaattcacataggctgatggcatctaacactaatgcaactcagttttactcttacaaggaccaaatgcatgtaacaccagagactagggcctcagtgatgacagaaaaagatagcagtcaagcttctgctgcatcaagtcagccctttgcgggaactgttttaagagcacaaagtgtatctcaggaagcttcacctagcgtctttacttcaaagcctctcatagattcttcacttgtgaaaaatacatatgttggtttaagttcaggcggtgcccatattggacatccaaattttggtaaccagcaaccaagtgacgaatgccttaaaagaaaatctgaatctctatctggttcagaagcaaggggtcattcagctgcattggtgcaacctgctctaggaaatcataatgggagtggaggtgcacacaagggccttcggatggctaacgttgtacatcgattcaagagcttagttgaatctttggaaattggtgttgtgctatctgggaggttgtggtcctcaagccaagcaatcttcccaaaagggttcaggagcagagtaaaatacttcagcatcgtggatccaacacaaatggcatactacatatctgaaatattagacgccggaccacagggacctctgtttatggtgactctggaaaactgtccaggcgaactttttatcaacgtctctcctgccaagtgctggagcatggtccgtgagaggctgaatatggaaatacggaggcaactcagtacgggaagagctaatcttcctgcactacagccaccgggatcagttgatggttttgaaatgttcgggttgctgtcaccggcaatagttcaggcaatcgaggcacgggatagagatcgcatctgcacagagtactggagatccaggcctcatgttgtcactgaagatcgtgcgacggcgccacctcaggctcagggtcctctgcatgcgctgaggggtctattccagcgagccaaccgcaatgagctgctagccctacggagtctactggtgagcaacatcagcccggacgacttctccaggcggcaggctacccaaatcctcgacgaggagatcgccaagcagtggcgctgacaggcgtaaatacaactctgtaatctcttgatggcatgacgggaccaagcagttttcgaccctgacgagagagcggctccttccgttgccccccgtgcccattctttgtattgttgtgtccatgctccatgccataagatcttgtccccatttggatgcgatcgaatgaccgacgacggctcatcaactgaccagcgtacataccgtctgtctggaaactcttgtggtgttgtaggtttagttatttttcttttaaacgaaatatttaaccttcttttttagtgaggctgaaacgcaggctcatgagacctgagttttttacatgaaaggttgtgtacatcagaaatgtgcagggcctgttgacactactagcagataggcgtgatttttgtgccgagttggtcagagtcgaacagtccatgtgcttcaggtactcatcctgcatggttgactgggagttggtacttgcaagctgctgttacagaccagta

SEQ ID NO: 119997 - DNA, 150 bp, Zea Mays
ggattcgtcgctgccttttttctttctttctttctggtactgctatctatccatctctttccattttcctcatgtccctgtttctgtttgaccgcatagccgccttgttgcattctattttggctcatcataaatcataaagaaaaaaaa

SEQ ID NO: 119998 - DNA, 623 bp, Zea Mays
ttctgctcggtgccccctctcctctacagctctactctcccctcccgcggaggcgtggacggcatggagttgggggagcccggggcccgtggatgccgtggtcccgtgcgattactgtgcgtggctggctgttcgctctcctccctccccgcgtgttttcaggggcggccttgctcagttgtaattctgtttcttcttcctcatccttaccccttctacacgttacgttacaagttgccactccagcgatttcctgcgtcagtcagtcagtgggaggcattgtatccacgcagggtaggacgcgttgggtgcgcttgtgctggagtttgtgccacgttgccgcttgcggagtaaggagcaatagacgtcttacactttcgtatgatatgatttctctacattctgctgtccgcagcctgctgcgctgtagtgccttctgtgttgaagatgagtgaatcagcttaagtaggacgacggtgtggcaaatgcagctgagctgtaccctgtctgcaactagcacaacaggcaaaacgttgcatcatttctgtatttttggtttggaacaatatggatgcgattatgttccctactgtaatttgctcatatacctaaatcgaggttta

SEQ ID NO: 119999 - DNA, 3821 bp, Zea Mays
ctcctctacagctctactctcccctcccgcggaggcgtggacggcatggagttgggggagcccggggcccgtggatgccgtggtcccgtgcgattactgtgcgtggctggctgttcgctctcctccctccccgcgtgttttcaggggcggccttgctcagttcaatgatgggaacagagtgcatcatggccacactcggcggggatcctgaaccctcaattccacctggattcggaccttttgttgccctcgcgctacagggcatccaaaacaatgccaaatcagctgatgctcattctagttctgctcaagcagcacactgcatggagaaagatgttgaagttctggaacacggttcggcgcatggttggagtgacactcctgctagtacttcagggacccatagttgcaggaggtcacttcgtaacaggcctccaatagactatagccagttcgaccttatctcggacgaagaatctgatgttgaatcagcagaaaagggagtgggattagtgagacgcagacgacaattaccgaaaggagtacttcggggatgcgcacaatgtgctgattgtcaaaaggttgttgcaaggtggaatccatctggtgcaaggaggcctgttcttgaggaagctcctgttttctatccatccgaagaggaattcaaggacaccttaaaatacattgagagtatacggtctacagcagaaccatatggaatttgtcgtattgtcccgccgccttcatggaaacctccatgccttcttaaagagaagaacatatgggaatgctcaaaattttgtactcgggtacagaaggttgacaagctccaaaaccgtaaatcatccaagaagggcagaagaggtgggatgatgaagaagcggaggaagcttttagagctggaagataacaataatattaatcacaatcaaactggggtgcagcaaaaccaagagaggtttggatttgaacctggacctgagttcacacttcagacatttaagaagtatgcagatgatttccgtgaacaatattttaagaaagaagtgtccgcggactcaccaccatcagtagaagacattgaaggcgagtattggcgtatagtcgaaaagcctactgaagagatagaggtagtatatggtgctgatttggagactggaacttttggtagcggcttcccaaagtcttctcccgaagtaaaatctgatgttgagcataagtacttagagtctggttggaacctaaacaacttgcctagactacaaggttcagtactatcttttgaaggtggggacatctctggtgttttggtcccttggctgtatgttggaatgtgcttttcatcattctgctggcatgttgaagaccatcatttgtactcactgaactacatgcattggggtgctccaaagatgtggtatggagttccaggaaaggatgccgtaaatttggaggcagcaatgaggaaacatctacctgacttgtttgaggaacaacctgatttgcttcacaacctggttactcaattttcaacttcattgcttaaatctgaaggagtaccagtctaccgatgtgtgcagcatgagggagagtttgtcctaacattccctcgggcataccatgctggtttcaactgtggcttcaattgtgcagaagctgttaatgtggcaccaattgattggttaccaattggacaggatgcagtcgagctttatcgtaagcaagctcggaaaattactgtttcccatgataagctgttgctaggggctgcaagagaagcaataagagctcattgggatattctgttccttaagaaaaatactgctgataacttgaggtggaaaagcatgtgtggacttgacagtactatatgcaaatcgcttaaggcaagaatcgatttggagttggcgcaaagacaaaatatatgctctccatctcaatctagaaaaatggatgctgaatttgattcaactgatagagagtgtgcattgtgctattatgatctgcatctttctgcttctggctgtccatgttgcccagggaaatatacctgccttgtacatgcaaagcagctttgctcatgtgactgggacaaaagatttttccttttccgttatgatatcaatgagttaaatatgttggctgacgctttaggtgggaagttaagtgcaattcacagatggggtgtctctcatcttggattaagtttgagatcatgtgtcaaaagagaaaaagaccaagattcgaagactcctcgcagagtaactgatggccccagaaggtcctacatgtctcaggcgtcaacagtatcattggcaccttcgttggtttgcaatgaacagaacaacaatggtaataagatgctggaaaaagctagtttggaaacagatacttgtccttttgcagagcaaataaaatctggaacgttttaataaccatgggaggcacacatgaagactgaggtatcctgtacactaaacaacagtgtcagtcctgaaggccacaaaagctcactaagcttgccagttccttctggccagtcactttcttccaatcttgccacaaggtctttaagtactgcaggagaatctgtgaaaaatgcatatgacttggtagtatttaaagggagtagagaatcttctcgggctggagactgtatatcttcgcttggtgtgcatcataacataccgccaataatgattgatcaaggaagcaacatgaatcctagtatggagagctcaaacaattcacataggttgatggcatctaacactaatgcaactaagttttactcttacaaggaccaaatgcatgtaacaccagaaagtcaagcttctgctgcatcaagtcagccctttgcgggaactgttttaagagcacaaagtgtatctcaggaagcttcacctagcgtctttacttcaaagcctctcatagattcttcacttttgaaaaatacttatgttggtttaagttcaggcggtgcccatattggacatccaaattttggtaaccagcaaccaagtgacgaatgccttcaaagaaaatctgaatctctatctggttcagaagcaaagggccattcagctgcattggtgcaacctgctctaggaaatcatcataatgggagtggaggtgcacacaagggccttcggatggctaacgttgtacatcgattcaagagcttagttgaatctttggaaattggtgttgtgctatctgggaggttgtggtcctcaagccaagcaatcttcccaaaagggttcaggagcagagtaaaatatttcagcatcgtggatccaacacaaatggcatactacatatctgaaatattagacgctggaccacagggacctctgtttatggtgactctggaaaactgtccaggcgaactttttatcaacgtctctcctgccaagtgctggagcatggtccgtgagaggctgaatatggaaatacggaggcaactcagtacgggaagagctaatcttcctgcactacagccaccgggatcagttgatggttttgaaatgttccggttgctgtcaccggcaattgttcaggcaatcgaggcacgggatagagatcgcatctgcacagagtactggagatccaggcctcatgttgtcactgaagatcgtgcgacggcgccacctcaggctcagggtcctctgcatgcgctgaggggtctattccagcgagccaaccgcaatgagctgctagccctacggagtctactggtgagcaacatcagcccggacgacttctccaggcggcaggctacccaaatcctcgacgaggagatcgccaagcagtggcgctga

SEQ ID NO: 120000 - DNA, 788 bp, Zea Mays
gggtgtgatgtttgcgcgagttaccttccttttgatacaaacgatatgagggtgcatttataagatggtaacgccttctgcaggttactcaattttcaacttcattgcttaaatctgaaggagtaccagtctaccgatgtgtgcagcatgagggagagtttgtcctaacattccctcgggcataccatgctggtttcaactgtggcttcaattgtgcagaagctgttaatgtggcaccaattgattggttaccaattggacaggatgcagtcgagctttatcgtaagcaagctcggaaaattactgtttcccatgataagctgttgctaggggctgcaagagaagcaataagagctcattgggatattctgttccttaagaaaaatactgctgataacttgaggtggaaaagcatgtgtggacttgacagtactatatgcaaatcgcttaaggtaaatgtgtatttcagtttttataaatagtgtttttatcaaaatatcagtggaatcttatataatttcctgcttaggcaagaatcgatttggagttggcgcaaagacaaaatatatgctctccatctcaatctagaaaaatggatgctgaatttgattcaactgatagagagtgtgcattgtgctattatgatctgcatctttctgcttctggctgtccatgttgcccagggaaatatacctgccttgtacatgcaaagcagctttgctcatgtgactgggacaaaagatttttccttttccgttatgatatcaatgagttaaatatgttggctg

SEQ ID NO: 120001 - DNA, 2406 bp, Zea Mays
tgggatagttggtcatttttccattctttctagctgacttatgtttgtcctcattatttttctggttgtatacttgtattgactattgagagtttgagacatggagataaaagttacttagtgtataattttttatatctgcagcgctggtggtttgtttggtaaatggggaatgggcaatactctgttggttccctgttaagtgttacattttcaatgcggtcatggaaatggaattagatgttgctgttgtgaagagagatgaccttggaaatgctcatggtcttaatcttgatgagttcgatgatggttactaatcatacatgaaagttgtaacttgtgttgtgtggttgaacttatgctaatgctatttggtttgtgaactcaacttatgtatgaacttattctatatttaaaattctatgtcaagtctgaaaagacgtttcaacgttcgcttaaacgtttaaacgttgaaaagttggttcataacgttttaacgttttaccgttttaataaccatgggaggcacacatgaagactgaggtatcctgtacactaaacaacagtgtcagtcctgaaggccacaaaagctcactaagcttgccagttccttctggccagtcactttcttccaatcttgccacaaggtctttaagtactgcaggagaatctgtgaaaaatgcatatgacttggtagtatttaaagggagtagagaatcttctcgggctggagactgtatatcttcgcttggtgtgcatcataacataccgccaataatgattgatcaaggaagcaacatgaatcctagtatggagagctcaaacaattcacataggttgatggcatctaacactaatgcaactaagttttactcttacaaggaccaaatgcatgtaacaccagaaagtcaagcttctgctgcatcaagtcagccctttgcgggaactgttttaagagcacaaagtgtatctcaggaagcttcacctagcgtctttacttcaaagcctctcatagattcttcacttttgaaaaatacttatgttggtttaagttcaggcggtgcccatattggacatccaaattttggtaaccagcaaccaagtgacgaatgccttcaaagaaaatctgaatctctatctggttcagaagcaaagggccattcagctgcattggtgcaacctgctctaggaaatcatcataatgggagtggaggtgcacacaagggccttcggatggctaacgttgtacatcgattcaagagcttagttgaatctttggaaattggtgttgtgctatctgggaggttgtggtcctcaagccaagcaatcttcccaaaagggttcaggagcagagtaaaatatttcagcatcgtggatccaacacaaatggcatactacatatctgaaatattagacgctggaccacagggacctctgtttatggtgactctggaaaactgtccaggcgaactttttatcaacgtctctcctgccaagtgctggagcatggtccgtgagaggctgaatatggaaatacggaggcaactcagtacgggaagagctaatcttcctgcactacagccaccgggatcagttgatggttttgaaatgttccggttgctgtcaccggcaattgttcaggcaatcgaggcacgggatagagatcgcatctgcacagagtactggagatccaggcctcatgttgtcactgaagatcgtgcgacggcgccacctcaggctcagggtcctctgcatgcgctgaggggtctattccagcgagccaaccgcaatgagctgctagccctacggagtctactggtgagcaacatcagcccggacgacttctccaggcggcaggctacccaaatcctcgacgaggagatcgccaagcagtggcgctgacaggcgtaaatacaactctgtaatctcttgatggcatgacgggaccaagcagttttcgaccttgacgaaagagcggctccttccgttgcccccgtgcccattctttgtattgttgtgtccatgctccatgccataagatcttgtccccatttggatgcgatcgaatgaccgacgacggctcatcaactgaccagcgtacataccgtctgcctggaaactcttgtggtgttgtaggtttagttatttttcttttaaacgaaatattttaccttcttttttagtgaggctgaaacgcaggctcatgagacgtgagtttttacatgaaaggttgtgtacatcagaaatgtgcggggcctgttgacactactagcagataggcgtgatttatgtgccgagttggtcagagtcgaacagtccatgagcttcaggtactcatcctgcatggttgactgggagttggtacttgcaagctgctgttacagaatacagaccagtagtccaatg

SEQ ID NO: 120002 - DNA, 1377 bp, Zea Mays
tggaattcagcttaatgtacaagatgaaccagcaaaagatcagcacagaccatgctgacaggtcgacaacatcacccacttatcaccatgccatgctgctgctcaagacttcaatcagctcgtttttcttcgtctttgagtagcctttgattcctcgggactttgcaagctccctcagctctgcaaccttcagagagcttagatctgaactttcgtgcaattcatctatatctgtaacatcagcgatttccaaagacagttctggatactcgttgtctggttcaccagcatcagattcttcgtcatcgtctgaaatgtcatcgaggtcgtccaacgaaatgttctctgcctcgattacagaatcaggttcatatggagacatgtagtcaggctcatctgtagcagtcctctcatcaagagctgtcttagccatctgtacagcatcggcaacattattgcgcatagacttgcgatcggcatctgtgtctacatccacattgataacaggctggaacttcactccaggaacaggagaccttcgcctgaaatttgaagctggccttttgaagggtgccggaggttgcttcttctgctcttcctggatgtcactttttgtgccaaagatggttgaacctcgtctatttccagaatcattgcttctcctcattacaccaaaattctgctctttctcgtcactgctcttccttctctggtcaacagagtgcttcctaagcaacttaataagtgaatcaacactgcccctttcgccatgcacttttgcaggttcaggcttcttttccctgcctttcaccctagctcgcagcagtgcttgaacccttttaaagagctccacaatctccatctctctttccccaggagctgaagtgtcttgaggacgggaagtgcttgccaaagagataggtggtccattcctggagaacatgatatcgctatcatattcatcgatgttctcagagtcatctttatcctggtacgaccttcctttccctctggaggacccctccttttgtagttgcgatatatccgaaatccttggcctatggtggttggggctcgcgctacatactaaggataccctaattggccccaacataggtgacgtgaccatgaaacaagctcctggaggagctctgaattatctgattttatggggaagggagtagcacaggagatgaggcggaggggagtggggtgggtgggtgggggtcgcgtaccgcggtggtgaaagagagcaggggccgcaggaaactttccgctgccgggggcagccaactggagcgtccctccgacggcgccgacggtgaagcgactgttggagtgttggtggcgacgagaggtgataaagcgaaagcgaga

SEQ ID NO: 120003 - DNA, 260 bp, Zea Mays
taattagagtacagttccacttgtttattttgttggctcgttctagatcctgttaggtctataatccaaagtgttctttttttgtagaatctggtgacaacagaagtttgggttggggtcatgggatggatatctttgttgtaatgtgaggtgttaggagaattatgttatgtttatttattggcataagttatgtcttacacgtacaaatgagttaatggatgaactcaagttattggttcaattatagatttcaatgg

SEQ ID NO: 120004 - DNA, 96 bp, Zea Mays
tatgcgctctggaaccatcactggtcccaacccatgacgtcaaaagctcgcgccctcgccgaggatggcatatctgaaagagaattaggcttacac

SEQ ID NO: 120005 - DNA, 219 bp, Zea Mays
atgacggtgtcgcaaaagggacatcgatcgttcgatggaatccaatacagaagaaaagaaaagggagaagaggtcaatggcatgtcagggccaccaccagccatttgctctatgtatgcccatgatctcaagtttctggacatggagataatagcccggatcagcgcccgtcttcgcccccaactggcaactgctgaccgtaataaccatgtgatgtga

SEQ ID NO: 120006 - DNA, 3238 bp, Zea Mays
cctctcctctcctcctgctcactcctcgccatcattcagctcttccccaaccttttccttctcccccatagggagcgcggcgcgggagggcctgtgctcctgcttgctttcgtggtgttgctgctgcttttcctctttgttaaaaggctgctccctccgtctcctgtcatctcccctttctctcttctcaattctcatcgcgctggcttcgcttggctgctaaggtcaaatagccatccatctgtccatacgcctctttccctttctctttcctctttaacccccctacgaggctccggtctcagggcgcttcgcatggccatggcctccgcggtggctccggctcctccccttgccagcgacgaccaaaccgggcaaaagcgccgccaaatctgcatctgacctccccaccaccaaatacccaaccagcaccacccaccgccttctgctttctttctttctcgctccttacagcaacacatagcgctcagctcacacctcacagtcagctcaggctcatcttctcagcgagttagcagcagcagcttgaggcccagccgcggctgcctgcgcgcaagcataatggagagcagatggcggaaggccaagatgtcgctagggctcaacctctgcgtctacgtgccccggacgctggaaggcgacgacgcggccagctcgcccgacaccgcctcctccacggcggcgctcgtgtcgccggtggcctcctcctcgtccgccgcgacgagcaccaacaccacccccacggccgcttcggcggaccagagcagcgccagcggcaaggtgctcatgcccaccaccccgacgccgacgtccgccgggctccgcctctccaaatccggcagcaaatcattcaagaaaacatgtgccatatgcttgaccacaatgaagcctggtcagggccatgctctcttcacagcagagtgctcacacactttccacttccattgtatttcggcaaatgttaagcacggaagcagcagctgcccagtgtgtcgtatcaaatggaaggagctcccatttcgaggtcccttgcctgctgaattacctcaaggaaatgcgaggattaatccagttaatgggtaccaaaatggaggccatatgaacatattgcgtccacttcctcgtgcacgctcttctggccggcttcatcatctggccacgttgctgcctgacactgaccctagtactttcaacgatgatgaacccttggacttgtcgtctgaagaggctaatgacaatcatcagggctgtttgagaacagtagagataaaaacatatccagagttcactgaagtacctgaaaatacatcagaaagaaacttcactgttctgattcaccttaaggcaccggttgctcagcacctgcagccatccagcaatctcggagatggcaacgggctaagtacagcccgtgcccctgttgatctcatcacagttcttgatgtcagtggaagtatggctggtaccaaacttgcattgttgaagagggctatgggatttgtcattcagaatcttggatcctctgaccggctttccgtcatcgccttctcatcatccgcacgtaggctcttcccactccgtaggatgactgagtctggtcggcagcagagcttgctggctgttaattcactgacgtcaaatggagggaccaatattgcagaggccctcaggaagggctccaaggtgatcgaagagcgacaggccaagaatccagtctgcagcatcatcctcttgtcagatggtcaagatacctacacggtctcaccaactgctggcgtacacaaaggagcaccagagtattgtgcgctcttgccgtccactaacggtaaccagcaggtacctgttcatgtctttggattcggtgctgaccatgactccgtctcgctgcactccatctcacaaacttctggtggcaccttctcattcatcgagacagaggccgctatccaagatgcatttgctcagtgcattggtggacttttgagtgtggttgcacaaggtctgcatgtaaaggtggagagcctccaccccgacgtgcactttggctccatcagatcaggcagctattctagcagggtttcagatgataagaggaatgggtccatagatgttggggacctgtatgctgaagaagaaagggattttcttgtgtctgtaaacgtcccaccaggctacggggaaacagcactcctcaaggttggctgcgtctacaaagacccactgatgaaggagaccgtgaatatggctgatgtgcaagtgaagatctccaggccagcattcgtctcggtacaaagcgtgtcgatcgaggtggaccgccagaagaaccgcctccatgcagccgaggtgatggctgaagcaaggttttctgcagagcgcggtgacctgaccaccgctgtttctctactcgaggactgccggaggatgatcatggggtcggcgtcaggacagtctggtgaccgtctgtgccaggcactggatgccgagctgaaggagatgcaggatcggatggccaaccggcagaggtacgaggcgtccggtcgagcatatgtgctctcaggcttgagctcgcactcatggcagagggcaaccgcccgcggggactcgacggacagcgagagcctgatccaagcctaccagacttcgtccatggtggacatgctgcttcgctcgcagacaatgagccgctcatcgactcctcgaccaacgccacagatgaggcacgctaagtcattcccggcacgcccgcagccaaggtaactgctatttggtgtcaccaaggatttgcctgaagcctaatttgcttgccgatgggcgtagtagcgccctctaaattcttagttttgtggcgggaggacgggaccagggtatagtttgtgtgggtacaaggggatgtaatggtgtaaatttgatctggggtggtggaggtaaatggtgagaggggtaaggtattttataattgagggggtcggggatggtatacgtcctggggagaattgggcaggagggtggtgaactggtatactctagtattgtactagctccttcgtgtggtgatgtacataagggaagggtatacatttgtggactctttgaggagggatggatacctaatcctgatcccgatccttgcaatgtttgtttcctcagcctggaaaaggactaaggtttgttgcctctttctggaaatggaattgatgatgatcctgggtattttttc

SEQ ID NO: 120007 - DNA, 3613 bp, Zea Mays
acgcacaattcctctttccctcactgctcgccaacccagcgcacggcacaacccattcgcaccgcagcgcgtcgcggcgagcgggcgggcgggcgacaccgacagctcaggaagacaaggaggggagcgagggaggcggaagaaaaaggcacgaaagccaagggaagcgggcgcgaccaccgccacgccctacccccccccctcccccgccgcctagtccgagttgtggaatccccgtggactcccgccccccgtccatcccccgcgcgtcgccgcggcgcgccgggccgatctgctccgccgccccgcccgcctcctcaggtgtccagccgaggaggacgtagagctgggcatataacgagctagatttcaaaaaaaaaaaagggaaccatgaagaaagtgttcgatcagacggtccgggacctaaaaagagaggtgaacaagaaggtcctcaaggtgcctggaatagaacaaaagatccttgatgccacaagcaacgagccgtggggtccacatggatctctactggcagacattgctcaagcgacgaataactatcatgagtaccagatgatcatgcacattgtgtggaagagggtcagtgacactggtaaaaattggcgtcatgtttacaagggattgattgttttggattacctggtggcgcatggcactgaacgagttattgatgacatcagagaacatgcttatcagatatcagcactagctgatttccagtacattgattcttctgggagagatcaaggtagcaatgtacgaaggaaatctcagagccttgtcagtttagttaatgataaagaaaggatacaggaagttagagagaaagcactctctaccaaggacaagtacaggagtgcgtttgcccccagtggcaggagcccaggtggatatggtggtggttatgataatgaccgctatgaaggcagctatggcagtagatatgacaacagaaatggaaatgggaggggagactatggatacagggacgatgacagatatggtggacctggaggtacacccaatcgggaaggagatcgttattccagagattctaatgaacgctatggcagagattatagagaagatgaatacaaaggaagtcatagcaaccatgaatatgctgaaggagcaggtcgcaggagctatggtcaggaaagagattcatatggggatggtgaagcttattcatcccgtggtcgtggcagcaatgctgatgatcctactcaggatgataggcctatagagcgaaagctttctaaccagcaaatttcttcaccaccaccgaactacgaagatgtcacaagagatggccaggacaatcttcacgatgacagaaatggaggaagtgttcctgctgctgtatcaagggtgccctctccttcagttcctgcaacaactgttcctgcagtacaggtgaatggggttcatgacagcactgttgaagatgtacctgcaccaccaactgctcatgccgagcctaatggatttgatgagtttgatccacgtggatctgtaccagattcttcccctcctgtaaaccctgcatcagtagcgaatagcttggagatggatttgtttggatcagatcctattagttcgttggctttggtgtctgtgcctcaaccaacgactacatcaaatgttgaagcaccggcaaattcaggttttgaaacaaatagttttgtgggcatgcctcctgcttcaactggatttggcgagattgatgcttcaaatccttttggggatcctacacctttcaaggcagttcttgatgaaagtccagcactacctcagacacatgctgcaccagctggttctttccaacccactggacctggtacggatgtgaaccctttccagcctgcttcagccgcaagctttggttttggagacactcttggtgatctcacttttgcaccaaatgctgcacctgagctgcaagatatgtttgcaaacacagcctccttgccttcagaggtagcaccagcaaacccatctgtggttctccaacagccagttcctactaatttctcctctcaggtatctcagccagttgctggcacattgcatgctgctcctacagcatttgctccttctcaggctcctcccacatcatttgctcattctcaggcacctcaggctgcccctgcattttcttattcacaagggcctcatcctggtgctgccatccagtctcaatttccccagactgtcgccccatcatttcctccttcgcaggtgcctcaatctgtaacacccaatctgccaccaggccaatcgaacttttttttgcaatcagcatcagggtctggtattgacagcctgtctggggttcctacccagaatggagcaccatcctacattcccccacagaattctcagttcactgctccggcaaatcaacaaccattgcagccaagcttcatcccacaaactagcacaccagcactccagccggccttgatctctaggggggcatcccagccccttggtgtgccaaattcagtgcctactagtggcagcttcccgttgcagtcaagttcatcagctcccccagaaacaatcgtttctgctttgcaagtcaatcaaactgagccagtgaagaagtttgagcccagatctaaactgtggtctgatactttgagccgaggtctagtcaatctggacatttctggaccaaaagcgaatcctcatgctgatattggagttgactttgattcaatcaatcgcaaggagaaaaggcaggaaaagaaaatcaaccaagcacctgtggtgtctacagtcaccatgggcaaggccatgggagctggttccggcattggtcgggctggtgtaggtgcaatggcacctcctcctaaccaaatgggtgccgggaggggtatgggtcctggtgccggtgccggttatggtggtggaatgggaatgaaccggccaatgggcatggggatgggaatgaatcaacaacagatgaggatggggatgaaccaacaaccgatgggaatggggatggggatgaaccaacaaccgatgggaggaatgaacatggggatggggatgaaccaggggatgccgatgcgtcctccaatggggatgggtcctggtggaatgcccggtgctggctacaatcagatgggcgcggcgtacggtggccagcagccatacggtggatacaggtgaggaggggctatgcagtcccccacaccacagatttatgggggcgaggtgttgaagaaacggttttggaggcatctgtattttgctcacctggttttgctttgggtatgatttcttgtttcttttgggggtggaggtgagaagggtataattttcgtcactattcttttacagtctatgttggatactgtacctactttactaaatagcaaaaagcaaacatatgaacaagggcggtgctacaactactgcgttgtgttggatgtaaagccttgatatattatctctttcccatgtagttgtggctataggcggcttcttttcagtgaacatattgtctgttccagcgttcttgctggatggatagtaaatggctgtaccatttggttgaattatcatggtttttgctttgatgtta

SEQ ID NO: 120008 - DNA, 106 bp, Zea Mays
ttacggagactcttcatttgagaaggacttggatttgtatcgattccgttctacggccagctcatctaccaatacgtttcatttcaccgagttgtcttgtctcttg

SEQ ID NO: 120009 - DNA, 741 bp, Zea Mays
gtgcagtcatggaattcaattcagaaacagcagttcatattggatatacgcatggggaatggggatcaagaaccaaccgcacatggcaatgaagcagccggctgccgacaatattgcccgccaggccggccggctctcagtttcagaaaatggcaactcgagaaagcaaatgaaaaggccaagaaacgggcaggcgaaatggaggaacatgcgattcttcgctgctgcccgcgaccaatccttgctacagagtttcggaggcgaaaaaatggctagtttttttttgcatgacatgcaccgaccgtcggggatcggctgatgatgactcacctgtgagttgcttgctctgttcgccggaaacgatcggccaacacggagagcttggactggggttgttgcttggtgaacacagaaaaagaaggccgctttctctctctctctctctagctctgcccggcccgttgcactctctctagctgacgagtagctgttggtgatcacgaacgcctgtaaataagcaagggacagcggtgggtggaatcagggtggtgcactctctctctctctctctctctctctctctggctgtactcttactcctcctgcttggctagcttggtgacaagcaagctgctgtgtcgatggacggggcgggagggaggactggagaagatgaagaagaaggttgctgagcggcttgtgcaactccaattataaggaggactgtgtactcctaacgag

SEQ ID NO: 120010 - DNA, 157 bp, Zea Mays
tattcatttgttgcatgcatataaaaagatcaatgccccacatattaggtctgcaaagcggatcaaacttgaagcatcaaaaccagaaccttgttgttgttggattagttcagttgtctcttattatatcacaatagagtgcttgcatttagattaa

SEQ ID NO: 120011 - DNA, 612 bp, Zea Mays
atgccccttcctccagccgtgttctgcttctctccctgcgcccctattcatctcctgcgcgccttggttttggtcccaagctccatggccgccgcgctgcagctctctggtgctcggtcgccaagtctccctgctctatgcgttcttcttcctccctggctcctgctcgtccaacgacgccgtcggccggacctctctgcttctcctgcgcccgcgtcgtggctctccactgcgcgtagtggtgcttcagttctgctctgtccattttcctgtgccgcgccactgcagctcgcctcggctcctcgcctcatccatggccgagcgccctctgcccagcctgtcgaagctcctctgccggctgcaagctcctgctcaagcttgctctcggcgctcgcccctgatttctgcgctcagctccaccgcgacgtgaagtccctgcgcgcaagctatctgttggccgcgcgcgaactcctctgcttggcccgtcgtcgttctccagcgcactcgatggtttcgtcgtctcgtcttgatgtcagtccctacgtgacatctatgacgtgggttcacgccgacaaaagaatcccaagaagatatagagaagcaagcctttga

SEQ ID NO: 120012 - DNA, 1150 bp, Zea Mays
gttgatacaaaataagtcattctatatccgctgcatatacgctagcggtcaggctgacgttgaactgggtgggtgggcgctataaacgtgtctcgcctcaaaaaaaaaaaaaatggcccgtcagctcttgtgcaatgggctggaaggctgaatccgacgacatattggaccttttgggtcaaaacatgggcctgtcgtaccgggaatccacggcctacatgaggcaattgcttcgtgtccattgtgcctctcttctcgacggaactcgagtcgggtgacgggtccgagaggtggacggagtttcggacttggaggtgatctgacctgtgaagggctgagggcggaggatggtgggggaacgaggagggatgggtcggcggcaggagcggcaggccatgatggtgacgttcgcgttggcgctgctcatgggcatcgccgtctacttccgcatctgggcccgccagtccagcgacccctccttcaccgccgacgaccgcgaggagctccggaggcaatttgaacaagcaaacctagaagcgatggatgaatctgccgaatggaggatgaaatatgataaagaaatagagaaaaacaggcagttgcatgatgaactttcaaaggttaaggcctcattagctggtgcagccaggcatcttgagttgttgcagaaggataacgagttgcagaagcggcagaccgaatcactgaggcagcaatgcaattgcactctccattgaaaactaggcaaggttaagggcaaggaaggaatgccttttgtttgtccagcagcaccagagggaggaaaactagattgaggtctaggaattaggacgtacgaaaaggattgagaacatagctctggtagaccaagaccatagtgaccgtctgttataccaatggcgagctgcatatttccgtcccaagtgatcagttgcagtttcatgagtgccaatgcaaatcgcccaagtcaaaacgcaaaagatggcaccatggcagatatatagttcctgtttcagagcaaggattcagtttgtgggtaattttgcagtggcagtttgcattttccgagtacctgaccatctgtaaatatgcgttgtactcgggatcaaatttataacactttataacaacaaacaagttacagatcaaa

SEQ ID NO: 120013 - DNA, 2097 bp, Zea Mays
acagttctaatagagaaattagccgtgaggaatatgaaatcgggcctgggaaaagtgaaggaatcgggcctgggaaaagtgaaaacacggcaaagacagaggatggtgacacgggcgagggcccctgcagtcctgcacggctgcacccgcactcccgctggttcgcactcgtaatcgtggccgtgggcgccggcggcggctaacaaaagcgccgggaagtgggcaccgaccgaagcatcccggaacagacacagattaccgcttgtatttagatcggcccagaccatctgacgacgaggaggagggcggggaggcgaggccaaatccggtcggactcggaccggcgaactcccccgacctcgctatgggcagcctccgcgtcgtcggctgggcttggaccgccgccgccgcgccggagtggggcgtgcaccgccgctgctgccgcgggacgccgctggcccgcccccgcgcggcgacgtcctcccttggcgcggggcagctccgggtcgggacggagcacgggtggctctgggattgccgcggcggcggcggcgcgggggattacgccagggagatggaggtggcggtgcgcgtcgtgcaggtggcctgcaccctgtgccagcgcgtgcaggactcgctcctccgccccggccccgacgccgccggcggcgacgggcgcgtccacgccaagctcgaccgctcccccgtaaccgtcgctgattggggtgttcaagcgatagtaagctggctgctttccagttcctttcatgatgaggacatatcgatcattgccgaagaagatgatgagacactatctagtagtgacggtgtaactttgcttgaatctgttgttgaggctgtcaacggctgcctggttgaagctccaaactatgggctgagatcccctgagaaagagctcagagctcatgatgttattcaagccatacggaaatgcagctctactggaggcccgaaaggaagattttgggtgcttgatcctgtcgacggcacccttgggtttgtgagaggggaccaatatgctattgctctagccttgattgaagatggagaagttatacttggtgttcttgggtgcccaaattatccaatgaaaaaggagtggctcaattaccatcaaaagtactataggttgatgtctaaggttgctcctcctccattggggtcctggcataaaggttgtgtgatgtatgcccagaaaggatgtggccaagcttggatgcaaccactggttcacgacttcggtaagcttaattggcaccacccaagggagattcaagtatcatccatcagtgatccaatctcagctacgttctgtgaaccagttgagaaagctaactcaagccattccttcacagcaggacttgctcaaagtgtaggattaaggaatcaacctctgcgcgtgtacagcatggtgaaatatgctgcaatagcacgaggcgatgctgaaatcttcatgaaatttgcaagagctggatacaaagagaagatatgggatcatgctgcaggggtggttatcattcaggaggctggtggagtggtcacagatgctggtggccgcccattggacttctcaaggggtgtttacctggaaggtttggatcgaggcataatagcttgttccggagcattgcttcatcaaagaattttaaatgctgttgatgcgagctggaactcatcaacactatgaaccaaacaataaggtcttaggagagaatggcctcatgttggtcatagcatggtaaggtaaattggaaaactgatttaagtattcattgtggtgctgttgtgactatggggtaacaccgtaacagtgcagcatataggatagtaatagattgtctgctcatataaacaagaagtcgtctcttgaggctgacaaattgctggcttttgttcaacgatgccatatgtaattttgtataggtgtctgttgatgaaaagcatgtgtgcatgcttttgtttttactaattgacatgtttcttttcaacttgtgcctgtcaatcgtcaggtgtattggttaagacagtgcagcaccatttgctgacaatcataatgttaaaaccttcaactgattc

SEQ ID NO: 120014 - DNA, 1415 bp, Zea Mays
acagttctaatagagaaattagccgtgaggaatatgaaatcgggcctgggaaaagtgaaggaatcgggcctgggaaaagtgaaaacacggcaaagacagaggatggtgacacgggcgagggcccctgcagtcctgcacggctgcacccgcactcccgctggttcgcactcgtaatcgtggccgtgggcgccggcggcggctaacaaaagcgccgggaagtgggcaccgaccgaagcatcccggaacagacacagattaccgcttgtatttagatcggcccagaccatctgacgacgaggaggagggcggggaggcgaggccaaatccggtcggactcggaccggcgaactcccccgacctcgctatgggcagcctccgcgtcgtcggctgggcttggaccgccgccgccgcgccggagtggggcgtgcaccgccgctgctgccgcgggacgccgctggcccgcccccgcgcggcgacgtcctcccttggcgcggggcagctccgggtcgggacggagcacgggtggctctgggattgccgcggcggcggcggcgcgggggattacgccagggagatggaggtggcggtgcgcgtcgtgcaggtggcctgcaccctgtgccagcgcgtgcaggactcgctcctccgccccggccccgacgccgccggcggcgacgggcgcgtccacgccaagctcgaccgctcccccgtaaccgtcgctggaatcaacctctgcgcgtgtacagcatggtgaaatatgctgcaatagcacgaggcgatgctgaaatcttcatgaaatttgcaagagctggatacaaagagaagatatgggatcatgctgcaggggtggttatcattcaggaggctggtggagtggtcacagatgctggtggccgcccattggacttctcaaggggtgtttacctggaaggtttggatcgaggcataatagcttgttccggagcattgcttcatcaaagaattttaaatgctgttgatgcgagctggaactcatcaacactatgaaccaaacaataaggtcttaggagagaatggcctcatgttggtcatagcatggtaaggtaaattggaaaactgatttaagtattcattgtggtgctgttgtgactatggggtaacaccgtaacagtgcagcatataggatagtaatagattgtctgctcatataaacaagaagtcgtctcttgaggctgacaaattgctggcttttgttcaacgatgccatatgtaattttgtataggtgtctgttgatgaaaagcatgtgtgcatgcttttgtttttactaattgacatgtttcttttcaacttgtgcctgtcaatcgtcaggtgtattggttaagacagtgcagcaccatttgctgacaatcataatgttaaaaccttcaactgattcatc

SEQ ID NO: 120015 - DNA, 2045 bp, Zea Mays
tgcacggctgcacccgcactcccgctggttcgcactcgtaatcgtggccgtgggcgccggcggcggctaacaaaagcgccgggaagtgggcaccgaccgaagcatcccggaacagacacagattaccgcttgtatttagatcggcccagaccatctgacgacgaggaggagggcggggaggcgaggccaaatccggtcggactcggaccggcgaactcccccgacctcgctatgggcagcctccgcgtcgtcggctgggcttggaccgccgccgccgcgccggagtggggcgtgcaccgccgctgctgccgcgggacgccgctggcccgcccccgcgcggcgacgtcctcccttggcgcggggcagctccgggtcgggacggagcacgggtggctctgggattgccgcggcggcggcggcgcgggggattacgccagggagatggaggtggcggtgcgcgtcgtgcaggtggcctgcaccctgtgccagcgcgtgcaggactcgctcctccgccccggccccgacgccgccggcggcgacgggcgcgtccacgccaagctcgaccgctcccccgtaaccgtcgctgattggggtgttcaagcgatagtaagctggctgctttccagttcctttcatgatgaggacatatcgatcattgccgaagaagatgatgagacactatctagtagtgacggtgtaactttgcttgaatctgttgttgaggctgtcaacggctgcctggttgaagctccaaactatgggctgagatcccctgagaaagagctcagagctcatgatgttattcaagccatacggaaatgcagctctactggaggcccgaaaggaagattttgggtgcttgatcctgtcgacggcacccttgggtttgtgagaggggaccaatatgctattgctctagccttgattgaagatggagaagttatacttggtgttcttgggtgcccaaattatccaatgaaaaaggagtggctcaattaccatcaaaagtactataggttgatgtctaaggttgctcctcctccattggggtcctggcataaaggttgtgtgatgtatgcccagaaaggatgtggccaagcttggatgcaaccactggttcacgacttcggtaagcttaattggcaccacccaagggagattcaagtatcatccatcagtgatccaatctcagctacgttctgtgaaccagttgagaaagctaactcaagccattccttcacagcaggacttgctcaaagtgtaggattaaggaatcaacctctgcgcgtgtacagcatggtgaaatatgctgcaatagcacgaggcgatgctgaaatcttcatgaaatttgcaagagctggatacaaagagaagatatgggatcatgctgcaggggtggttatcattcaggaggctggtggagtggtcacagatgctggtggccgcccattggacttctcaaggggtgtttacctggaaggtttggatcgaggcataatagcttgttccggagcattgcttcatcaaagaattttaaatgctgttgatgcgagctggaactcatcaacactatgaaccaaacaataaggtcttaggagagaatggcctcatgttggtcatagcatggtaaggtcagttttacaaataattgtttcaccctcagatccaatctttttttccttttgccttacattttgatatctcgtacaggtaaattggaaaactgatttaagtattcattgtggtgctgttgtgactatggggtaacaccgtaacagtgcagcatataggatagtaatagattgtctgctcatataaacaagaagtcgtctcttgaggctgacaaattgctggcttttgttcaacgatgccatatgtaattttgtataggtgtctgttgatgaaaagcatgtgtgcatgcttttgtttttactaattgacatgtttcttttcaacttgtgcctgtcaatcgtcaggtgtattggttaagacagtgcagcaccatttgctgacaatcataatgttaaaaccttcaactgattcat

SEQ ID NO: 120016 - DNA, 1997 bp, Zea Mays
tgcacggctgcacccgcactcccgctggttcgcactcgtaatcgtggccgtgggcgccggcggcggctaacaaaagcgccgggaagtgggcaccgaccgaagcatcccggaacagacacagattaccgcttgtatttagatcggcccagaccatctgacgacgaggaggagggcggggaggcgaggccaaatccggtcggactcggaccggcgaactcccccgacctcgctatgggcagcctccgcgtcgtcggctgggcttggaccgccgccgccgcgccggagtggggcgtgcaccgccgctgctgccgcgggacgccgctggcccgcccccgcgcggcgacgtcctcccttggcgcggggcagctccgggtcgggacggagcacgggtggctctgggattgccgcggcggcggcggcgcgggggattacgccagggagatggaggtggcggtgcgcgtcgtgcaggtggcctgcaccctgtgccagcgcgtgcaggactcgctcctccgccccggccccgacgccgccggcggcgacgggcgcgtccacgccaagctcgaccgctcccccgtaaccgtcgctgattggggtgttcaagcgatagtaagctggctgctttccagttcctttcatgatgaggacatatcgatcattgccgaagaagatgatgagacactatctagtagtgacggtgtaactttgcttgaatctgttgttgaggctgtcaacggctgcctggttgaagctccaaactatgggctgagatcccctgagaaagagctcagagctcatgatgttattcaagccatacggaaatgcagctctactggaggcccgaaaggaagattttgggtgcttgatcctgtcgacggcacccttgggtttgtgagaggggaccaatatgctattgctctagccttgattgaagatggagaagttatacttggtgttcttgggtgcccaaattatccaatgaaaaaggagtggctcaattaccatcaaaagtactataggttgatgtctaaggttgctcctcctccattggggtcctggcataaaggttgtgtgatgtatgcccagaaaggatgtggccaagcttggatgcaaccactggttcacgacttcggtaagcttaattggcaccacccaagggagattcaagtatcatccatcagtgatccaatctcagctacgttctgtgaaccagttgagaaagctaactcaagccattccttcacagcaggacttgctcaaagtgtaggattaaggaatcaacctctgcgcgtgtacagcatggtgaaatatgctgcaatagcacgaggcgatgctgaaatcttcatgaaatttgcaagagctggatacaaagagaagatatgggatcatgctgcaggggtggttatcattcaggaggctggtggagtggtcacagatgctggtggccgcccattggacttctcaaggggtgtttacctggaaggtttggatcgaggcataatagcttgttccggagcattgcttcatcaaagaattttaaatgctgttgatgcgagctggaactcatcaacactatgaaccaaacaataaggtcttaggagagaatggcctcatgttggtcatagcatggtaaattggaaaactgatttaagtattcattgtggtgctgttgtgactatggggtaacaccgtaacagtgcagcatataggatagtaatagattgtctgctcatataaacaagaagtcgtctcttgaggctgacaaattgctggcttttgttcaacgatgccatatgtaattttgtataggtgtctgttgatgaaaagcatgtgtgcatgcttttgtttttactaattgacatgtttcttttcaacttgtgcctgtcaatcgtcaggtgtattggttaagacagtgcagcaccatttgctgacaatcataatgttaaaaccttcaactgattcatcaaatgagttattgtccgccagttttctgtcatcta

SEQ ID NO: 120017 - DNA, 2457 bp, Zea Mays
ccaatttctctgagaatcctaatgtcctgagagggattgcaggatcctcttggaccgccccccgcttcccgcacacgccatccaacagcataacaaacacacaggattgctccgcctctcggaatcagatagttcttggccgcctttgttgtgatcgtggccacaaggccccaagggatgcaggtcgcgtcgattgaatgagaagtaggtgagggagatagagcatggttgaggatggcgccgatcatacttcaccgtgcgttgtccttctccatcccgttgcttcatcgccgtgatgtgtcgtcgcccttacaggcctcggatgtgtcgaacagacctgaaggcctggcattattgacgagaattgctgaggacactgactgctgcgattctggacctccattgccagaccactcgccgttggagaaaagcctcatcagcaagatcctccgtctgagaggtgttttggatctgccatgtcgaagttcatgcgacgcgttggatcagttgcttctggataccctgggggttctgaaggttgcatatcccaaatgcttatcaggtgtatcaggaaaccatacatcttctgtacgggagggacttgttcacctccatcaggtcctcgtgttggttcaggattgctactcgaaaatcaagcagctgcctaactctggctctgagaagcaaacaatcatggagagcgagagcttagaccatgtaggtaagcgtgtcattgagatgcttgatcaggtgactccagtggtgaaagaaatgttcagttccatggaaagctccagttctgcacaggcggcggcggcagcagcagcttggccggaggatctcccagaaagaagaaccctccctcctgttctctgtcgcactacatcccatcatccatcagacggtgacgaggttgcgatgcacacaggacgttgcaaagttgaggcaccggcgcctgggcacgagacagatgagggcgtttgcaccagggaggaggatggccaaaccagcagccgtgaaccgctgtcagctcctattcctaccgctgagtttttaccgctgcagccgacgctgtcgtcggtgtccccacatctgctgtcggcgccgccgccgtccccgatgcccgtggttggcttgtccatgcttctgcagtcgtgggaggcaacgcaagatggccacgccaccgccgccgcagtggtgccacctgctggcgtcgcacagcctgctgaggcagcgccgacggcacacaaagacaccacgcccgtcggcaccagcatggaagtcgaaggctctacgtcctctgtgttacttgaagctggtcagcctgagccatgcgtggattcacccaatgggagcacgcaggcaccagcgcagggcggcaatgccgctgttccaaacgtgccgccgccgccgccgccagtaccggcgcacagaggcagatctcaagaggggccgtctatggacgagcccggtccggcagtgacagacacgccacctcgaccgccgtgtgaaatgcaaggagaaccacctgcactgccgccggccgccgccaaggttttgccgtcgccgtcgccgtcgccgtcgccgccgccactaccggcgcacagaggcagatttcaagagggggcgtctatggacgagcccggtcaggcagtgacagacacaccacctcggccgccgtgtgaagtgcagggaggaccgcctgcaccgccgccggccgccgccaaggtttcgccagcgccaccgccgccccctggaagcatctcggcagcggtgcgcggcaagaaagccgcgagcaagctgaaacgatcgacgcagatgggcagcctgtacagacgcctgcgagacagagtggaaggctctggcagcacgcacggcgacaggatgcggcagaaccgcaagaggccccggacggtaggcgcgtccaagagcgacgccggcggccagggcatggccgatgcattggccgagatggctaagaggtactcctgcgtatgcttgtgtggaaagggaatgttgccattagcaaccacggatcggtgtagttaattacttaatttccttcattccttgctgatgatgaaatcaaagtcaacattttttatgctaacatcctcatcgtgtatcttgaaactgaaagatcgacgtacttccgacaaatcgaagaggacgcggagaagtatgcagcggtgatcctggagctgaaggacgccatcggctcgttccagtccaaggacatgtccgagctggtgaggttccgtcagcacgtcgagcggcagctggtgtgcctgaccgacgagacacaggttagtttcatctggacctcctcagccatcagccgtgctccggcgaagcctaagcctttatggtcgacgcgccgtcgaactgcatgctgcactgcaggtgttagccaggttcgagggcttcccttccaagaagctggaggcgttgaggacg

SEQ ID NO: 120018 - DNA, 2842 bp, Zea Mays
ccaatttctctgagaatcctaatgtcctgagagggattgcaggatcctcttggaccgccccccgcttcccgcacacgccatccaacagcataacaaacacacaggattgctccgcctctcggaatcagatagttcttggccgcctttgttgtgatcgtggccacaaggccccaagggatgcaggtcgcgtcgattgaatgagaagtaggtgagggagatagagcatggttgaggatggcgccgatcatacttcaccgtgcgttgtccttctccatcccgttgcttcatcgccgtgatgtgtcgtcgcccttacaggcctcggatgtgtcgaacagacctgaaggcctggcattattgacgagaattgctgaggacactgactgctgcgattctggacctccattgccagaccactcgccgttggagaaaagcctcatcagcaagatcctccgtctgagaggtgttttggatctgccatgtcgaagttcatgcgacgcgttggatcagttgcttctggataccctgggggttctgaaggttgcatatcccaaatgcttatcaggtgtatcaggaaaccatacatcttctgtacgggagggacttgttcacctccatcaggtcctcgtgttggttcaggattgctactcgaaaatcaagcagctgcctaactctggctctgagaagcaaacaatcatggagagcgagagcttagaccatgtaggtaagcgtgtcattgagatgcttgatcaggtgactccagtggtgaaagaaatgttcagttccatggaaagctccagttctgcacaggcggcggcggcagcagcagcttggccggaggatctcccagaaagaagaaccctccctcctgttctctgtcgcactacatcccatcatccatcagacggtgacgaggttgcgatgcacacaggacgttgcaaagttgaggcaccggcgcctgggcacgagacagatgagggcgtttgcaccagggaggaggatggccaaaccagcagccgtgaaccgctgtcagctcctattcctaccgctgagtttttaccgctgcagccgacgctgtcgtcggtgtccccacatctgctgtcggcgccgccgccgtccccgatgcccgtggttggcttgtccatgcttctgcagtcgtgggaggcaacgcaagatggccacgccaccgccgccgcagtggtgccacctgctggcgtcgcacagcctgctgaggcagcgccgacggcacacaaagacaccacgcccgtcggcaccagcatggaagtcgaaggctctacgtcctctgtgttacttgaagctggtcagcctgagccatgcgtggattcacccaatgggagcacgcaggcaccagcgcagggcggcaatgccgctgttccaaacgtgccgccgccgccgccgccagtaccggcgcacagaggcagatctcaagaggggccgtctatggacgagcccggtccggcagtgacagacacgccacctcgaccgccgtgtgaaatgcaaggagaaccacctgcactgccgccggccgccgccaaggttttgccgtcgccgtcgccgtcgccgtcgccgccgccactaccggcgcacagaggcagatttcaagagggggcgtctatggacgagcccggtcaggcagtgacagacacaccacctcggccgccgtgtgaagtgcagggaggaccgcctgcaccgccgccggccgccgccaaggtttcgccagcgccaccgccgccccctggaagcatctcggcagcggtgcgcggcaagaaagccgcgagcaagctgaaacgatcgacgcagatgggcagcctgtacagacgcctgcgagacagagtggaaggctctggcagcacgcacggcgacaggatgcggcagaaccgcaagaggccccggacggtaggcgcgtccaagagcgacgccggcggccagggcatggccgatgcattggccgagatggctaagagatcgacgtacttccgacaaatcgaagaggacgcggagaagtatgcagcggtgatcctggagctgaaggacgccatcggctcgttccagtccaaggacatgtccgagctggtgaggttccgtcagcacgtcgagcggcagctggtgtgcctgaccgacgagacacaggtgttagccaggttcgagggcttcccttccaagaagctggaggcgttgaggacggcggccgcgctctactccaagctggacggcaccgcctcgaggctccagtgctggaagcacaccgccggccccgtatcggcgcagctcgacagattggagagctacttcaacaaggtcaaagacgaggtggacatggtagagcggaacagagacgaggagatgaagcggctgcagtcccagggcgttcacttcgacttcggcgtgctggtccggatcaaggagggcatggtagacctgtcgtccgcctgcatggagctcgccttgaaggagagccaggacgccagagagacgccgacgccgacgcgtgcgaagtgggcgagcagccacggcgatggagagtcgaggatgctgtggcgggtgttccagctggccttccgggtgtacaacttcgccggaggccaggacgagcgggcggacaggctgacgagcatcctggcgcacgagatcgaggagcgagcgctcctgtaagcctttccgtgcgacgtgtacggtttttttttttttggtgtgtccgtgtgtgaaagcgagaaagtgtacgcatcatgtcatgtgcaatctccgagaggtgcaacttgcaagttctatatgtctccttcgaactttaaatagatttatttatggtatagttcaagtgaaaaaa

SEQ ID NO: 120019 - DNA, 259 bp, Zea Mays
ccattgcctagcaacaccttgcaaggattgtgaccctcctacgctagcatgccctgactttgggggaattaaccacggcacgactgcagctgggaaactatctttgcctatctttgggctggcaccttacaaattacgtgcctccatttggacatctgacaaaacccaagaacgggaccgtgtcacctctctgatgcaggaggctgacagctggctccgcacaatacaagtacaacgtggagatgatctgtggctgtaa

SEQ ID NO: 120020 - DNA, 498 bp, Zea Mays
atggtgcggatgtggcccctctcctcgttcagtgtctgtcgtcccccctgcagtggcggcggtgcggcaacgagtcctctcctactccgccatgcactgctcgtcctccgctggtgcgacagcggctcctctcttattccaccgcctctcgacctttacggtgatagaatcgagctactcctccgccaccttccgttctccgatcatcctcctcgtcctccaatgccacaatccccgacaagcaaatacaacctttacctcagtggcgcgtaccccaaccccaaccctcgcccgattggagagagcgatggtccgaaggctgctgaaaggagacggacgtcgatgttactcttccataggagtgacatttttaagcgatgtggacccttaaccttaacatatggacacaaagtcatttttggtaattcgattcttaaagatcatgtttggtacagtttttcccggttttccaaagctatttttagtttctcgtgttaa

SEQ ID NO: 120021 - DNA, 676 bp, Zea Mays
atccagcttctctcgcctgtcggctgtcgcgtcgcatcgcatcgcatccatggcgggagcctccgcggtcgccgtgctgcccgtggccactccagccgcgccgcgccgaggaggcgccgggccgtgctcctgcttggcgcccggaggcagcagcttctaccgccgcatgaactgccggcgtgatagccccagcgcggccgcgcctacgaggcgacgcgtcgtcgcccgtctctccgggcgcgaccccggcgaggccgggaccgacgcgggcgtggggcaaatcctcaagggtgatgactccggctatctgtggacattggtgcttgggtcccttggtggcgccgcggttatcaagtacggaagcatcctgctcccggacatcacgaggccaaacattgtggtagctctgctgatggtgtccctgcccgtggtagccgcagtcttggctttgctcaaagcgagctcggtggattgatagtgatacgacgcgaggactccacgaaacctagaattcgagattactgaaacttgtttctaatgatagcttcattgtaagatgaaaatgtttgaactctgctgaatgatctttttttggcatcgctcgatgcaagctttgcagctccagaagaaatcagaaaaagaacgcccgttgatcttgaatttgattaacccaaaa

SEQ ID NO: 120022 - DNA, 851 bp, Zea Mays
ctgggcatggccgcatggcccatctcttgtcacactggcttctatgagcccaagagccgcttcggccttccgctctccgtgttgccgagctgcggcgggcgttgcgcctccctcgcctcgccagtcccctcgcctctttctcgtttgcggcggcgtccacagcatctgcggctcctgccaccacgtttcggctgcgaccccttcgcccgaaatacgaatggtacggtaccagtgccacgtccgtctccaaccttctctttgccgcaacgcaaccatcttcgtgcatgcctacacggccaaaccctagcttccacctggtatctaaatttcttcactgctgtttttttttgaacgattcgttacctaatagcttgttaggcgctactgctgtatgattccacccagccgaggatctggtttgcggtgatttatgctcaatgagtgggattcacttgtatgtttacaatgcgagtagattttctgaggctgtttacatcctttattttttttctttatttttttatgcaaaggcgaggtacaaagaacgttatgccggatctgtttccttaaacttggatgctccagtgatgaccaaatttacttctaatgtcgttccgattcctgaaagcagctccagtgagacgctgcagtgctgcacgctatgtggagatgaagagacatctgaggagccgagttcgtttcttgaatagatcaatgtttgggctactcttgtttgtccgcttcttattcttcttcttctcgatgctgcactgttgctgcttaattaaggttgagtgctcctgtgatgatttaaattggcctcctatatcgttccaattcctgaaagcagc

SEQ ID NO: 120023 - DNA, 789 bp, Zea Mays
ctgggcatggccgcatggcccatctcttgtcacactggcttctatgagcccaagagccgcttcggccttccgctctccgtgttgccgagctgcggcgggcgttgcgcctccctcgcctcgccagtcccctcgcctctttctcgtttgcggcggcgtccacagcatctgcggctcctgccaccacgtttcggctgcgaccccttcgcccgaaatacgaatggtacggtaccagtgccacgtccgtctccaaccttctctttgccgcaacgcaaccatcttcgtgcatgcctacacggccaaaccctagcttccacctggcgaggtacaaagaacgttatgccggatctgtttccttaaacttggatgctccagtgatgaccaaatttacttctaatgtcgttccgattcctgaaagcagctccagtgagacgctgcagtgctgcacgctatgtggagatgaagagacatctgaggagccgagttcgtttcttgaatagatcaatgtttgggctactcttgtttgtccgcttcttattcttcttcttctcgatgctgcactgttgctgcttaattaaggttgagtgctcctgtgatgatttaaattggcctcctatatcgttccaattcctgaaagcagcgaggtgctgctcattttgtggagatgaagagacatctgaggagcctattttgtttttcttaattggtgtttttggggaaacatttgttgtcagtttctatcaaacattttgttccatttcaaactatttatgcatgtgaattttggtttaa

SEQ ID NO: 120024 - DNA, 579 bp, Zea Mays
ctgggcatggccgcatggcccatctcttgtcacactggcttctatgagcccaagagccgcttcggccttccgctctccgtgttgccgagctgcggcgggcgttgcgcctccctcgcctcgccagtcccctcgcctctttctcgtttgcggcggcgtccacagcatctgcggctcctgccaccacgtttcggctgcgaccccttcgcccgaaatacgaatgatgagagcaggataagataagcaaagcaaattatgcgctgcagaagtcctttgcattgcagttttccactggaaggttgtgatgcaaggtacaaagataaacttgtagacagaaaccataatgcctgaccctgcttattcgatctcaattatggtcaactagagtaattgtcgtggttcaatgtactgtacttgttataagttcatatggtgcaattgttgtaagaggttactcagcactcagcagcgctgtccaagcttgacgagcaccagcgcctgcacctgaccgacctgctcgatgtacagaccagcggtttaaaaattaaaaggcagttgaaagtttgcgcattacgatagaaa

SEQ ID NO: 120025 - DNA, 711 bp, Zea Mays
aaacacctcacccatgacccatctctctcttatcttcaagacatgtccacccatctctcttctcggaaatccatcctccccgcccctccccacgccacccccgaccgatctattcgtagacggggacgggttgaataattccatgtgtacgctggtgatgagccgacgagacatggccctccttgccgtcttccacagctttcttgaactgcatgccgccggctggtggatgctgcgcgcttgaattccggtcgatcccaagaggcgcagttcaataaagctgtgggaaactgcagagagaggccaccagccgatccgatcgatcggatcggatcgcggcaccagatctcgaccaccgccggaactgggcgggggcgaagcagatgatgcggcgattaattaaccggcgtagcagcggctggggatctacctgcatcacgtcgatccacccgcggtagatcgatgggaccgtcacaacaaggacaaggtacggattaggtttcttgtactggtaggaatggatggtggttatgaatgcatgtgttgaattccgtacacgtgtgtgtgagagagagagagtgatggtgcgtagggctggttaatttcgtcgtctcagcttctttcccgtgcaatttaatctcaacctatgtatatactacaagaaaagggttgttgttaattaccagtgtctgaaattgtggtttttctgaa

SEQ ID NO: 120026 - DNA, 1174 bp, Zea Mays
gtgattaatcattttttgcgaagcaatacacattcacgttatgtttcatatagtgcatcatttttggaataatacatagcggttgttacaatagtctgtttattagaaaatttccaatagataatagatggtcgtgcctccatataaaaaaattacaaagccacagatatttacaaatataagtgctccaacaacactaagatataaaactaaaggtcctagtgtctcttcttcatcatccccttgactgaatggatctttctcaatgtctagagaacgaataactgtgatatagcaagctagccacaaatatttacaagactgctatataatttataacacacattattaaccctaaatattattttgactggactcaagtatctgtgaccaaggactatgagagtctaactgagatctccaaatatgttggaggaaaactccacaagcatcttgtttgtccattaaatcttgtttatgcggtagagtcgggttgcttatttgtacaatccttgttgtttatgttctaagtgttggcatatacttaaagtaacagggcaacgttcaaggaaagtttatttgtgttccaaacaaagatcttattgtgcccttcggcttaaaatagactattaattaaactcagaatatactttaaaatttttctcatggtattaacgaggaaggattctgtacacagttgtcgtcaatgtagaagaagtcttatctattctatatgcatcagttggttcttttccataacttttgagttttgcacaaagtttataaagtgcatgattgtatccccctacagacttgaagtcttgtaggcgaagatggttccattcatgtgtagctgttgttgttcataccgttgttggagagcgatccaaaaaaaaacacgtgaaggctaggtctgtggtatatatatgaggcgtatgatgtacttggttttattgttgggtactgagtaccctattaccgttgaacaatgacctcccaaaaaaatttgtaaagagagactgactttgagatctattgaccatgtgggaaaattatgtccatcaaaagcaagtgattcaaattcttttatggtgtcaacatttgacatgttgcctctttgacgggagttctgcatcctttgtattctccagctccttgacctggagcagtgtta

SEQ ID NO: 120027 - DNA, 780 bp, Zea Mays
atccatcgcaccgcttggtgggccgtccacatcaccaaaccttctggcttctgcactgctctcctccacccctcaacgaagcctctggtgcctcggccaccgcagcagcctggccctgccccggcccccgggcgtggtgtcaggtctcaggtgtggtggcgctttctcctctccggcacggtggccgcgtcatcccagctctcccgcgcggcggcggcggccgtttcctctcctgcgctcctcctgccgcacacagccagaaaattccagctgaagtttgtttgaggataggcgacagctttgcgagtccttcgtgttgaaggagaaattgtagctgaagtgaaaaaacagcagggaacgatggcactatcacgaagtatgagagcatgtttgcacagtggaagacttgcacttcttgccatattggtctctggtggaattgtattgcaaatcttggcttgtgctctctataacaactggtggccaatgctaacagttctcatgtaccttatcctaccaatgcccctcatatttttcctgggttctgatacttcctccatgatgtccaatgggggagacgggtaagtgattgtctctagtccaggctgctgcttttttccccttaatcacccctgccacctgctttggcactatttgttgcccccaaagatatgcattgccttgctggcattcatttttagtagagattctaaaacaaaggtcctgagccatcatggttggattgtcttcctaaacaacatttctggtgcacaaacgaat

SEQ ID NO: 120028 - DNA, 982 bp, Zea Mays
atccatcgcaccgcttggtgggccgtccacatcaccaaaccttctggcttctgcactgctctcctccacccctcaacgaagcctctggtgcctcggccaccgcagcagcctggccctgccccggcccccgggcgtggtgtcaggtctcaggtgtggtggcgctttctcctctccggcacggtggccgcgtcatcccagctctcccgcgcggcggcggcggccgtttcctctcctgcgctcctcctgccgcacacagccagaaaattccagctgaagtttgtttgaggataggcgacagctttgcgagtccttcgtgttgaaggagaaattgtagctgaagtgaaaaaacagcagggaacgatggcactatcacgaagtatgagagcatgtttgcacagtggaagacttgcacttcttgccatattggtctctggtggaattgtattgcaaatcttggcttgtgctctctataacaactggtggccaatgctaacagttctcatgtaccttatcctaccaatgcccctcatatttttcctgggttctgatacttcctccatgatgtccaatgggggagacggctgggtgaacttcacgaaattcttgacgggcgcatcaatagtagggagcatcgccattccgtcgatcctgaagcatgcgggcgtcattggatggggagccctgacgatggagctgtcatcctttgtggtctttggcgtggcaatcctgtggttcctccagatgaacggtgaagacgagtacagcggagtgttctaatccaaacctgctgctgctggttctcttgccagcgtggcactctgtgcatggtagttgtgaactgggctgtactgctacaacaggggaagcattgccctgggacctgatttactgacaccagtacatgtttggtctgcgatttttgtttgtcctcgtaggtttgcctgacttccagaattttgtttacgtggccgtggtatctaga

SEQ ID NO: 120029 - DNA, 1428 bp, Zea Mays
ccacgaactgtctatctgcatccatctcttggccacacccactgaccgcgccacaccacacctgtggctctccgcctcgagatgctttacacggtgtagctggcaagaagccaggaaccttccctgttccctcccgggcgcaaaggggctcacttttaatttcctcgagaggggactgcctcctttctccggcggcaagccttctcctgccttgttgcctgccactcgggctgtcctccttcttgattcttggcaccgtcggtttaatttcgcgaaatggcggcaggggtgtcgctcaagatggccggcttctgcgtcgtctgggcgctattctggctcgccggctccgccaccgtgagcacgagcaccaccgccttcgccggcggcgaggcggtggtcatggacgcgcggtccgtcgtcgccgtcaccgacaacgacttcgtttgcgccacattggactggtggctgccggagaagtaggactacgacacctgcagctgggggctggcctccctgctcaacctgcgttctcccccttgaagctccgcctgggcggctctctgcaagacatgtacgacaccggcgacgctcgccagccctcctgcgccccgttcgcgaagaacgcgtcggccatgttcggtttctcgcaaggctgcctgccgctgcgtagatgggacgagctcaacgccttcttccagagaaccggggcaaagattgttttcgggctgaatgctctgaatggccgggtccccatgcctgatggctctctaggggggccatggaactgaactaccacgaacgcggcttctttcattggctacaccgtgagcagaggatacgatgtacatggatgggagctcggaaacgaactgagcggcagcggagtcggagctcgggtcgacgcagaccagtacgcagcagacgtgatcgcgctgaaacgcatcatcgacagcacctaccaccagagcagcagcccggcaaagcctctggtgctcgcgccaggaggcttcttcgacgcggcctggttcacggagctcgtcggcaagacgaagccggagcagatggacgtgatcactcaccacatctacaatctaggccccggggtcgacgatcatctggtccagaagatccttgacccttcttacctcgacggcgaggccagcacgttcagcgatcttgaggggatactgaggtctgcaggtacgtccaccgtcgcctgggttggcgaggccggaggggcttacaacagcggtcgccaccttccacatgattggttggtgtactaagaagcgtatggcgcgagccagcctcgtcgagcagagaagctcgctctctggatctccacgtatgcaggctgaaggtgagaaatataactgagttgtatgtgtgtgtacgaactcgggtcattacatgcaggtaatcaatcac

SEQ ID NO: 120030 - DNA, 2252 bp, Zea Mays
ccacgaactgtctatctgcatccatctcttggccacacccactgaccgcgccacaccacacctgtggctctccgcctcgagatgctttacacggtgtagctggcaagaagccaggaaccttccctgttccctcccgggcgcaaaggggctcacttttaatttcctcgagaggggactgcctcctttctccggcggcaagccttctcctgccttgttgcctgccactcgggctgtcctccttcttgattcttggcaccgtcggtttaatttcgcgaaatggcggcaggggtgtcgctcaagatggccggcttctgcgtcgtctgggcgctattctggctcgccggctccgccaccgtgagcacgagcaccaccgccttcgccggcggcgaggcggtggtcatggacgcgcggtccgtcgtcgccgtcaccgacaacgacttcgtttgcgccacattggactggtggctgccggagaagtaggactacgacacctgcagctgggggctggcctccctgctcaacctgcgttctcccccttgaagctccgcctgggcggctctctgcaagacatgtacgacaccggcgacgctcgccagccctcctgcgccccgttcgcgaagaacgcgtcggccatgttcggtttctcgcaaggctgcctgccgctgcgtagatgggacgagctcaacgccttcttccagagaaccgggtattctgctctactgccttcggccagttccaggaaccgcattctatctatctggacacggttgcctagctctctgcttgcctttgcattgcagggcaaagattgttttcgggctgaatgctctgaatggccgggtccccatgcctgatggctctctaggggggccatggaactgaactaccacgaacgcggcttctttcattggctacaccgtgagcagaggatacgatgtacatggatgggagctcggaaacgaactgagcggcagcggagtcggagctcgggtcgacgcagaccagtacgcagcagacgtgatcgcgctgaaacgcatcatcgacagcacctaccaccagagcagcagcccggcaaagcctctggtgctcgcgccaggaggcttcttcgacgcggcctggttcacggagctcgtcggcaagacgaagccggagcagatggacgtgatcactcaccacatctacaatctaggccccggggtcgacgatcatctggtccagaagatccttgacccttcttacctcgacggcgaggccagcacgttcagcgatcttgaggggatactgaggtctgcaggtacgtccaccgtcgcctgggttggcgaggccggaggggcttacaacagcggtcgccaccttccacatgattggttggtgtactaagaagcgtatggcgcgagccagcctcgtcgagcagagaagctcgctctctggatctccacgtatgcaggctgaagcgctctactgtggcaccgcctcatgggcaccaaggtcctctctgcgacgttcaacggcacgaacaagatccgcgcctacgcacactgcgcgaagagatcggtaaaggagcgggcacagaactccgtttgtattgtatcttcctggcaacaacagctcgtagcgagtgtctgaaccatgcttgagatctttcagggaagggtcctctgctcctgatcaaccttgacggcaacagcacgaaccgcatccacgtcacgagccaaggcgcacaggcacagagtgcgcggagggagagagcggggggacgcctggtcgcttccctttccctgcgcttggcggagcagccgagctgctcgcaacaagagaggagtaccacctcgctcccaaggacggcgatctgcagagccagcaggtgctgctgaacggccatgttctggcaactgacgccgacggggacatcccagagctggagcccgtgcgggtggatggaacgcagccggtaaccgtggtccgtgggcccttactcgatcgtgttcgctcacatccccggcttctacgctcctgcctgtagctagaatttttacaccccagccttttccttcctggtgtgtatcataggttcggataaatccgggcgaacggcgaagcttgttcgcctgtccgtgcgtgaagtaaagctgcgaggctgaaaggtgtgcgatttgtcattgtttgggaaacaagtgttcggataatgtgtgagcaaaggggaggaaagtggagatgaaaataataaaaggaaaaaaaaggtttcgaatttt

SEQ ID NO: 120031 - DNA, 1029 bp, Zea Mays
gctaaaagagattaaatcatattaatttcacttttacccctcatttagttcaattgtactaatagtaggagaatgttaaaggtcattttagtcttcttacgagtcatttagtatattcttactatttttatcccatagaatcaaaaatgttagggactaaactttagtcccctaactaaactttagtccctagactaaagaaaccaaacatgaccttaattttctctgtagcgctctactgtggcaccgcctcatgggcaccaaggtcctctctgcgacgttcaacggcacgaacaagatccgcgcctacgcacactgcgcgaagagatcggtaaaggagcgggcacagaactccgtttgtattgtatcttcctggcaacaacagctcgtagcgagtgtctgaaccatgcttgagatctttcagggaagggtcctctgctcctgatcaaccttgacggcaacagcacgaaccgcatccacgtcacgagccaaggcgcacaggcacagagtgcgcggagggagagagcggggggacgcctggtcgcttccctttccctgcgcttggcggagcagccgagctgctcgcaacaagagaggagtaccacctcgctcccaaggacggcgatctgcagagccagcaggtgctgctgaacggccatgttctggcaactgacgccgacggggacatcccagagctggagcccgtgcgggtggatggaacgcagccggtaaccgtggtccgtgggcccttactcgatcgtgttcgctcacatccccggcttctacgctcctgcctgtagctagaatttttacaccccagccttttccttcctggtgtgtatcataggttcggataaatccgggcgaacggcgaagcttgttcgcctgtccgtgcgtgaagtaaagctgcgaggctgaaaggtgtgcgatttgtcattgtttgggaaacaagtgttcggataatgtgtgagcaaaggggaggaaagtggagatgaaaataataaaaggaaaaaaaaggtttcgaatttt

SEQ ID NO: 120032 - DNA, 941 bp, Zea Mays
gctaaaagagattaaatcatattaatttcacttttacccctcatttagttcaattgtactaatagtaggagaatgttaaaggtcattttagtcttcttacgagtcatttagtatattcttactatttttatcccatagaatcaaaaatgttagggactaaactttagtcccctaactaaactttagtccctagactaaagaaaccaaacatgaccttaattttctctgtagcgctctactgtggcaccgcctcatgggcaccaaggtcctctctgcgacgttcaacggcacgaacaagatccgcgcctacgcacactgcgcgaagagatcgggaagggtcctctgctcctgatcaaccttgacggcaacagcacgaaccgcatccacgtcacgagccaaggcgcacaggcacagagtgcgcggagggagagagcggggggacgcctggtcgcttccctttccctgcgcttggcggagcagccgagctgctcgcaacaagagaggagtaccacctcgctcccaaggacggcgatctgcagagccagcaggtgctgctgaacggccatgttctggcaactgacgccgacggggacatcccagagctggagcccgtgcgggtggatggaacgcagccggtaaccgtggtccgtgggcccttactcgatcgtgttcgctcacatccccggcttctacgctcctgcctgtagctagaatttttacaccccagccttttccttcctggtgtgtatcataggttcggataaatccgggcgaacggcgaagcttgttcgcctgtccgtgcgtgaagtaaagctgcgaggctgaaaggtgtgcgatttgtcattgtttgggaaacaagtgttcggataatgtgtgagcaaaggggaggaaagtggagatgaaaataataaaaggaaaaaaaaggtttcgaatttttctct

SEQ ID NO: 120033 - DNA, 2195 bp, Zea Mays
attaatgcatccgcctacagggatgggcctcatattctgcttcccgtctgtctttcggttcggttaaaaaaaaaaactcgtcccccaggaccaagaaaacttcctataaaacgacaaagatcgttcactccaagtagcagggcaaaatttgttttgtttttgatatattcgaaaaggccaagtcaacaaaggttacaaaagtttaggcaagtggaccggaaacaaagaagatgacgaaagtgaacggtcatattgccctgctacacgacactaaccatgttctgcagacaaaaccggaagcttgttttccacatttcactagtcgattggcacttccacctccatcttaaggccaggatggtcgatgatctgaaacaacagccacaagaacacattctcagacgtgctaccgacatataagacggccacaaggcttgtagatggatatggaaccgcaatagacatcgaagaatatgcaaatagcctatgatatgatacagcggtggattttggctttactaacgcctttgccctcttaatagaaaaaaacgtgcttttgcgtggattgtttctacctaggctatcaatacagcaacacgcaattctcttgcatgtgttcagagggagggaaaacagatatatggacacggaaaaggatttctgcacctggataaaatcttcaagcgagaatgcgtaatccctcgtgtaccctgcttcttccagaacttcagttaccacttgctgcaagacgtcaatatgatatgtctcacgctgatattgcacaattccgtataaaaaccacacggccaatttagatatataataagcacctctctttgttcctcggacatgaatgaccctgttaggtcccgtaaaacctctagcagatccttgaagacaaagaaaaacgttgaggaagtgagtaatcatgagaacttcatcatgcaacacctacgtgcttttgatataagtaggaagaaaacaacgaaatgcaaacgctatggcagtcagcaaggcagcagatacagaggaaacccaaccaagctttgcccagacccagatagtgcgactgatgtggatgaggccatgtttggcagagtttctagcaacttttgcttcccaagagagctcaaaatgcagaaggtccccaaacaggattgcttcttcaagcagacaaaagcaccaaaacctcaactgtatactgaaagtatagaagctcactcggagcagctttcccatgatgcatctccaggagatgatgcttatggaaaggctacagctcccctaaccatggccttaagctataattaaagtggcgagcagcttgtttgattagatgttttatttaccttccctttttttcgtttggtttcagattcacaagaggacaaaatggtttatattcagtagctctccgagggaatgttgtaaattggcagctctccgaggccagatatgcaaacaaaaaggaaaaggagggaagtacaataatctgtagcaacagcaccaatcccagaacagttgtactgtacataactgccagcataaattgacaatgaaatggaaaggtaatgggacatacaaaaaacaatcagctcagcctgaaaaaataaaaccacatgaaacttagcatgaacgagagggagcgggtagtgggaggcaccttggagagcgggttgagggagaactcggggatggagaggaactcgtcctcggagatgaagcccttggcgctgcggtccaactggcagaagcgctcgtacagcgacacgatctcctgctgcgagactgctcgagaatcaaatgaaacaccaacgattaattatctacacaatatgtatatatagtagatgtagagagaagaaaccaaattgtgggagagagagagaaacagaagggggccaaggatcggatcgtccatggggcgcgcggcgaggtagttacagaggtagctgcagtgctcctgcacctcctcgatgtcgtactgggtcagcatggacgacgcgtttcccatggctccccttccttccttccttcgccctacgatccaacagtagttgccgccgaagagcgcggcggtgaacttggctggcgtggatgggaagaagggaaagggacgcgagggcacgggacgacagtcacagacgacgccacgccacggccgcatattctcatgccaaaattcccggttgccg

SEQ ID NO: 120034 - DNA, 1014 bp, Zea Mays
atggccgtctccgacgatgaaactgttgagatcgactgcaacgaggagcgacggttgtgtgggttggccggagacgacgatgaggatgacctccgggaggatgctgcagcgctctttggccttagcagtgagcatcccgtccatgtcggtgatgaacaacaagtcggtggtcaggatcaggaagtgtggttagatttcgagaaaattttcaaaaccgtgaatggtaagaagctaagatccagatgccgctcgtcctcaccattggagcacaccgcagggaggaggagaaatggcatcgccggtcagggcggagctcgcaagcggccagggtgcgcgtgggggcttcgacggggctcgccgggcagaggctgcgctggtggagcggcggtcgctggagcagggcctgccgggcgaggctgcgctggtggagcggcggtcgccggagcagggcctgtcgggcgaggtggcgcgacggctgcgttcggcaatggccggcagatgcatgaacgatgctggcgcggcgtgaggggatctcgtcccactgaccatggcagcagcagcagctctactgcagccgtgccacatcgaggggagagatggggcgctcaggcgggcccagccgctggctggccgcgcagagccgcaggaatgggccgactgggagagcactgctccctacgcgctgaaccagggaagaacagggaaggcagccatggattgaagacaacctgcttgggatatggccacggcacaatcgctcaaccggggaaaacagagggagcgcaggagagggggacggctcacctgcgccgagtaaccgtcggggtgcctgctcctgcgcagtttggatctgggggaagacgaggggttgcaaggagggatgtgtgcgtatatatagaggaggggtgcggcaaggcggttgcgcacacgacgcgcggggcgttgcgcgacggggcgaggaaaaatgaggtgaccgtgaccgagcgaaaaagacaattgcgcgagacagtgtaa

SEQ ID NO: 120035 - DNA, 987 bp, Zea Mays
tcgaaccggggaccgggccacatctagctttccggtgtccatggccgcccgcccaccgctttcgcagctcctaaccacagtttagctcaacctaaccccaacccagaccaggtcagcccagttataaatagcctctgcaccgcgcgcccctcaagtttgcagaaacgaaagcagcagcccaattgggagctccactccaccccacccaactcgccgccacctctcatggcgactgctgcgaccaccaccaggaggccgagcggccccgtcctctcggccgcgcactaccgctacgcctcgcccacgcgcgtctcgctctccggcgccgggcagtccgtcagcgtcagcgtctcgtcgtcgtcgcggggccgacggacctgcatgtgctcgccgaccagccacccgggctcgttccgctgcagcctgcacaaggagcgcgcgacgaagccgccgccgccgcccctgaccaccaccagccgtctgtgcgcggcgggcaggcggatgggcagcgcgctggtgcggatcggcgccgtggagggcggccagtgcgcgcgccgcgcgctcgcggccaccacggcgcagcaccgccgccgcgtcggcgccggcgccggccggccccgccctagccgcctctccgccgtctccgtggccggcgaccgccccggcgacaacggccacctatagacccgccgccgacttgccaccgtaccgtgtagagctagcctagcggcactagtagtaacagtatagtactagcatcgtagtaataataataaaaaaatttggaccggcggttaactagaacaagaccagagcagagccgggaggttggagcgctggatcaggactagttttgggagcctggtccatggatcatcaccatcatccagggaaaaaggctctctctttctcttgtacgtgtactgtgtacatagaattgcagatgatgggatgcatgcgagtgtccagtttggatttcttggatgg

SEQ ID NO: 120036 - DNA, 720 bp, Zea Mays
atggcagatcggatggtacgacgtgaaatcaaccgaccagatcttgtccgttcgcttggcttgcatggatgggtccatccaggttcactgtgtccaaattcttttgagcactggatgctgctgacctggctgctggtggtttccacgggcctcactggcgccgcgcagccccacgggcctcactgtgtccaaatccgctactttacagtcagcactcactcagcaacgtggcaatggcgccgcgcagtcactcactgcctcactggccttcgtccaggagcactcggaggctgtgaagcccctcggccgatatgctcggcgcgaccctgctgcccgtactcctgctcgctcggcccccctgggccctgggaggcgcgtcccggtggaacgcgaccagcaccgccgtcaggttgtccctggcgccccgccgcagcgcctcgtccacgacctccctgcagcacagccgcgggtcgttgtggtcctggaggcgccgccgcgccaagtcacacggcgttctggctcgagaaggagtcccacacgccgtcgctgccgatgatcaggaactcgtcgtccttgctcagcgtgaccatcttcagctccggctccgcgctcaggggccctccccctgcccctccccctcctgcccggcccgtccctttcatgacctccaggtgccagtcgcccagcgctctggtgacggccagctggccgtttaggtag

SEQ ID NO: 120037 - DNA, 2337 bp, Zea Mays
gcacggcacttcccagcgatttcctcgtcctctctctctctctctctctcgcgctccctctcccactcgacggaggagaaaggggggaaagcaatcggaagcgcgagccggcgagcgagatgggcgccgggagcagccgcgcggacgcgccgtcgcggcgccgggcgcgcctcggcctcggagggtgcttcgggacccgatcctcctcctccccagccgccgccgccgaagcgcacgacggcgggagcttcaccttggccgggtcctcctcctccagcgctatcgaggtacaatcagggcgaccagtacgtgccctgaattttcaggcttctctagctgctaaggatctccagatttccaccgcgtcaagtccaaggctgcattcctcttcaagtaccataagccatcacctcagattcaatcacctcaattgccatgaaaacaaggaagatggcctggggactgaaaatgctgaaacaagtggccttgaaagctcatctaggaaggctgtcatggttaggggaagtttcagtaatgaagctgttaatagtgatatgtcaggagaagggataagttttataggatcagagctggaaaatattcctagcacagtctccactaatgaaactggtggctcagccgctgaatctggtttgggcccctcattgatggcatctgaaaggatcatgtctgacttagaaggagaggtatctccgcaagggacctcatccacaactgccatgacaagtgaaagatcagatgtatctcaagctagcttaacatctatgtttcctaactcttcaattgcatcatctgtgattgtggaaccaatgccagatccaatctctaccagggcagatgtccccatattcagtgggccacatggtgagcctggagggagtatattacatgatgacatgatgagcattttctcaaatgacggtctaggacgctctagggattctagcagcagtgaaacaaggaggagtcacagaaggattctatgggacacgttttccaggcgtggctcaagaggttatccagaatttgatgctgatgacctcggattttacagcacatggctagaccttggtgatgacatttttgaagagttgggggaatcaagatattttcatcgcaggcgacatggttcgatcagagtaagccagtattcaagatcccggattagggagcatcgccgtgctgtttttgatagtggtaatgaacaaggcactgctgcatgtcctttggggattcatcaaactggccgatgcacatgtgattctttcttggttgctgaagaatctagtgcccgagcaagtatatcaagaattgtcatgttaactgaagcgttatttgaggtgttggatgaaattcaccgtcaacctgcatcactttcactttccatggtctctgttcaggctcctgaatctgtagtcaattcgttgccgtgcaagagctacaaaaagctagaggcaccccaacgcagtgatgatatggaacagtgccatatctgcctaactgaatatgaggatggagaccagatacgaattcttccttgcaagcacgagttccacctgcaatgtgttgacaaatggctgaaagaaatacacagggtgtgccctctgtgccgcggagacgtctgcgaagtcgcctcgtgaagaccttggcgctgccatcccttcctcacggcaccggcagatagcgcatcccccgcctgctccgttgttgaagctggtttggtcaggcaacggcgatcacgtcccgtcaatctgggcgtccctgccgaagagcgtggccagatcctgcgaccaatgcgtcgctgttcctgccatcaactttttaagataccgagactgtatatagctcttgtagcctctccgtgtatgacaacctgtacatatatatgtaaattctagattccaatgtccattattttgtcctacattcagatcttattctcgcagccctgatgctcaaactagctttaccagaatctgtcaacacctcttcaactataaaaaggtataattattgcagaatgaccccaaatatcagacgcttccgattaagagaattcgattcaaatctagaaaggcaacagctgaatcttttccaaataacagaattttatccaaatctagaaaggaacaaactgaaacatttgggtcacaaaaatactgatttattttggcaggggccgcgcggacgcgtaccccctcaatcacaaattatgacatccactctcccagttggggagatggtagatcagcgcatccaccaagtgcaatgtggaccactaatctagaccatgggtcttcttgaacacccatcgat

SEQ ID NO: 120038 - DNA, 6000 bp, Zea Mays
ctctattacgcccttcccaccacacttgacccatcgccgtcatcccagtccacgcccacgcccacgcccacgcccacgccgacccacccgcatccctccctcgcctccaccgcagcgatgtcgggctgggacgagggcgccgtgttctacagcgaccaggcgcagttcccccgcggcggccccggcggcgacccagccgccgacctcacccgccactccgcccttcgcaagttcaaggagttcctccgcggtttcaccggccccaccggcgacttcccttaccgcgagagcctagtacacaaccgcgaccatgtcaccgtcgccactgaggacctcgacgccttcgatgccgagctctctgacaagatccgcaagtcgcctgccgattatcttcctttgttcgagacggctgcgtccgaggttctcgcaagcctccgttcgaaagtcgccggcgagaccggggagatggaggagccagtcccaggagatgtccagatctttctctcctccaaggagaactgcctgtccatgagatctgtcggggcggattacatgtcgaagctggttaagattgcgggaatcacaattgctgcatcgagagtaaaagccaaagccactcatgtaactcttatatgcaagaattgccggagtgtgaggacagtgccttgcaggccaggcctcggcggggctatcgttccacgttcgtgtgaccatgttcctcagcctggagaagagccatgccccctggatccttggattgctgtcccggataagagcaagtatgtggatctccagaccctcaaattgcaagaaaatcctgaggatgttccaacaggtgagcttccaaggaatatgctgctttctgtagatagacacctagttcagactatcgttccagggaccagattaactgtcgttggcatctacagcgtgtaccaagcttccacaacccagaagggtgcagttggtgttaaacagccttacattagagttgtgggtttggagcaatctcgagacaataactcaaacggtccctcaaattttactctcgatgaggaaatggaattcaaagaatttgcacagaggccagatgcatatgccaagctctgctcaatgattggtccttcaatttatggtcattctgatgtcaagaaagctattgcatgcttgttatttggggggtctaagaagaggctacctgatggtgtacgtttgagaggggacattcatgtcttgcttctgggtgacccatccacagcaaaatcacagttcctcaaatttgtagagaagactgcccctattgcagtctatacatctggcaaaggttcatctgcagctggtcttacagcatctgtaactcgggatagtagctcgcgcgagttttatttggaaggaggagccatggttttggctgatggtggagtagtttgtatcgatgaatttgacaagatgcgacctgaagacagagtggcgattcatgaggccatggagcagcagacaatatctattgccaaagctggcattacaacagtactcaattcaaggacttcagttcttgcagctgccaatccaattgcaggacgctatgatgatcttaagactgcacaagataatattgatctacagaccaccattctttctagatttgatcaaatctttattgtcaaagatatcagaatgtatgaccaagataagcgaatagcaagccacattatcaaggtgcatgccagtggtgcagcagcgtcatccgcaaacacagagggaagtgaaggagagaattggcttaaaaggtacattcagtactgccgtgcaacatgcaaaccacggctttcagaaaaagcagctgagatgctgcagaacaaatatatcgagattagacagaaaatgaggcagcaagctcacgagacagggagggctgcagcaatacccatcactgtgaggcagcttgaagccatcatacgtttgagtgaatctcttgcaaagatgagattgacaagcgtggctacaccagagcatgtcgaagaggcattcagactgttcaatgtctccaccgtcgacgctgcgagatccggaatcaacgagcatttgaacctgtcgccggagatcgcaaatgaaatcaagcaagcggaagcacagataaagcgaagaatgggcattggaagccacatatctgagcgacggctgattgatggactaaacaggatgggaatgaacgaatccattgtgagaagagctcttctgattatgcatcaaagagacgaggtggagtacaagagagagcgccatgtgatcgtccggaaggcttgatgtggagagtccagtcagactcattcatggcatacaacgaacgttcatggcgtcctctcctcagacgcgtccataccttcactgagactgcacatctgtccgtcctgaggggacgagacacgccttagttggtctctgacatgactgactgttgtaatcagcaaacggcttgagcatgtaggctctgtttttgaagtgaccaaaggttctgattgaacctgtagtgtgccgtgtaactggtcaatcaattctgaaatgcaaaatttgtgttcttcgtcaccgggagcaggacatgcaatgtgtggagctgagtagtaacatatactccaatattcatacatacatgctttcaccaagacacgctgtgggcattcacagggaggaagtggtgattgctacaacgacacgccatgaattcaggaagagtttacaggagcaacttacaaggagggaggaggacagttacaaatcttcccggtgaaaatgaaaatacgaacgaatctttacaaatatatatatgtgtgtggtttgtatttgtctgcaaaaaaaagcaaataaaaaaactgagtcgagtttacacggtgtagctctgctgaatggtgtcaatgtcgaggcccttgagcttgacgacggactcgacgtgtcccttgagcgtgtgcagctccctgagcctggccacctcggcgcgcttggccgcctgctcggcgagctccgacagctcgcggtagccctggttgtcgccgaagaggtcggaggtggcggtggcctggttgaggccgtgcagcgtcctctgtgccgtggcccactgcgcctctcgctcgcccttgccgtagtcggtgcggttggtgaaggccgtcttgttgttgatgttgttccaggccttgccggagagcgcgtagcggatggcgaacttgagcacgtccagcgggaagtaggtgacgacgctgaacgcccagatggcgccgccccagccccagccgatgccctgcatcttgcagaactcccagttggcgtacacggcgatgcacgtcgccaccagctgcgccgccaggaaggcgatcaccagcagcgcgccgggccgctccacgaaggaccagctccgggaccgggtcacgaagatgagcgcctggctgatgatgctcacttgcaggtacagcgccgccatcagctccttgtcgttctccttgatggaccgcacgccgaaggcgttggtgaagaagtcggtgtcgtgcgccaggtagaagaagagcgccgtggcgagcgccatgtaggtccctagcacgatgcccgtggcgaagatctccttgagcttccacgagtcgggcgtcggcgacggcttcacgcggtccttggagatggtcatgatggtgccgtcgttgaggatggcaatgatgagcaccatgaagggcgcgaagtcgaacttccagaccagcgcgacgagcaggaagcccagcacgatgcggatggtgatggacacggcgtagatggtgtagttcttcatgcgctggaagatggcgcggctggtgagcacggcgctcacgatcacgctcagcccgggctccgtcagcacgatgtccgacgcgctccgggccgcgtccgtcgcgtcgtccaccgcgatgccgatgtccgccttcttcagcgccggcgcgtcgttcacgccgtccccggtcatgccgcagatgtgcttccggtcctgcagccgcttcacgatctcgtacttgtgctccgggaacacccccgcgaacccgtcggccttctcgatcagctcgtcgatgttcaggccgcccatctcgccggtcttgttgtcgcccagcagggtggtggacgggtacatgttgctgcccatgcccaggcgccgcgccgtctccttgccgatggccagctggtcgccggtgatcatcttcacgttcacgcccaggtggagcgcgcggcggatggtctccgcgctgtcgtgccgcggcgggtcgaacagcgggaggagaccgatgaactgccacggctcgccggcgctctccttgctcttctcggggaccagctggtacgacacgcccagggagcggaggccgcggtcggcgtagccgtcgatgagggcgtggatcttcttctcggcatccttgctcatccggcacagctcgatgatctgctcgggggcgcccttgctgaccctgtgccagtcgccgttgccgtcgatgtaggtgatggccgtgcgcttctcaaccgggttgaaggggaggaagtggacctccttgatgccggcgcgggcctccttggggtcggcgagcatgccgacgatgcaggtgtcgatggcgtcctggttctcgacgcgggaggccctggcggcgtagaggagcaccatgtccttgtcgacgcccttgccgcacacctcgatgagggtcttgtcgacggtgagcttgttgagggtgagggtgccggtcttgtcgctgcagagcacgtccatgccggccatctcctcgatggcggtcatgcgcttggtgatggcgccctgctgggacaggcggtgggagccgatggccatggtgacggagagcacggtgggcatggcgatggggatgccgccgatgagcaggacgaggaggttgtcgatgccatcgcggtacgcgcggtgctgaatcgggtacatgacgatgatctcgatgaccatcccgacggcaatggagatgatgcagaagttgccgatggccgtgagcacgagctggaagtggcccacgttgttggtgctgtccaccaggtgcgccgccttgccgaagaaggtgtgcacgccggtggcgatgacgacggcctcgatctcgccctgcttgactgtggagcccgagaagaccccctggcccgggtgcttgttcacgggcagcgactcgcccgtgagcgccgcctggtcaaccttgagcgggtcgccctccagcagcctggcgtcggcgggaatgatgtcacccagcttgatgctgatgatgtccccgggcacgaggatggacgcctcctcttccttccacttgccgtccctgagcaccttggttttgggcgcgaggcccgccatgagcgcggccgccgcgttgccggcgttgttctcctcgatgaagctgatggtggagttgatgaagaggaggacgacgatgccgacgaagtcctgccagtcgggcggcttgcccccgccgttggcgagcacgatggccatgatggcggcggcctccatgacccaggagagcgggttccacatgaagcccaggaacttgagcagcttgctctccgacttctcctccagcttgttgggcccgaagatcttgagccgattgtctccctcggcgctggagagcccctccttgctgcatttcaggtgctggaacacctcctgcaccgggacggtctcctgcacgcgtggcggacggcgggtggtggtgatagcagcagcaagcagtcagaggaagacatatatacacagcaaagaaggggggaaataaaggagcgctagctgccacgaattaatccaaggcaacccatggcggctcgagatgcgggcgggtaggcgtacgaggtcgacggtctcgttgcggacgtcctcgagggagatggacgccattgtcgtttattagtcgacgccgctgctagctaattgtggtggtcggcgtcgtgcggtggtggcggccggcgcgcgcgcggcggacccgaggaccggggagg

SEQ ID NO: 120039 - DNA, 481 bp, Zea Mays
ttatttttttgcacgccaagtgatctagtggctccttgatgatctattcaagctcgcaaccagaaacatgtttcaagtagagaagagcttgtcaaggatcaggtgaggcgactcactttgtgtatctgaaattatgaatgctttaagcgagttttttattttatttttttagttttagatagtgacaaaatttgagatgaaaaggagcttgaatagcagggctctaataacatgcaaaaaggtgaggcgactcacagagagaatgtctaatgcctccccactatcattttatctaaaaattagcatcaaccgatatataccggaagaatgcatataaactttataccccaataaaaaacccccaatacacataagctcggcattgtattacttaacatatgtcgtataaaagttaagtattgaaaagaagtcagttcattttatgtttgagcgacaaattcactaacatatcgcaggctac

SEQ ID NO: 120040 - DNA, 1107 bp, Zea Mays
atggcgaatgtctcgcacacactcccctgccgctgtgccgcacccgcacccctccagcgcgcgcgggcacgagcacgagtacgaggctccatcgccggacgaccaggtagttgcactgccgccaccgtcgacgacgaccgaaggcgacgatggccaggccgcagcaacggtaccgcggcgtgcggcagcgccactggggctcctgggtctccgagatccgccaccctctcctgaaggcgcggatatggctgggcaccttcgagacggcggaggacgcggcgcgcgcctacgacgaggcggcgcggatcatgtgcgggccccgcgcgcgcaccaacttccccgccgacgccaacggcccgccgccgtcgttcctctccgcggcgctcgtcgacaagctgcaccggttcaacctggcgtccgtgcaggccgcgcagcggcagagagaggcggcggcggcggcggcggcagcagcagcaacctccgcgcccgcgacgcctccgacgccgccggccacgcagtggggcggcggcggtaggtccctggaggagcagcacgtggagcagatgatcgaggaactgctggactccgacttctccatggagatttgctgctagtgctaggctagccgcgacgcgacctgcctagcgactggctagcgcccccggccggcccgtcaccgccgcgctccgctccacctctcctctgttcttgttcttgcacttgcaccatgcgtcgcgctcgcgctcttctttgtactcgtgccgacgtgcgtagtatcgctcagccgctgcagcgtgcgtaggagcctgatttgtgtacgccacgtgtatagctgtagctgtacgtataagtatatatatgtaatcgagcattctcattcttgcaaatttaaaggccgcgtgcgtgcaaaacatgacagcagcggtcagcacccatgaggccgtgacccctgctgaggccatgccatctcgtctctcccatgtttcctgcacaggactcagggatccgagtgtcctgctgcaccagcaccagtgcaccaccgccaagggccaaggctgcttcgcgtgtgtgtgtgggcctggcccacctggcagctaccgcacgtta

SEQ ID NO: 120041 - DNA, 507 bp, Zea Mays
ttgttccactttatgcatttggaaaaaaaattgtattccattgcatttctatagcatcatgtttcccaagtaaatgcctgctcctggattgcgtataaacatactccttcaacaggctgtgagtaaccggctatcctgtggcatgacacccaaaactgtgaggctacccaagaatggtgagatgctcctatctgtgcatggttcacctcttggggtctataaagaagaaaatttagcagccattgaagaatctggtaacggaagtgaagatgctccctgataactcactgatatcacctgtaagaaatccgtgtgatcgatctattgctacaattataattacacagccatcatgagattggccattatttgtattgcaggatggtgccagcctttgacaataacagtaatgcactttgaaattagtgtttaggtcactctgtattttgatgaaccctattgtagcatgccgacttttattcagctgacattattgtgctttgaaca

SEQ ID NO: 120042 - DNA, 4901 bp, Zea Mays
atggggaataagatcgcgcggacgacgcaggcgtcggccacggagtactacctccacgacctgccgtccacctacaacctcgtgctcctcgacgtcgtcagccgcggccgcttcctcaagtccgtccgctgcaagcacgacgaggggctgctcctcgtcaaggtctacttcaagcgcaccggcgagcccatcgacctcaaggagcacgagcggaggctggagcggattaggaaggcgttcaaggggattgatgggtcccatgtatggcccttccaggtttggctgcaaacagataaggcagcatatctcctgagacagtacttcttcaacaacttgcacgatcgactgagtacacgccctttcctcagtcagattgcaaagaaatggcttgcctttcagttaattcatgcagtggagcagagccatagtaagggaatttgccatggtgacataaaatgtgagaatgtgcttgttacttcttggaattggttatatcttgcggactttgcatcattcaagccaacgtatatcccggatgacgacccatctgatttctcattctacttcgacaccggaggaagacgaagatgctatctagcacctgaagtaaagatcacttaccttggattgtacaacaacacactgatttcaactctaggaattattagaatgcccaaatttgtaggctgttgtcagtcactaggtcgggacttcaggagcatatgtagagtgctgccggagcatagcaaggcggcaggagaggagggcggcggcgctggagaagggcgcacacgtgactgtgcgctgcgtattgtgtatcgtattggtacaggtaggagattctacgaacacggtggtgagtcccaagttgcagcagatgcacctctgcaaccatctatggatatattttctcttgggtgcgttcttgctgaacttttccttgaaggtcagccactttttgagctttcccaacttctggcttatcggcgtggtcaatatgaccccatacataccctagaaaagatacaagatactggtatccgtgacatgatacttcacatgacccagttggagcccaaaaaaaggttaccatgtcgaagctatctgcagaaatatgaaattgttgtgttcccattttatttctcaaaatttttgcacaagttcttctcagatattgttccacttgactccgatgccaggttctctttgaaggttgaaaagactcaagaaaattttgaaaagatacatgaaataatgatgggcagctcaacaattgaacaaattgagaggtccacatcgtgtgagcatagtgaaccatctgggagaaaaggcatgggaggagaaactttatattcaccaggagattatagaaacagcacatccataggtaagaaaaatacttctgtagaccatcaacatattgtcggaggtatcaatttcctcctcaaagaagtggagagcaggagcaacaacacaagcacaaaagtcacaaaagacactgagcattttgttgcaccgagcatttcatgtgcaagtggtgttcagtccttgcagctagttaatccagcaggaagacaaattggaagtggtttgatgagccagaacaatgctgtatctcatgtgaagaagatctcaaagactaacttatgctccttagtggctgcttatgatgatcaatcagatacctatagttttgacatttttcagcagatagacaccaaggtgagctgtgaaggaatggttttgcttgtctcgttactctgctcatgcatacgcagtgtgaaaaaacctgagctaagaagggccagcctaattcttctgaagttctcctccacatacatagatgatgataggcgcttacagctagtgctcccctatgtgattgcgatgctttcagatccatctgccattgtccgttgtgctgctttggaaaccttatgtgatgttctttgtcttgtgcaagatttccctatcagtgatactgttatattccctgagtatgtcctcccaatgctctctttgctccctgatgatacggaagagagtgttagggtttgttatgctagtaacattcacaagctggctttaacagcttacaggttcctacttcgttctcgtagcatcgcgaatattcgacctctggatgaatcactggtagctcacagatcccagtctgcagattcaccagcgaagaggcaagatattttttttcgccaacttgcagaactgaggaaatctatttatgagatagtgcaagatttagtgatgggacaaaagcagacacctaatacccgtagagctcttctgcaggatataggttatttgtgttacttctttgggcacaaacaaagtaacgattttcttctgcctatactcccagcatttctaaatgatcatgatgagcagctccgtgcagttttctttgcccagattgtctatgtttgctattttattggagcaaggagtgttgaggaatatcttctgccatatcttgaacaggcgctaagtgatggtatggaggctatccttgtaaatgcacttgattgcttgaccatgatgtgcaaaagtggttatttgaggaaaagagtaattgttggtctattggtaaaggttctccccctgctccggtatacaatcaattgggttaaacagtctgctgtaagatttgttgctgcctgcagcgagagcttaggatctgtagatacttatgtgtatctttctcctcagctacggcagttcctacacagggagccaccttcattggactctgaaactgctcttctttcatgtcttaagcctccactaccaaaatcaatgttctacgtacctttagaagatgctcaggacattggaaacattttactgaagagcagtggcaagaaagaacagatattacatggtggaagatactctggcatggcacaaagtggatctttgggcaaccttgaagatattcgtcgactgaaaggcactaatatttccagcagcgtgtccttggatgtcaaagactccttttcttttggcaaatcactatattctggttttgctctacatgcatctgctgcaaatagctccttttatgatggcttatctaaaggaataccatcatattctttttgtattgataaccggggtttaggagaaacacacatggtccctgattcatcagtgtataaagcttcgataaggctaccttggttggaaccgaatcgtcctggcatgcagactagagatgatcatttcagtagcaagcggcgagatttaagcatcaatgactctttgaagagcaattcttctttgcaaggggatagcatttcaaactctgatactggaggattgccgttctccagatcagcagtgaacctggagactggatggaagcctcgaggaattctagtggcacatctccaggaacatcgcttttctgtcaatgacattgccgtgtcgaatgacaataccttttttgtgactgcttctgacgactcgagtgtcaaaatctgggatacaagaaagttggaaaaagacattgctttcagatctaggttaacatatagcgtgggtaatagccgagctttatgtacggcaatggttcatggtacttcacaggttattgtcggtggtagcaatggaacattacacttgttttctgtggattgtgcacgaagcgttgggagtgtcgtggaaaggtatgctggaattgttggtgtaaaaaggaatgatatcaaagaaggcgcaattctcagcgttgtaaattgttcacccgacagctttagcccaactgttcttttcagcactgaacattgtggtatccataaatgggatacaagaaccaactcagaattttggtattttaaatcctctccagaggagggctatatatcagcacttgttgtgggccagtgtgggaattggttcatctcaggttcttcaagaggtgtccttacattgtgggataataggtttttactacctgttaactcgtggaactattcaatagtaagcccaatagagaaattgtgcttgcttatacctccaccaagttcaatatcttctgctggaaggccactagttttcgttgctgccggatgcaatgaagtctctctgtggaatgctgagaatggaagctgccaccagatgtttagaacagcgagcactgataatgaagctgtgatgtcaaaggcaccatcaaggcctgttaacaagccaatcattaaagatataataagagcacgtaattataagtacagaatcgatgagttgaatgacccacctgtgcgtcgtccaggcattcgttctttgctacccttaccaggtggtgatctgttaactggaggaacagatttgaagattcgttactgggatcaagccaggcctgagcaaagcttctgtattgctggtccctcggcgaaaaaagtccgttcagctaaagctgacattttagagaaagcagctggaaacgatgagtgttacgatataagatccagttttggagtacaagtcgtgcaggaaatgtacaaacagaataccacggtatccggtttgacgcccaagactcagttcgcggaggcagctgcagattctgccgggtgccatcgtgacgcaatactcgcgctggcatccttcaacttgtctagccagagattgatatcagccagcagagacggtgctgtcaaagtgtggaaatagctgctccagcatgggtaagatgacaagtcctttggcgtgtacatatttgcctggttagtgcttacacagtacacatatgccactagttattgttgtacagaagattgatccacacaagagtcgaaattgacacgtaagctttcatcctgtgtgacctgacctgtgtatataaataccaatggcttacctaccttacagtagtatattcatggatt

SEQ ID NO: 120043 - DNA, 254 bp, Zea Mays
tctatgttatatagatttttgaattaaatatttatcctattaacagttagtttagtatatactggttgcatcagaaaagtaaagaaataaaaaattgaaatagttggacatacattaggatggtgcaaatttctagtgctagaagcgtactgtatttgcctcgcagagagcacacgcaaaagagagatgatacatttggttttataataaaaataaaaaatgttagctaagagaaaaggctaacaaggaaaaaa

SEQ ID NO: 120044 - DNA, 1510 bp, Zea Mays
atactcaaaaggacggggaagacgaggccgcaactccgcgggagcaacagccagccaaccacctctcgttggaacctgcgactgcgagttccacctccgcccgcccgctcgcccacgctcacgcccggaataggcagttgcagcagccagccagccccgcgcgccccgccatcgtgggaggaggcccatgccgcgggggcagcagggggaagggtagaatgggcaacgtcacgtcgtcggtggcggcgcggctggccttcttcccgccggagccggccacgtacggcgtcgagcccgcggccgagaacggcgccctgctgcggatgacgggggtgttgccggacgcgggcgtcgaggtgcgcgcgctgcccaccagggccggcacgcgcgtcgtctccgccttctggcgccaccccgcggcgcggctcacgctgctctactcccacggcaacgccgccgacctcggccagatgctcggcctcttcctcgagctccgcgcgcacctccgcgtcaacatcatgagctatgattattcaggctacggtgcttctacaggaaaaccatcagagtacaacacctacaatgacatagaggctgtttatgattgcttgagaacggagtatgggatagaagaagaggatctaatcctgtatgggcaatccgttggaagtggaccaacgttgcatctagcctcacgtctcgagaagttaagaggggttgtcctccacagcggcatactctctggcatacgggttctgtatccagtgaaagtgacgctttggttcgacatcttcaagaacatcgacaaaataaagcaggtggactgccctgtgttagtcatacatggcacagccgacgacatcgtggacttggctcacggcaagcggctgtgggagctagccaaggacaagtatgagccgctgtggatcaaaggcggtgggcactgcaacctggagacgtacccggagtacatcaggcacatgcgcaagttcataagcgccatggagaagctggccaaggacagcagcaaggcggcccaggcgccgccgccgtcgagcatggccgccgaagaaagacacaccaagtgcttgagattcgggaagagatgagatgccggcgacctggacctgggaaggaaacgcggtgcagcagcaaccctagttcgtgtatcatccgtgtgagattgagttcagacttcagagtagagagtagacagagtggagtgacagacagacctgtggctgctgtagtatgctgtacgtgctggagttcaggactagagagatgtctttgttttcctaggggcgccacggattagcctgttcgcagctgaattttttcttgttttttttttctgttttcgctatctgtattgtagtcactgtgcaaaaaaaatcgttttgattgattggctgcaaaaagtgaagtgcgctattgcgctgtgactagggccacgaaatgtccgttgctcgcttggttcttggatagctcaattcggataagttctttt

SEQ ID NO: 120045 - DNA, 1588 bp, Zea Mays
ggaagacgaggccgcaactccgcgggagcaacagccagccaaccacctctcgttggaacctgcgactgcgagttccacctccgcccgcccgctcgcccacgctcacgcccggaataggcagttgcagcagccagccagccccgcgcgccccgccatcgtgggaggaggcccatgccgcgggggcagcagggggaagggtagaatgggcaacgtcacgtcgtcggtggcggcgcggctggccttcttcccgccggagccggccacgtacggcgtcgagcccgcggccgagaacggcgccctgctgcggatgacgggggtgttgccggacgcgggcgtcgaggtgcgcgcgctgcccaccagggccggcacgcgcgtcgtctccgccttctggcgccaccccgcggcgcggctcacgctgctctactcccacggcaacgccgccgacctcggccagatgctcggcctcttcctcgagctccgcgcgcacctccgcgtcaacatcatgagctatgattattcaggctacggtgcttctacaggaaaaccatcagagtacaacacctacaatgacatagaggctgtttatgattgcttgagaacggagtatgggatagaagaagaggatctaatcctgtatgggcaatccgttggaagtggaccaacgttgcatctagcctcacgtctcgagaagttaagaggggttgtcctccacagcggcatactctctggcatacgggttctgtatccagtgaaagtgacgctttggttcgacatcttcaagaacatcgacaaaataaagcaggtggactgccctgtgttagtcatacatggcacagccgacgacatcgtggacttggctcacggcaagcggctgtgggagctagccaaggacaagtatgagccgctgtggatcaaaggcggtgggcactgcaacctggagacgtacccggagtacatcaggcacatgcgcaagttcataagcgccatggagaagctggccaaggacagcagcaaggcggcccaggcgccgccgccgtcgagcatggccgccgaagaaagacacaccaagtgcttgagattcgggaagagatgaggtaccgtatcggccttctttagctgtgtacgcccagtcaagtcacgaaaacgctgatgcactgcgttgccttgctgccgctgctttcgtgtgcaagtccaagaagcgatagcacaggtcgtcagtgagccggccaggcggatggatggatggaggtttcctgttgagtttcatggactctctctttctctctctgcagatgccggcgacctggacctgggaaggaaacgcggtgcagcagcaaccctagttcgtgtatcatccgtgtgagattgagttcagacttcagagtagagagtagacagagtggagtgacagacagacctgtggctgctgtagtatgctgtacgtgctggagttcaggactagagagatgtctttgttttcctaggggcgccacggattagcctgttcgcagctgaattttttcttgttttttttttctgttttcgctatctgtattgtagtcactgtgcaaaaaaaatcgttttgatt

SEQ ID NO: 120046 - DNA, 128 bp, Zea Mays
ttccacctagaacacactgtattttttttctttctaagaagaagaataaactataaattgggactacgctatgaaataaaaaatatttcgtgaatagtttagccaaagcaatgggaaattagctttag

SEQ ID NO: 120047 - DNA, 2152 bp, Zea Mays
cgaatcaacgacaaaccaggcccacgtgcgatggccgctgccgcgcgctcgcgcctcgccggcctccgcctcgacctcgcctcccgcacggcaccaaaccctaagcccctcctctcctccgccttctcctcctcgaccatctccgcgcctcccgcggccggccgggtccgcgaggacgagagtggcctcctctcgcggcgcctgctccggctccgcttccgctcgccggccgggaccgccgcggctgccgtcgagagatgggcccaggaccgcgtccacgtctcgcagccggagcttcggcgcgcaatcgggatgctccggcgcgaacgtcgctacgagcaggccctcgagattttctcttggatggaatcatgcagctcccttcgactgtcgtcatgggatcatgcagcaagactggacttgattgctaaagcttacagtacttctcaagccgaggaatactacaacaaactacagagccctgctaccagacaagcagcatcgttccctctcctccattgctatgttatggaaagagatgtacagaaggctgaaaccttcatggctcagttgcagagtcatgggttgcccgttgatcctcactctttcaatgaaatcatgaagctctatgttgcaacctgtcagtatgagaaggtccttagtgtaattgacctcatgaaacggaacaacattcacagaaatgttctctcctacaacctttggatgaatgcttgtgctgaagtctctggtgttgactcggtacaatcagtgttccaggtgatgttgaatgatgagacggtcaaggttggttggagcacatactgcacattagccaacattttcaggaagaatggactgaacaatgaagcgcaagcgtgccttgtgaaagctgaagcaaaattgtcacctgcagggcgcttaggatactcttttgtaatgacatgttatgcggctctgaatgacagcgatggagttatgagaatgtgggaggctagcaaaagtgtgccaggtagaattcccactgcatactacatggctgctatgtcatgttcaataaaagttggcgacatcagccaggccgagtgtatctttggaaagtgggaagcagggtgcaggaagcatgatgtgagggtttcaaatgttcttcttggtgcttatgtgaggaataggtggattgaaaaggctgagaggctccacctccacatgctagagaaaggagcgtgtccaaattacaagacatgggagatattgatggagggctatgttcaaagcaggcaaatggacaaagctgtgggttgcatgaagaaaggtttgtctctgttgaagagttgccattggagacctccagttgaactgatggaggccattggcaaacatttcgaggagcaaggaagtgctgacgatgcatatcgatatattaaggttctccagagatttaacttgacaagcttgcccctgtacaagtcattgattcgagcatatatcaatgctgacgttgtgccaccaaatgtccttgagatgattgcaaaagatcagattgatatggatgaagaaatggaccggttgatcataatcgctggcaagatagacatcacatgcaatggatagtcttcaactggaacaggtaatcaccagtcaaatgataaatatactcatttgactttgtcaattagagatgcaaagtgaagcaacaagttgaacctgcaaattactagatgcaaaaaaggcactcctggataccttgtttggtgttcatgcagtcctgctaatatgaacaactccatcttcttgtgaatcttaagtatatttggaaaatgtggaaaacacgaaaacctgaaccagcacaagaatgcttacaacttctcaaggatcacctgaacctttggactatcagaacttcatcgaacctgaatcaacattccccggtcatcacctgtaattagtggcgtaaccattcttatgatgcaagcacatagcttgcttatttgttccttaaatcatcactattcacgaaaagctggtttgcagccactaacatctcttatgaattgttcttggagaattaatcactgatcagccccaaaatacttgcttcggcagtggttttgaacacagtgaactgccaattttggtttcattctcagaatttcag

SEQ ID NO: 120048 - DNA, 1290 bp, Zea Mays
atggccgtcatcgcctacaggcgtgcggtgctcctgcacgggcaccagaggagccgcacggctcgcgccctcgacccctccgtcgtcgctgtcgcatcacatggtagggggaggaggaggacatggccgtcatcgcctacaggcgtgcggtgctcctgcacgggcaccattagtggtcgcaatggtggtagacctcaccctgcccccactccatctcgtagtggagcagttccatcgtcggagaaggcaaagatccagccaccaagttctaccaccactgcgtccaggtttaagcacagtactgcttcgtggtggaacgacgcctctgtccggctgtatgcagtactgcttcgggaaactcggtatcgtcagagatatcttgatctaatggtaaaccatgaagtgaggcatatcttcaagacacgatctaaagttgtctcgtttatccggaagtttcttgatgaccgtgaatttttggaggtggagactccgatgatgaacatgattgctggtggagcagctgcaaggccttttattacacatcacaatgaattaaatatgaggctttttatgcgcattgctcctgaattatatctgaaggaattggttgttggtggattggaccgtgtttatgaaattggaaaacaattcaggaatgaaggaattgatttaacacacaatcctgaattcacaacttgtgagttttatatggcttatgccgattataatgatttgatggagcttactgaaaccatgttgtcagggatggttaaggagctgacaggtggctataagataaaatatcatgcaaatggagttacgaactcaccaatagaaattgatttcacacctcccttcagaaggatcgatatgattaaagatttggaggctatggccaatctcaatataccaaaagatctagcaagtgatgaagcgaaacgttacttgatagaagcatgtgctaagtatgatgtgaaatgtccacctccccaaacgacatcactgcgtccaggatcactgttgcccattgaagaaccactactagaattagaaaggccaccaattttttcagcaccattattttccagcttcattgtacctgcacaacaaaataagagatttttcttgcaaccagctgtcagggaactttccttcttgaactactcagaacattttgcaactgaagctaggactgtgatggcattcaccatagcatcttccattgttggccagacagttgggtcaagggctgagtgttgttctaaggaatcaagtaacaaagggtactga

SEQ ID NO: 120049 - DNA, 2717 bp, Zea Mays
gacagagacagagatgtttgacgtgtggagtgtcgtgggatggtgggacaggtggcagctgcgcgtcctcgtcctcggcagcctcggcatccagtggtttctgctggtggctgcccccatgcgcaagtacaccatccgccccggcctcaggctatgcatctggcttgcctacatcagcagcgacgctctggccatctacgcgctcgccaccctcttcaaccgccacgccagggcgaccagcagcagcagttgtgacggcggtgccaacagcaaggcgaggatcctggaggtcctctgggctcctgtcctgctcatccatctcggcgggcaggaggagctgaccgcctacaccatcgaagacaacgagctgtggacacggcacaccgtgaccctcgtgtcccaggtcgcggttgccctctacgccttctacaagtcctggcccaaccccagcgactggaagctgctggcgtccgcgatcctgctcttcatcatcggggtcgtcagcttcagcgagaagccatgggcgctcaagaaagccagcatcaacaggctggcgtctgtgtcggccacgatacaggggaccaagaagcgcacgaggctggcggtgtacttggacgatcttctcttctccgattggtacagctgctccagagccaccgagaagagtagcagcagcggtagtagcctccccgcagccgcagccgcggcaggtgtgggttggcacgactgcttctccttcaccgagccgagcaataaggggcacggcgatcatgtgggcttgtcggaggcagataaagtctacatggtgctctcggacatgtcgctgtccgcggccgccgacgaccttgtgctgcgaggcagggctcgaaatgtggaggatgttcttcggcccctgagcaccaaggcggagcaggcactcaagcgctggctgcgtggcgcgtttgggctcatatacaccagagccaacctggtcttcactcgcacgtacctggtgtaccatgtgctggtggtgccgatcctgcacgtcgccgccctcacgctgttcgcgacgagcgacaagcacgggtacgaccgcaccgacgtgaagatcacgtacgtcctcctgtgcctcaccgccgcgctggacgtccttgcggtgttcgtccgccagctgctgtacggggccatgtccgccaaaggtgtcccggcgctgtgcgagacggtgccaggctacaacctcgtggacgcggtcacccggcggaggcagaaggacattgggtggctgttcaggtgcgccgccgccatgggctgcaaggaggagtacttggagtactgcaagtgcggcggggggcagcagcactacacactgtacaagaatgtgtcgaagatggtccttgcggatctggtggacgcacagggccgcgacctcgccaactacagagtcttcacggtgccctacgcatcacctgcaagcactgctgccgggccggccgtggagcagcagcgcgcatcgccagcaggcgcggccaactgggctctcagcgaggagcagcagaagctgtgcggccgcaaggtccgggacaccctgcgtgggtccttcgacaggagcgtcctcgtctggcacatcgccaccgacctctgcttccgcatggaacaagttcctcctgacgccgacaaggaagaagactcgcactggctccgcatcaagtgcacggaagcgatatcctgctacatggctcgcctgctcgactcccaccccgacatgctgctcaccggcagcaggcggcacctggtcagcgaagccttggatgaactcgagtccatctttgaccgcaccatggtagatcgcagcggcaagccaccgggcaaagacgacctgcacaagatcatcgacgacgtggcgcgggtacgtttccaggtgcccgtcggcgtcgctcatggagctgcagacgacgacggggaggaggcggtacagtctttcttccacatccccgaggcatgcgggcttgcaatggagctgctgcagcttgaagcgtccacgcgctggagggtgatgtatcgggtgtggctgggcatgctcttctactccgccagcatgtgcaggggctacctgcacgctaagagcttgggtgaaggtggcgagttcctttcctacgtctggctcgtcctctcgctcaagggggccaagaccctggccgacaagcttcagatgttggaggtggaaggggacgacaggcagggacgaaggcaaggacgaaagtgggttgagatgcggaatgaggagcttcagattcggggagacgacagggagccagcaccccgatcgatgcccaccactagcagcttgtttcaaacctgatcaaatcctccaatccaatcgccgatgccatgattttactatatatcaattctcctgtttgtttgttcgtttaatttctagccagcgttctccgacccaactactggccggtttgtttgtcgccttgcctttgtttaataagctcagcccctcactttgaatcaatgtgtttcgactagagatgaccaaacggaccggcccggcttggatctggtgaagcccagctcattttgggcccggcccgccagatacggttagaaaatcgggccggtccgactaagcacgcgggctcaattttctgtccgagcccgacccgcagcgggcctaaacgggccggaccggcctgtttagcacgaaaaaacaggctatgcgggccgaa

SEQ ID NO: 120050 - DNA, 1023 bp, Zea Mays
acatattcgttccttgccgcatgcatgcagatcgatggacggccttagctcccactatactactccatatataatgccctgctccttcctcacgagctagctcaccggccgctcagcatggacagctactatttgtactggcaggggaagtggtattggtggtcggggtactggaacgatcctaacgatagcagacgttacccagcagttaatatagttatattaactaatgcctccttcaactatgcgttgggcatgggagcattagccgaaccacctcaggacagctctgccgacggtgtgatcttgatcaaggatatggcggagtggcaaaagcactgggaccagactgctccatacaacaagctgctggtgtatgagttctacgaaaagaattcctcgctgtgcaaggccatggacaagccgttcgagaagctcgccacgcagtacaaaggcagggccgacttctgcaagctggacgtggacaactttgagcttttggcgcggatttgcggagtggagggagcgtatccgacgttcgtgctgttcaagaaatgcgcgcaggtgggcaaggtcgttggcctcaaggaggacgacctcgagcggatcgtccagcgagcgataataagctagggcgtgttcggctggctacaagccgacactgttgcagctgtttggattgctgcagctgcaatccatagagagaaaaatactgtagaagccgcagccgcagccggattgcagccgcagcaagccgcagcgaacaagctgctagctaggagtagtcgtcaactcgtcatgtagtaccacacagactcagttttcgtacgtgtgccaagacaaaactacaaaaggacatgactatgcgtacgcatcgatcggcacagtggcggatctacaccctctgtggctggggcttgatccatgtatctttatataagtctctatttaatacgatataaaatagttaagataaaatgaagatgagaaaatttggtagatttagtccggatcataaaaaaa

SEQ ID NO: 120051 - DNA, 1203 bp, Zea Mays
acatattcgttccttgccgcatgcatgcagatcgatggacggccttagctcccactatactactccatatataatgccctgctccttcctcacgagctagctcaccggccgctcagcatggacagctactatttgtactggcaggggaagtggtattggtggtcggggtactggaacgatcctaacgatagtacgcatgcggcggtgctccctgttctatctatctatctatctatctatctatctatctatctatctatctatctatctatcttgtgtttctcttcatgctattgtatccaataaaagagttttcctgtaattttaaccagctagccgccggtgtcttccttgatctatgtgcatgtaggcagacgttacccagcagttaatatagttatattaactaatgcctccttcaactatgcgttgggcatgggagcattagccgaaccacctcaggacagctctgccgacggtgtgatcttgatcaaggatatggcggagtggcaaaagcactgggaccagactgctccatacaacaagctgctggtgtatgagttctacgaaaagaattcctcgctgtgcaaggccatggacaagccgttcgagaagctcgccacgcagtacaaaggcagggccgacttctgcaagctggacgtggacaactttgagcttttggcgcggatttgcggagtggagggagcgtatccgacgttcgtgctgttcaagaaatgcgcgcaggtgggcaaggtcgttggcctcaaggaggacgacctcgagcggatcgtccagcgagcgataataagctagggcgtgttcggctggctacaagccgacactgttgcagctgtttggattgctgcagctgcaatccatagagagaaaaatactgtagaagccgcagccgcagccggattgcagccgcagcaagccgcagcgaacaagctgctagctaggagtagtcgtcaactcgtcatgtagtaccacacagactcagttttcgtacgtgtgccaagacaaaactacaaaaggacatgactatgcgtacgcatcgatcggcacagtggcggatctacaccctctgtggctggggcttgatccatgtatctttatataagtctctatttaatacgatataaaatagttaagataaaatgaagatgagaaaatttggtagatttagtccggatcataaaaaaa

SEQ ID NO: 120052 - DNA, 1872 bp, Zea Mays
acatattcgttccttgccgcatgcatgcagatcgatggacggccttagctcccactatactactccatatataatgccctgctccttcctcacgagctagctcaccggccgctcagcatggacagctactatttgtactggcaggggaagtggtattggtggtcggggtactggaacgatcctaacgatagcagacgttacccagcagttaatatagttatattaactaatgcctccttcaactatgcgttgggcatgggagcattagccgaaccacctcaggacagctctgccgacggtgtgatcttgatcaaggatatggcggagtggcaaaagcactgggaccagactgctccatacaacaagctgctggtgtatgagttctacgaaaagaattcctcgctgtgcaaggccatggacaagccgttcgagaagctcgccacgcagtacaaaggcagggccgacttctgcaagctggacgtggacaactttgagcttttggcgcggatttgcggagtggagggagcgtatccgacgttcgtgctgttcaagaaatgcgcgcaggtgggcaaggtcgttggcctcaaggaggacgacctcgagcggatcgtccagcgagcgataataagctagggcgtgttcggctggctacaagccgacactgttgcagctgtttggattgctgcagctgcaatccatagagagaaaaatactgtagaagccgcagccgcagccggattgcagccgcagcaagccgcagcgaacaagctgctagctaggagtagtcgtcaactcgtcatgtagtaccacacagactcagttttcgtacgtgtgccaagacaaaactacaaaaggacatgactatgcgtacgcatcgatcggcacagtggcggatctacaccctctgtggctggggcttgatccatgtatctttatataagtctctatttaatacgatataaaatagttaagataaaatgaagatgagaaaatttggtagatttagtccggatcataaaaaaattctggatccatccctggatcggcatgctaccaaaaatatgtacgataaagcgtacgtggtacatatatatggtcggtctatcgtcgacctagctaggattttagtagagacataactattaaaagaaattcgtgaataaatttagtacttccaccaactagtcaaagttgttaattagtctttgcacgcgtactgccacactatttgtttcctgacacgtctcatgtatcaagtcttaactagatatactcctctgtaaattatggggatatctgcctgtcatgaatttatcagatattctataccttttctttctatctattctatatctatataatttcccccttagcgtcataacttcacgtgtcatcaatatatgtttcgttcataccttagattatatgctccttatggtgctcctcctacgttccctcccacctatggtgctcctcccacatgtggtacccctgctccttctcgtgctcccttaaaaacagtagtgctaccaagtagccagaatgatgcagactccaactagtccacgttctctggtgcatcatagtttcaatggcgacgggcctggactaagatggaggatcaaaggcttgtaaatacgcgtacacttttatgaattccatactttttgaaagtacaaaatattttttgagtttgtacaactgtaggtgcacgcgttgttaatgcattacattgacccgttgacggcaacaacaaaaaggattgatcttttggggttaaatagcggctatgtacaactctactatagagcctccttgttaccgtactgtcaagtagatcaaggatcgatggtcaggccaagcagatcatat

SEQ ID NO: 120053 - DNA, 926 bp, Zea Mays
caaacggctcgtcgccgtcgcagtcgcagccatttttctgtcggtctgtcccccgcgcgtgccgcttctcacctgtgcacctcgccgactcctcggatttgtcatattcgcctgaggtgggctcagtcgctgagagtggccacggtgaggaaggacgaggaagagggggccgcggaccgcgtgccgcacctgccgtggatgcggtaccccgtcgatatcgacaccttctctggctgccccgtcacacagctcccccgcctcgacccgaggttagagaggtttttgatgatattgctcctatggtgggcttgtcagtaggttcagcagttggtcaatcatcaatagcagatgaagtttctagtcttgtcccgaagcccaaacaagagttttacccaactattgacgaagaatatgtccaaatggaaccacagactaaaattgatatattggtggcaacccctgaaagactaatggatcacattaacatgacaaatggtttcagtctggagcatcttcagtacctggtcattgatgaaacagatcgaatggtaagagaggcttatcaatcctggttgccaacagtgatccaacttacacactcaattagccaaggggtgtggagcgtgtatttaaaggtaaatgctatccaagattggggaagatggttttatctgctacactgactcaagatcctagcaagctatcacaacttgaattgcaccatcccttgttgttgaatagtgggaagaagcgctattgaattcctacaaaacttgagtcctacaaactggtttggctcttatgtctttgtagctcatttaccttaggtgtaaaattactattggaaagtggaaactctgttgtgcatactcactcagatttggtctatgctgttattgcagatatataaattaaacttaaaacca

SEQ ID NO: 120054 - DNA, 1076 bp, Zea Mays
caaacggctcgtcgccgtcgcagtcgcagccatttttctgtcggtctgtcccccgcgcgtgccgcttctcacctgtgcacctcgccgactcctcggatttgtcatattcgcctgaggtgggctcagtcgctgagagtggccacggtgaggaaggacgaggaagagggggccgcggaccgcgtgccgcacctgccgtggatgcggtaccccgtcgatatcgacaccttctctggctgccccgtcacacagctcccccgcctcgacccgagtaggttcagcagttggtcaatcatcaatagcagatgaagtttctagtcttgtcccgaagcccaaacaagagttttacccaactattgacgaagaatatgtccaaatggaaccacagactaaaattgatatattggtggcaacccctgaaagactaatggatcacattaacatgacaaatggtttcagtctggagcatcttcagtacctggtcattgatgaaacagatcgaatggtaagagaggcttatcaatcctggttgccaacagtgatccaacttacacactcaattagccaaggggtgtggagcgtgtatttaaaggtaaatgctatccaagattggggaagatggttttatctgctacactgactcaagatcctagcaagctatcacaacttgaattgcaccatcccttgttgttgaatagtgggaagaagcgctattgaattcctacaaaacttgagtcctacaaactgatatataaattaaacttaaaaccactctctctccttgttcttctccaagaactgcaagggaataagtgcttagttttacgtcatctgtggaatcaagtcaccgactaagcacattagcagagatgttctcgccatctctctttagtgttgcgggtgtttagtctgatgttgccgctgtttttctcgctgtgcgtgcagcacatccgcgtcgcggcatttcatctctttctctgcacatgtgggtactgctattactgttggtcaacaacgaacttgactagaagggtgaacatgttgttgttgtatattattttacttgaatctgtttacgc

SEQ ID NO: 120055 - DNA, 1187 bp, Zea Mays
caaacggctcgtcgccgtcgcagtcgcagccatttttctgtcggtctgtcccccgcgcgtgccgcttctcacctgtgcacctcgccgactcctcggatttgtcatattcgcctgaggtgggctcagtcgctgagagtggccacggtgaggaaggacgaggaagagggggccgcggaccgcgtgccgcacctgccgtggatgcggtaccccgtcgatatcgacaccttctctggctgccccgtcacacagctcccccgcctcgacccgaggttagagaggtttttgatgatattgctcctatggtgggcttgtcagtaggttcagcagttggtcaatcatcaatagcagatgaagtttctagtcttgtcccgaagcccaaacaagagttttacccaactattgacgaagaatatgtccaaatggaaccacagactaaaattgatatattggtggcaacccctgaaagactaatggatcacattaacatgacaaatggtttcagtctggagcatcttcagtacctggtcattgatgaaacagatcgaatggtaagagaggcttatcaatcctggttgccaacagtgatccaacttacacactcaattagccaaggtcattcctggcatgacattgatagccaaactctacttcatccattgacttctattagaagatcgggtgtggagcgtgtatttaaaggtaaatgctatccaagattggggaagatggttttatctgctacactgactcaagatcctagcaagctatcacaacttgaattgcaccatcccttgttgttgaatagtgggaagaagcgctattgaattcctacaaaacttgagtcctacaaactgatatataaattaaacttaaaaccactctctctccttgttcttctccaagaactgcaagggaataagtgcttagttttacgtcatctgtggaatcaagtcaccgactaagcacattagcagagatgttctcgccatctctctttagtgttgcgggtgtttagtctgatgttgccgctgtttttctcgctgtgcgtgcagcacatccgcgtcgcggcatttcatctctttctctgcacatgtgggtactgctattactgttggtcaacaacgaacttgactagaagggtgaacatgttgttgttgtatattattttacttgaatctgtttacgcc

SEQ ID NO: 120056 - DNA, 755 bp, Zea Mays
ttttttttggcatttattagactgctttaaccttatcatgacttacttttccaacttactagcttgtcatatttcacttgttatggattcaggtcattgatgaaacagatcgaatggtaagagaggcttatcaatcctggttgccaacagtgatccaacttacacactcaattagccaaggtcattcctggcatgacattgatagccaaactctacttcatccattgacttctattagaagatcgggtgtggagcgtgtatttaaaggtaaatgctatccaagattggggaagatggttttatctgctacactgactcaagatcctagcaagctatcacaacttgaattgcaccatcccttgttgttgaatagtgggaagaagcgctattgaattcctacaaaacttgagtcctacaaactgatatataaattaaacttaaaaccactctctctccttgttcttctccaagaactgcaagggaataagtgcttagttttacgtcatctgtggaatcaagtcaccgactaagcacattagcagagatgttctcgccatctctctttagtgttgcgggtgtttagtctgatgttgccgctgtttttctcgctgtgcgtgcagcacatccgcgtcgcggcatttcatctctttctctgcacatgtgggtactgctattactgttggtcaacaacgaacttgactagaagggtgaacatgttgttgttgtatattattttacttgaatctgtttacgcc

SEQ ID NO: 120057 - DNA, 740 bp, Zea Mays
agccctgctaggccacttggcaattccaaccctacaagatctccctccctcccttctgaacacacgacctctcaagacaagatcactgcttaccgccggcaccggcatacttgatggtcctagaaccatcgtcgccaccggcaccaccactgtcgtcgtgcaagggacctctagcgccttccactgagcccacggaggggcggggcaggagggacggcggcggcgacgacgacgtggaggaggagatggccgaggccaaggagatcggcatcaggcacagccccttgccctgcaggtactgcatggcagtgcccatgtcctcctccatcagcctggccacctgttgctccgtcacccgcaggctgctgccgccaccaccgttatcaccgttggtggcaccatcgccgccgtcgtcgcttgtgccgtttccggctctgtcgtcgccctgcaacaaggctctgagtctgattccattggcttacacacaacaacaagagaacaagaactgatcgccactcatcaagataataacgatcactcgtgggaattttgaccctgaatgcttgatcagtataccatgtaaccacttctacttttcaggcgtgttttttttcttcttcctttttggctcgagtccttggcaacaaagattcctacacactttcttttcagctgtgttggccactaatgctcgataagtcccctaagcaaagttatatatgggccatctccttttcgat

SEQ ID NO: 120058 - DNA, 612 bp, Zea Mays
aagaagggatgggggaggatagaagaggccgccgcgccgcaaacagagagagaagagaagccgcggttcaacgaacgtcggcggccattcacagccggccggcacctgcccccctgccccacggttcaacgaaagtcggcaggttcttccctccagataatagtagcacctttgagcactgctgctgaaaatgagctgcgccgaattgccacctgaaaccccagctgtgaacggagaagggtcatctgccgccaccgccgccgctcctggtgccgggtcgaagccgaaaaagaagatatgctgcgcgtgccctgatacaaagaggctgagggatgagtgcgtcgtcgagcacggtgagcctgcttgcaccaagtggatcgaagctcacaagcgatgcctccgtgctgaggggttcaatgtctgaaacttgtagtctgtcgggctcgctttcctagaaccgtaggaaatggaaacattagaaaaatagagttatacaactagtcataataataccttaatgccaggagttatacggtaaggggaaatcacgatgtgaaaattatgttggcgatgaaacgtatttgagaatgagattgttgaattttattcgct

SEQ ID NO: 120059 - DNA, 623 bp, Zea Mays
aagaagggatgggggaggatagaagaggccgccgcgccgcaaacagagagagaagagaagccgcggttcaacgaacgtcggcggccattcacagccggccggcacctgcccccctgccccacggttcaacgaaagtcggcaggttcttccctccaggcaagataatagtagcacctttgagcactgctgctgaaaatgagctgcgccgaattgccacctgaaaccccagctgtgaacggagaagggtcatctgccgccaccgccgccgctcctggtgccgggtcgaagccgaaaaagaagatatgctgcgcgtgccctgatacaaagaggctgagggatgagtgcgtcgtcgagcacggtgagcctgcttgcaccaagtggatcgaagctcacaagcgatgcctccgtgctgaggggttcaatgtctgaaacttgtagtctgtcgggctcgctttcctagaaccgtaggaaatggaaacattagaaaaatagagttatacaactagtcataataataccttaatgccaggagttatacggtaaggggaaatcacgatgtgaaaattatgttggcgatgaaacgtatttgagaatgagattgttgaattttattcgctaaatca

SEQ ID NO: 120060 - DNA, 1449 bp, Zea Mays
atggcgcctacacttgtttatcccgtgactgccatggagaagtttgatgtcacgccatcgccggcaccggcggcagggcagccacgagcgctgccgctcacgttctacgacctcgttttctgggccatcccgcccgtacagcgcctgttcttctacgacagggccgacctgctcgacgtctccgacttcacgctgggcgagctgccacggttcagggactccctcgccgccgcgctacaccacttctacccgttggcggggaagctaacgtgcgagctggtccacgaggagggcgccgcgccgccggaggtcgtgttctcggacggcgactccgtcccgctgaccgtggccgtcagcggcgacgacttccgcgacctcgccggcgaccacgctcgcgacaccgcgaggctccgcgcgctgctccccgcgctgccgcagcacggtggttcgtctcggtcgcactcgcagcagggcgtcctcgccgtccagatcacggtgttccctcgcgccggcgtctgcatcggcaccacggtgcaccacgccgtggcggacggctccagctacgcgcacttcctccgcacctgggccaccgcccaccgcctcggtcccgagcgcagcggggcggtggcggtggacgtgccgcccccgctgttcgaccgcggcgtcgtacgcgacgacgcccgcctgcgtgaggcgttcctgcgcgaccacctagcgctcggcacagccggcaggggcggcggcgagcgcctctgcgactgggacctcagtcggcgccccggcgtcgtgttcgccacgttccggttcaccgagaagcggctccgcgcgctagggaggcgcgccgaggcggagacctcggcgcggtgctcgccctacgcgctggcgtgcggcgccgcgtgggcgggcatcgtgcgcgcgcgcggcatcggcaccggcactggcacggacggggctccggcgcccgacgcgctgttcgggttcgtgacggggtgcaagccgcgcgcgagcccgccggtcccggccaactactttggcaactgcctcggcctctgccgcgtcgcccaccacgcgaagcgtggcgagctcaccgcggtggccgcctcggccgccatatggcgggcgatcgaggggctggccgaggcgggtagcgtgttccgaggcgcccggggctgggtgcgctgggtgcgggagtacgcctccgcgcgtgcggtgaccgtggccggatcgcccaagctggggctgtacgcggccgcggactttggcggggcgtggggccggccggcgaaggtggagatcgcttcggtagaacgcacgggcgcgctggcgctggccgagagtggccgcgacggggacggcggcatcgaggtcgggctggcgctgccacgcgccgagatggagacgtttcgcgcgttttacctcgacctgttggccagcctcgacctcgattga

SEQ ID NO: 120061 - DNA, 1237 bp, Zea Mays
atacggacacaggatatttggtcgctggagacagacacacgacacgacacagacatgcgtcgaggtcacgaggtccagagcagtaggaaagtagttttctcgaggccacgaggtcccctgtacctgtagctgtagcatgggcggtacagcagcaccaatgcaagctgcaaggcgatcgaatgatactaccccaccggcgtcggacatgcaggtacggtagcgttctgtttttgtttataaataaaaaaaaactgctccgcgctttgcacacggccgatccaggcagcagcagcagcatgttcccacaggcagatgcgcatccagcccacgagcctctcgccggccgggtggccatcgtgacaggaggcgccgggggcatcggctcggcggtggccgcgcacctggcgtccctgggcgcccgcgtcgtggtcggcttcatcggcgacccggcccccgcggaccagctcgtggcggccctcaacaactcctcgccggcaggcaacagcgacccgcgcgccgtggcggtggcagcggacgtgtcggacccggcgcaggtggcgcggctgttcgacgcggcggaggcggcgttcgggccggagctgcacgtgctggtggccgcggcgggggtgcaggacgcgacgtacccgcggatcgcggacacgtcgcccgagcagtgggacctcgcgttcggcgtgaacacgcgcggcacgttcctgtgctgccgggaggcggcgcggcggctggcgcgcggcggcgcgggccgcatcgtcaccctctcgtcctccaacgtggggtcgctgcggcccgggtacggcgcgtacgtggccagcaaggcggccgtggaggccatgacaaaggtgctggccaaggagctcggagggatggggatcacggccaacgccgtggcgccgggccccgtggccacgcccatgttctacgcgggcaaatcggaggagcgcgtggccgccgccgcgcgcgagtgccccatggggaggctcgccgagccagcggacgtggcgcccgtggtggggttcctgtgcaccgacgccgccggctggatcaacgggcaggtcatccgagtcaacggcggctacgtgtgagtgtactgtgatgagagggaggaggcatagctagctagcttagcttggagtgtcagcgtgtcaccaaccgacaattacacgtgctccttcccttaataataataataataataataataataataataataataata

SEQ ID NO: 120062 - DNA, 1611 bp, Zea Mays
atgcctttggttacaccacttatgccatcagaagcaagccttcttcgtggagacgtcccatgtgatatggaagatgaggtggatggcctgttatcgtttccagaaaacaccgaactccttgatatagtctcaagaccatcagaggcaagtcttctccttggagaaacccctcgaggtggaattgatgagctgactactctgctatccttttcagcaaaatctatatttttcacaatatcattaacactatcagaggtgggtctccttcttggagaaacccctcttgatgaagctggtatcctatctttttcagggaaatcaacgcttttcattaaatcagcaatgccaccagaagttgttcttctcggtgaaagtcctcttgatgaagacaggttggaaacaggtccaattaatctctctgatgattttgtactagtctgcgatgcagcattaaacacacttgataatgatgcacttggtgcaatgctgggtgatgaaactggcgaggagagtgtactgttatcattttcagtaaaatccacgctttctgatagggtcatggtgccatctgatgcagctgttgttattggtgacacccttcttgatgaaattgccgaggatgaaagtttgagatctctacgaacaacggcctttttggacacatcatctgcatcattagaaggtgactttcttggtgtcttggtgctatctgatgcagctgttgttattggtgacacccttcttgatgaaattgccaaggatgaaagtttgagatctctacgaacaacagcctttttggacgcatcttctgcatcattagaaggtgactttcttggtgtcctggtgccatctgatgcagctgttgttgttggtgacacccttcttgatgaaattgccaaggaagaaagtttgagatctctacgaacaacggcctttttggacgcatcatctgcatcattagaaggtgactttcttggtgaccccccttgtgatgacattgacgaagagaccagccggtcaattttatcagcaagatcaatacttcttgacaaggtatttgcagcggagtacattgttgttcgcttaggggtagctctccctctcaacgggctcctcttcctatcagctggtgctgcatccctcgtcttggcctcgcctgcagaagaggtactagaattccttttcccctttgattcgacctggaaagaagaagacagactccgcattgaaggccacaacccatcaggagcccggcaacccgacaacctcctcggagcgctttgcgtctctgaaacggcatcatgcaccggcgtggacgagctggaggatgaggaggacgggctggaaggcgcagacgatggcgacgccgaggcagagatcctggacggggtagtgggccgcgagccgcccgaagacggcctcgacggagtcgcctgccgccgttcggtggactgggacctcttcgcctgtgacccagctggcgtcggggacgacgctcgaccgccggcattgggtgacggtgacgggtgcctcctcggaatagtagatgcttctgctggcatcgcagctaccttgcgcttcaccgcagcatcagcatggccgttagcataa

SEQ ID NO: 120063 - DNA, 1840 bp, Zea Mays
tcttttctccccttcccaccccatccctcactgcgagtggcctggtgcgcgagccgcgcgagaggaaaagaggcagagcgagccttccgcctcctcccccccttcgcgagagagaaaggagtgggggaggaaaaaaaatcttagggctttctcgtcgatcctctccgcgattaccccaccgattcgtccaatccaatgcagcgcggccccgcggtatcaaatcccccggcggcggccgccaccggcgcctccgagaacgtgagcagaaatattggacactctggcccatcttgcagtgcacctgcatatcagttgtttcgccctgttactcgttctatgacccgtgggtctgatcctatcgtggcttcacctggtttcaaggcaggaggatctgatagcgcaagcacacaaagaagtatttcatatgcttcttttagcgctcaattagttgcctcacgactgactgccactcgtacccggacccctctaaaagtgacttcatctggttggaagcctcttactcaacctgttgctctgaacgaagagaggaaatgtgcaaaccttacaatcaaccctactgctaagcgttccagagttacttcctccagagctgtcaaagattcaatcaacaattcagcttcaaaagccaactcaagtgttcccagtgacaaaaagtacagaaatgaagataatgtgagcctgggcgatcagtcagatggggccgtcatgccatctcccacaaagaagctgcaaatatgcaaaggcccttcagatgcaccttcaattaggaaatcaactatcagaatcctgggtgttaagggagctgctctaccacccacagggaaatctcaagttgaaactcggaaatgctttgctaatgctacagcagaagtgatttctgctagtacaaacgagatcagtgagccagataatgcagctgccccattgcttgcacagcagttgccaccagacactgcaaagaactccactgtcatcatgcatacccatgaaacaagtaaagtcaatcagttggctgctacatggccaagggcgaactttcaaactgattacaacaagaagccttccaatgtacccataatggctaaccagcccagtgggttcgctggtgcgactgctcccttggtgacaccaaagatggaaatcggaaacatgaaggacagttccaatcctctctcaaatcctgcttacgcaagggcgcttgtaataaagcagcaagagcagctccttcagcaatataaattgggcagttcaccgcagcgacagcatcatggacagcatctctacatcaaagggccagctctgtttgagaatgatgacccgccaccggtcaagccgctgggaacaaggtgccagctctgcaagcttgatgttgctttccggacacaaggggatgctggccgtgatgccaatgctccaccagtcattgcagttttggcatgccaccatgtgttccacagcaggtgcattgaatctgtttacgggctcgctgagcctgctgagtgccttgcctgcctggagtccggtgcagcgcactgattgctaaccagatacaccaggtataggataaagtttcctcttatattgcgtatagagagggtgcagtatcatctccattgatacaagtttccgatggtataacggtgcaggtcaagagtctgaagtgctccatttctgtgggcctttagatggtgtaagtaggctaccattggagttcaatagggagctgaattatgggacatgtcacatgtctgatatatatgtttatttatttctcctgtcgtggtcataggtaaaatctgcagtctattgacgctgccat

SEQ ID NO: 120064 - DNA, 1925 bp, Zea Mays
tcttttctccccttcccaccccatccctcactgcgagtggcctggtgcgcgagccgcgcgagaggaaaagaggcagagcgagccttccgcctcctcccccccttcgcgagagagaaaggagtgggggaggaaaaaaaatcttagggctttctcgtcgatcctctccgcgattaccccaccgattcgtccaatccaatgcagcgcggccccgcggtatcaaatcccccggcggcggccgccaccggcgcctccgagaacggtggatgtgatttgtctcgtgcggatgggaaatggtcgtaggatcctttataggttattattgaactgccccccacagttaattgtgagcagaaatattggacactctggcccatcttgcagtgcacctgcatatcagttgtttcgccctgttactcgttctatgacccgtgggtctgatcctatcgtggcttcacctggtttcaaggcaggaggatctgatagcgcaagcacacaaagaagtatttcatatgcttcttttagcgctcaattagttgcctcacgactgactgccactcgtacccggacccctctaaaagtgacttcatctggttggaagcctcttactcaacctgttgctctgaacgaagagaggaaatgtgcaaaccttacaatcaaccctactgctaagcgttccagagttacttcctccagagctgtcaaagattcaatcaacaattcagcttcaaaagccaactcaagtgttcccagtgacaaaaagtacagaaatgaagataatgtgagcctgggcgatcagtcagatggggccgtcatgccatctcccacaaagaagctgcaaatatgcaaaggcccttcagatgcaccttcaattaggaaatcaactatcagaatcctgggtgttaagggagctgctctaccacccacagggaaatctcaagttgaaactcggaaatgctttgctaatgctacagcagaagtgatttctgctagtacaaacgagatcagtgagccagataatgcagctgccccattgcttgcacagcagttgccaccagacactgcaaagaactccactgtcatcatgcatacccatgaaacaagtaaagtcaatcagttggctgctacatggccaagggcgaactttcaaactgattacaacaagaagccttccaatgtacccataatggctaaccagcccagtgggttcgctggtgcgactgctcccttggtgacaccaaagatggaaatcggaaacatgaaggacagttccaatcctctctcaaatcctgcttacgcaagggcgcttgtaataaagcagcaagagcagctccttcagcaatataaattgggcagttcaccgcagcgacagcatcatggacagcatctctacatcaaagggccagctctgtttgagaatgatgacccgccaccggtcaagccgctgggaacaaggtgccagctctgcaagcttgatgttgctttccggacacaaggggatgctggccgtgatgccaatgctccaccagtcattgcagttttggcatgccaccatgtgttccacagcaggtgcattgaatctgtttacgggctcgctgagcctgctgagtgccttgcctgcctggagtccggtgcagcgcactgattgctaaccagatacaccaggtataggataaagtttcctcttatattgcgtatagagagggtgcagtatcatctccattgatacaagtttccgatggtataacggtgcaggtcaagagtctgaagtgctccatttctgtgggcctttagatggtgtaagtaggctaccattggagttcaatagggagctgaattatgggacatgtcacatgtctgatatatatgtttatttatttctcctgtcgtggtcataggtaaaatctgcagtctattgacgctgccat

SEQ ID NO: 120065 - DNA, 1611 bp, Zea Mays
tcttttctccccttcccaccccatccctcactgcgagtggcctggtgcgcgagccgcgcgagaggaaaagaggcagagcgagccttccgcctcctcccccccttcgcgagagagaaaggagtgggggaggaaaaaaaatcttagggctttctcgtcgatcctctccgcgattaccccaccgattcgtccaatccaatgcagcgcggccccgcggtatcaaatcccccggcggcggccgccaccggcgcctccgagaacgacaaaaagtacagaaatgaagataatgtgagcctgggcgatcagtcagatggggccgtcatgccatctcccacaaagaagctgcaaatatgcaaaggcccttcagatgcaccttcaattaggaaatcaactatcagaatcctgggtgttaagggagctgctctaccacccacagggaaatctcaagttgaaactcggaaatgctttgctaatgctacagcagaagtgatttctgctagtacaaacgagatcagtgagccagataatgcagctgccccattgcttgcacagcagttgccaccagacactgcaaagaactccactgtcatcatgcatacccatgaaacaagtaaagtcaatcagttggctgctacatggccaagggcgaactttcaaactgattacaacaagaagccttccaatgtacccataatggctaaccagcccagtgggttcgctggtgcgactgctcccttggtgacaccaaagatggaaatcggaaacatgaaggacagttccaatcctctctcaaatcctgcttacgcaagggcgcttgtaataaagcagcaagagcagctccttcagcaatataaattgggcagttcaccgcagcgacagcatcatggacagcatctctacatcaaagggccagctctgtttgagaatgatgacccgccaccggtcaagccgctgggaacaaggtgccagctctgcaagcttgatgttgctttccggacacaaggggatgctggccgtgatgccaatgctccaccagtcattgcagttttggcatgccaccatgtgttccacagcaggtgcattgaatctgtttacgggctcgctgagcctgctgagtgccttgcctgcctggagtccggtgcagcgcactgattgctaaccagatacaccaggtataggataaagtttcctcttatattgcgtatagagagggtgcagtatcatctccattgatacaagtttccgatggtataacggtgcaggtcaagagtctgaagtgctccatttctgtgggcctttagatggtgtaagtaggctaccattggagttcaatagggagctgaattatgggacatgtcacatgtctgatatatatgtttatttatttctcctgtcgtggtcataggtaaaatctgcagtctattgacgctgccattttgaataaacctggtgtctgcgctggttggcttggtgttgactgatgacttgtgagtagccgccaaacttgctgttgcggcctacctttgctgcaagcctgctatataagagcaactccaagagttcctaaaaaattactacaaaaaattatgcattggggttccgctaaaaaaaata

SEQ ID NO: 120066 - DNA, 1521 bp, Zea Mays
tcttttctccccttcccaccccatccctcactgcgagtggcctggtgcgcgagccgcgcgagaggaaaagaggcagagcgagccttccgcctcctcccccccttcgcgagagagaaaggagtgggggaggaaaaaaaatcttagggctttctcgtcgatcctctccgcgattaccccaccgattcgtccaatccaatgcagcgcggccccgcggtatcaaatcccccggcggcggccgccaccggcgcctccgagaacgacaaaaagtacagaaatgaagataatgtgagcctgggcgatcagtcagatggggccgtcatgccatctcccacaaagaagctgcaaatatgcaaaggcccttcagatgcaccttcaattaggaaatcaactatcagaatcctgggtgttaagggagctgctctaccacccacagggaaatctcaagttgaaactcggaaatgctttgctaatgctacagcagaagtgatttctgctagtacaaacgagatcagtgagccagataatgcagctgccccattgcttgcacagcagttgccaccagacactgcaaagaactccactgtcatcatgcatacccatgaaacaagtaaagtcaatcagttggctgctacatggccaagggcgaactttcaaactgattacaacaagaagccttccaatgtacccataatggctaaccagcccagtgggttcgctggtgcgactgctcccttggtgacaccaaagatggaaatcggaaacatgaaggacagttccaatcctctctcaaatcctgcttacgcaagggcgcttgtaataaagcagcaagagcagctccttcagcaatataaattgggcagttcaccgcagcgacagcatcatggacagcatctctacatcaaagggccagctctgtttgagaatgatgacccgccaccggtcaagccgctgggaacaaggtgccagctctgcaagcttgatgttgctttccggacacaaggggatgctggccgtgatgccaatgctccaccagtcattgcagttttggcatgccaccatgtgttccacagcaggtgcattgaatctgtttacgggctcgctgagcctgctgagtgccttgcctgcctggagtccggtgcagcgcactgattgctaaccagatacaccaggtcaagagtctgaagtgctccatttctgtgggcctttagatggtgtaagtaggctaccattggagttcaatagggagctgaattatgggacatgtcacatgtctgatatatatgtttatttatttctcctgtcgtggtcataggtaaaatctgcagtctattgacgctgccattttgaataaacctggtgtctgcgctggttggcttggtgttgactgatgacttgtgagtagccgccaaacttgctgttgcggcctacctttgctgcaagcctgctatataagagcaactccaagagttcctaaaaaattactacaaaaaattatgcattggggttccgctaaaaaaaata

SEQ ID NO: 120067 - DNA, 1953 bp, Zea Mays
ttttctccccttcccaccccatccctcactgcgagtggcctggtgcgcgagccgcgcgagaggaaaagaggcagagcgagccttccgcctcctcccccccttcgcgagagagaaaggagtgggggaggaaaaaaaatcttagggctttctcgtcgatcctctccgcgattaccccaccgattcgtccaatccaatgcagcgcggccccgcggtatcaaatcccccggcggcggccgccaccggcgcctccgagaacggtggatgtgatttgtctcgtgcggatgggaaatggtcgtaggatcctttataggttattattgaactgccccccacagttaattggcttgcttggtctggcgtaatgttagtcagggtattaatcctcatatggagactagagtccccatcaagccatctagtccgtgagcagaaatattggacactctggcccatcttgcagtgcacctgcatatcagttgtttcgccctgttactcgttctatgacccgtgggtctgatcctatcgtggcttcacctggtttcaaggcaggaggatctgatagcgcaagcacacaaagaagtatttcatatgcttcttttagcgctcaattagttgcctcacgactgactgccactcgtacccggacccctctaaaagtgacttcatctggttggaagcctcttactcaacctgttgctctgaacgaagagaggaaatgtgcaaaccttacaatcaaccctactgctaagcgttccagagttacttcctccagagctgtcaaagattcaatcaacaattcagcttcaaaagccaactcaagtgttcccagtgacaaaaagtacagaaatgaagataatgtgagcctgggcgatcagtcagatggggccgtcatgccatctcccacaaagaagctgcaaatatgcaaaggcccttcagatgcaccttcaattaggaaatcaactatcagaatcctgggtgttaagggagctgctctaccacccacagggaaatctcaagttgaaactcggaaatgctttgctaatgctacagcagaagtgatttctgctagtacaaacgagatcagtgagccagataatgcagctgccccattgcttgcacagcagttgccaccagacactgcaaagaactccactgtcatcatgcatacccatgaaacaagtaaagtcaatcagttggctgctacatggccaagggcgaactttcaaactgattacaacaagaagccttccaatgtacccataatggctaaccagcccagtgggttcgctggtgcgactgctcccttggtgacaccaaagatggaaatcggaaacatgaaggacagttccaatcctctctcaaatcctgcttacgcaagggcgcttgtaataaagcagcaagagcagctccttcagcaatataaattgggcagttcaccgcagcgacagcatcatggacagcatctctacatcaaagggccagctctgtttgagaatgatgacccgccaccggtcaagccgctgggaacaaggtgccagctctgcaagcttgatgttgctttccggacacaaggggatgctggccgtgatgccaatgctccaccagtcattgcagttttggcatgccaccatgtgttccacagcaggtgcattgaatctgtttacgggctcgctgagcctgctgagtgccttgcctgcctggagtccggtgcagcgcactgattgctaaccagatacaccaggtcaagagtctgaagtgctccatttctgtgggcctttagatggtgtaagtaggctaccattggagttcaatagggagctgaattatgggacatgtcacatgtctgatatatatgtttatttatttctcctgtcgtggtcataggtaaaatctgcagtctattgacgctgccattttgaataaacctggtgtctgcgctggttggcttggtgt

SEQ ID NO: 120068 - DNA, 2034 bp, Zea Mays
acttgaacttacatatgctgtttttctttatttggcatatccacatatcccgattctgtaacggttcgacaattccattaaatattctaagttggttatgcggtatagtttatagaagtgcaccttccccgtgtgcctggatgttactcctgaaagatacttagctgctggactgttaattcatttaacaaatatcacaagatggagttgcacattaatttcttctgttctatgttatctatcttagcaatctgcatctcatactgtgttttgactcaattgatatttagtgtagtttcttgctatatatgaccatgctgcatgattttagtaatgcctcacagtctcacacttctgttcatgaagtaaatattagctaacagtacacccccaaacaatgtttctgcttaatcttgaactcgcttctttttttactttgctttgcattttcagtgagcagaaatattggacactctggcccatcttgcagtgcacctgcatatcagttgtttcgccctgttactcgttctatgacccgtgggtctgatcctatcgtggcttcacctggtttcaaggcaggaggatctgatagcgcaagcacacaaagaagtatttcatatgcttcttttagcgctcaattagttgcctcacgactgactgccactcgtacccggacccctctaaaagtgacttcatctggttggaagcctcttactcaacctgttgctctgaacgaagagaggaaatgtgcaaaccttacaatcaaccctactgctaagcgttccagagttacttcctccagagctgtcaaagattcaatcaacaattcagcttcaaaagccaactcaagtgttcccagtgacaaaaagtacagaaatgaagataatgtgagcctgggcgatcagtcagatggggccgtcatgccatctcccacaaagaagctgcaaatatgcaaaggcccttcagatgcaccttcaattaggaaatcaactatcagaatcctgggtgttaagggagctgctctaccacccacagggaaatctcaagttgaaactcggaaatgctttgctaatgctacagcagaagtgatttctgctagtacaaacgagatcagtgagccagataatgcagctgccccattgcttgcacagcagttgccaccagacactgcaaagaactccactgtcatcatgcatacccatgaaacaagtaaagtcaatcagttggctgctacatggccaagggcgaactttcaaactgattacaacaagaagccttccaatgtacccataatggctaaccagcccagtgggttcgctggtgcgactgctcccttggtgacaccaaagatggaaatcggaaacatgaaggacagttccaatcctctctcaaatcctgcttacgcaagggcgcttgtaataaagcagcaagagcagctccttcagcaatataaattgggcagttcaccgcagcgacagcatcatggacagcatctctacatcaaagggccagctctgtttgagaatgatgacccgccaccggtcaagccgctgggaacaaggtgccagctctgcaagcttgatgttgctttccggacacaaggggatgctggccgtgatgccaatgctccaccagtcattgcagttttggcatgccaccatgtgttccacagcaggtgcattgaatctgtttacgggctcgctgagcctgctgagtgccttgcctgcctggagtccggtgcagcgcactgattgctaaccagatacaccaggtataggataaagtttcctcttatattgcgtatagagagggtgcagtatcatctccattgatacaagtttccgatggtataacggtgcaggtcaagagtctgaagtgctccatttctgtgggcctttagatggtgtaagtaggctaccattggagttcaatagggagctgaattatgggacatgtcacatgtctgatatatatgtttatttatttctcctgtcgtggtcataggtaaaatctgcagtctattgacgctgccat

SEQ ID NO: 120069 - DNA, 288 bp, Zea Mays
tttgcatattgtccatttgtccttgtaattgtaacctgtaatggttgtcggttgcagttctgtggtagaaagtatcaaatcaaaggatcaactggcactggtgcttttgctaaagtatacaaagccactgttgacagtgatgcggaagaaatggttgctttgaagattcagaatccctcatttactttggaattttacatgtatcgccaacttgatctgcgtatatctgatgtcgagagaccaagctatcttgatctgcgtatatctgatgttggttatctattttaa

SEQ ID NO: 120070 - DNA, 1103 bp, Zea Mays
cgccgcagccacccagtggaaactggaccagttggactgttggagacttggagtaggtctgagaggtgggcccacgcatcgtgtcgaaactcgaaagccaccaaagcggcaattcgttccagttcgcaaaaatttcaaaaaccagagcggcacgagcaggtgcgggtacctgccttctatgcttctagcccacacggcaacacctgcacacacagagaaagataaaaaataggagcaaacatcgcatcctgatcctccgccaggaccgccaccaaagctacgtcaggatggcggcggatccgagcaggcggcggccggagtaccatccggcggtgaacgacgtcctgttgacgctcaccaacgccagaggcaccctcgccgacgtgcagcgccgactcgaccttgagttccgcgccgcctaccctgaccatgcgaatccggcgaagctggtggcgcgggtgaagcggttggaggaagaggcggccgcgctcaaggagatgtgccgcgacctcctcacccagaagcaggagctgatcgaccagatccgcgtgagcttgatggcgcagcgtggcatgacgcagcggctgctcgctgcgtccgggctgcccccccttgtccgacgccgacgagaccgtccacaacagcctcaacgagggtgatccaagactggactgctcaagtcagtcccatcacaagggagatcgaggacctggacaagaagaaaaatgccaaccagatgctcttctcagcgatcatttagagagaacagcttcgacgctcggctattgagggactcttggacactggctgaacaattccaatgtagctgcgctcttttcaggcgcgcggagatgcaatgcaacctgccagacatatatgtctaccatttgcataatatcaaaacttgaagaatggtacagatatcttatttcataaaaaaacgtgtcgtgagtgtaattacattagtagtcctttttgtgtatttgagaaaaagagagtagctaccataggaatttgtcaattggatctttttaacgatcacgtttaatagagtgagtagctttcacgggttgtaatgctatcttctgttggaaatttatctg

SEQ ID NO: 120071 - DNA, 737 bp, Zea Mays
aaaaccatagcggcaatgcaactgcagccctggagctcaggcatcttgtacgagctggtaaggtcgagccatggcttttgccacaacaaaccagcatatcgccccagcttcgatctcacgcatctaccgctgcgctgcgcggctctctctggttccagttccagcccatggtggctggtgggcgtcgtgacgatcaggccgtttctttcggcggctgtggcgaccagatggcgccacaagaagacagctactttgcctcacggaatcctccacacagaaatcgttagctagattgagtgcggtgctaccctgactgagcttttctctctcttttttttctttccttctttttttacatctttttctcgttttgcggtgccgtgccgacgccgtcgataacgccaaacttcaccctgatatatgggatgatcttcctgtcaccgctcaagagtatacagagtctatgtctaccgatacaacctattttgttttcttgaccttgcaaggccttggtccacgagtctcgcgtcactctctcagccaaggtcctctccggccactactcttgcttccgcggcttcctgcttcgccgctcctctctcgccccctctatccctcctgagctatggtcgtctctcttatgtaccatgtgtgtatttgattaaattaactaagcgatgtaccacaaccatatatatatgcaggagactgaagcaatctgtgccctgcattttgtt

SEQ ID NO: 120072 - DNA, 225 bp, Zea Mays
atggcaaccatcccatgggagtccactagcccactactggtgggctgcttactcttcgttaccctcttcttccttggtaagcttgatcatgtcgtcaatcctcaggatagtaatggcagcctccgtggcaaactgaatgatctttactttgctcatcgatggctctatcacgccatactcaaggttgttgcgaatgatacccttagagaggtcaaggcccatact

SEQ ID NO: 120073 - DNA, 786 bp, Zea Mays
gaaaaaactgattccttcaatttgcatttcattgcctcccagaaacatacaacaaacaccacggggttatttacataccaaggtagtaagcagttacgtgctgcttctgatcagacatatataagtactccgaatcaacaaggagttggaaccagcgagttcataccatatcgatcacaacggtgaacattagatcaaaccaaccaaaaaattggcaaacaaaacccgacctcaaaaaaacggggggcacaaaaccgccaattcagctgccggtggcagcaatggggctgaacgtcacaggccaagctcttctggtagccccctctctctgggaagccgaccgcccaaggccagacccgaacctcgagcaccttatgaggcaggggttcgtgtccatggaacccatgcagaacgatgggtgcagcttcatcgctggtatcctctggcagctcagcgagcggaaggaggacgagcccatcggcggcaggcggacgcactggaactcggagcggcacggatgggcgccgaccggggcggaagagtcggagctcacggctgggcacgccgtgcagaacgacagcgagaggctgttcctcggcaactctcttatcgggctcgtgccggggagggtgttgaacgagatgatcggatgtctgcagagagggcatggtattgcacccgctgggctcgctgacgtgtagctagttgagcaaaggtatagagcacatcttgtgcagaattcatgtttgcaacctgcaaacaaagttgtacagaatgctgtgaacc

SEQ ID NO: 120074 - DNA, 1594 bp, Zea Mays
agatgacaagctcgaagctctccagaatctccactcccggagtgagttccccaccaccgtctccaaagtccaaatgtcccgtcaccaccacttcgccgccgccatcgctgtcgtgctcatcctcttcgcgccgcctccttgcgccggcgaccctaacgacgagcgttgcctgacccacctccaccagtccctctccaatccctccggcggtctcaactggaccaaggcggcgatctccgcgccgtgcgatggtttcttctcgcacctccagggcgtgacctgcaacaacgggcgcgtgtacaagctagccctcccggagctctcgctcgggggcaccgtcccgccggagctctccaactgcaccaacctccagtcgctggacctctccgccaacgcgctgtccggcgccatcccgacggagctctccgcgctgctgaacctcgccgtgctcaacctgtccgcgaatgcgctgtccggcgccatcccgcgggagctcgccagctgcgcctacctcaacgtcatagatctccatggcaaccagctgtccggtcccatccccgacgagctcggcctcctcgtccggctctcagccttcgacgtctcccacaaccgcctctcgggccccatccccgtgctccttgccaaccgcaccggcgccggcacggcagccgtcgggacggcgaggttcaatgccagctccttcgtagggaacaagggcttgtatgggtacccgctgccgccgatgcggacgcgggggctctccgtgctcgccatcgctggcatcggccttggcagcgggctgctcagccttgtgctcagcttctccgccgtgtgtctgtggctccgtgccacggaccggacggccaccatctctggagaggagggcaagatctcccagctcatgccggactactgaatccattcaaaggttgcatctttggacattatataattctttggaattgaactgaacccgagagattttcatgtcggcctgcaacagaggttccattctgggtagagtttgggtggattcttgaagccaagattgctggaacgggatccgatgagcatagcagacatctcgctggttgtgtcagtagtggattttctaatctaattggagaccgaaattgctgtaataacttcttcttttttttggttgtgtgcgtcttttcttttgtggttttatttactgtttggcagtgacagttggatttgtgcttatgctgaggaatatttgtcggtagacaactgaaatttgctccttccgaaggcagcgtacttccgagccattggcaattttgtcattatcatttgtgggcttcgccagtatgccatcggacccacaaatcatagacacagacggtcccaccagtcatagacacgggatggcataataacagacagccaaatttgagagtggcaaaatagcaaatttctcccgtacttccatccttttattttttttctcactctctttagtttatttctagtattaaagtactaccttcatcctaaattaaaatttgttaacatttaatatatatgttttagatttatcattaactatttaaatatagatataaaaatc

SEQ ID NO: 120075 - DNA, 1784 bp, Zea Mays
ctcagccgccaactcgccatccaccaccacctcctgcccccccggcccccgaaaaaggtccaggaattcgaggacacttgctcctcctcggcgatggccacgcccggatccttcccgaaatcctagcacatgtacggcaatttattgttttttttttcctttccaaaaggaaggattccattccgttccgtggtttggatttgccatcaagcaaaggcaaagcttgtcccgtgatcttcttgtaccttggcgagccgtgcgacggattggttgatccaaggataatgagcggcggcaattcttcgtggctgatgccgccgccgccgcccgcgtcggcgctcgacaacgtggagagcgagataagccccagcatccccttcatcgtggcgatcctggcgatcgtcttcttcgtgtgcggcctgctgcacctgctggtgcgccacctgctgcggctgcgccgccgccgccgcgcgcgggaggacgcggacagcgtcacggcgttccagggccagctgcagcagctcttccacatgcacgacgccggcgtggaccaggcctccatcgacgcgctcccggtgttcctctacggcagcgtcgtcgtcggcgggggcgggggcgggcagggcaaggccaaggccaaggacccgttcgactgcgccgtgtgcctgtgcgagttctcgcccgacgaccggctccggctgctgccccagtgcagccacgcgttccacctcgagtgcatcgacacgtggctgctgtcccactccacctgcccgctctgccgccggagcctcctcgccgacctctcgccgacgttgtccagccccgtcgtggtggtgcagctcgggtccgggagcgcccgcgacatggccgcgtcggcggatgggaccacccacgacgatgccgacgacggcgagccaagcgaccgggccacgccggcgcaggaggtggtcgaggtgaagctggggaagtttgtgtgcgtcgaaggcaacagcggcagcgcgagcgccaccgccgccgacgcagcagctgacggagcaggcaccagcggcgatggcgacggcggtgccagtgcagaggaaggtctcgggcagagaaggtgccactccatggggtcctacgagtacgtcatggacgaccgcgcctcgctccgcgtggcgatcaagccgggacccaagaagaagcccgcggcctccaagtcgcgccgccgaggcgccatgtcggagtgcgagttgggcgcgtccaagcgcggggagacctcgctccgcctgccattcccagcaacggtgcccaagcagcagcagcagtccgactccgacgcgaccatgtcgaagctcgccaaggacagcttctcggtgtcgaagatctggatggtgccgtcgtccaagaaagaccccgacgcggccggcgagaggcgcgcggtgtcgttccggtggccggtgaggagcaaggacgagggagacggcaggagccggaagagcgggagcgaggccgactgggacgtggaggccgggagcggcggcggcggcaacagcgccgcgtcgtcgctggcggaggagaggccctccttcgcccggaggaccctgctctgggtcgtcggaggccggcaacagagcagagtcgggagctgttcatgaacggcgcgccactgtttgaaagacacacagaacaaaggcaaacgaattcttttgtgctcttttggcacattggtaagtgcgagtagtgattgcaatagctagaaatttgtaaaacaggaaagactctgaaaaaaatattctttctttcgc

SEQ ID NO: 120076 - DNA, 146 bp, Zea Mays
ctacaatctcataatctgcgcatccaaacactcagattctaccgaccagcttctgtccacagcagccgaaccaaacacctagattctaaccaccagcttctctccacagccagcttttccccacagccagcttttcaaaaaagctc

SEQ ID NO: 120077 - DNA, 1562 bp, Zea Mays
cccacccggtctccagaacagacaacccgtccttctccttcccatcggctccacacaaccagaaggttcttcgcttcactctgccctgcgccgccgccaacgctgcagccgcagttgccgcaggcgggaacttggacgtgctactcgcgactgctctcatctgttcccgcgtaggattcgttcacaatggcccgtgtgtatgtcggcaacttggatgcacgcgtgacttccggggaactcgaagatgagttccgtgtgtttggagttctgcgaaggtcactcacttctgtcaaacttatcccggttttgtagaaacttctttttgtagttttttccatgttttcccttgagccttgaaggcttggcaagccaatgtaagaaccttgtcattcatatggtgatgaaactcaagagaatagctttatattgttttattgatttatttatgtgctcactaacttattgtggagggtgatagttcaaaaccaactttaatttcgcttcactaatattcttcatcaaatgtttgtgtggccaacttcctttcccaatttgttaaacttgtttttttcactgtggtatttgacttttcaagggctttggctgcgtataaaaattattgattggagtggtgtaaaactttgaattttgaaacatgattgtccaactattttgaccgcaaaggtggtttgtaatgtttatattcattatgcattctcttccaattatgtcttagtttcagaaaaaaaatgttttggatattttagatgaaggtgtgcatgtgtatcttcatgttggatctagcgagatggagagtgtttgggtcgcacgcaaaccacctggttttgcatttattgattttgacgacaggagggatgcagaggatgctattcgtgatctagatggtaagaatggatggaaagttgaactatctcgtagcaccaatggtcgtggcagtcgtgatcggcatggtggatctgagtcaaagtgctatgagtgtggtgagactgggcactttgcacgtgaatgtcgtctgcgcattggctctggaggtctaggcagtggaagacgtcgcagcaggagcaggagccgcagtcgcagccctagataccgcaggagtccgagctataatagaaggagctatagccctcgttatcgttctccaaggcgccgtactccttcaccggctcgtggacgcagctatagcaggtcgccatagtacaactgtgacaaatatgcatctccctcgttaacggagtaatgatggcagatactggtgtagcaggagcttggcctgaagcccgtgcctgattcttctctgtgtgaggacttggttcttggtttggctgtggggaacaaatttggaactgtcgtcaactgcatgacttcagttcaggcatgttctgcttaaacgactcggccaactacggctctcagttgtagtcttcatggttttgttcctccattcttggcacgtccttatctgcaaatgaatgtcaaccttccattactatctgcctgcgatgtttcatcatgaaattcttcaccaaagatgctacttc

SEQ ID NO: 120078 - DNA, 1379 bp, Zea Mays
cccacccggtctccagaacagacaacccgtccttctccttcccatcggctccacacaaccagaaggttcttcgcttcactctgccctgcgccgccgccaacgctgcagccgcagttgccgcaggcgggaacttggacgtgctactcgcgactgctctcatctgttcccgcgtagtgtttgggtcgcacgcaaaccacctggttttgcatttattgattttgacgacaggagggatgcagaggatgctattcgtgatctagatggtaagaatggatggaaagttgaactatctcgtagcaccaatggtcgtggcagtcgtgatcggcatggtggatctgagtcaaagtgctatgagtgtggtgagactgggcactttgcacgtgaatgtcgtctgcgcattggctctggaggtctaggcagtggaagacgtcgcagcaggagcaggagccgcagtcgcagccctagataccgcaggagtccgagctataatagaaggagctatagccctcgttatcgttctccaaggcgccgtactccttcaccggctcgtggacgcagctatagcaggtcgccatagtacaactgtgacaaatatgcatctccctcgttaacggagtaatgatggcagatactggtgtagcaggagcttggcctgaagcccgtgcctgattcttctctgtgtgaggacttggttcttggtttggctgtggggaacaaatttggaactgtcgtcaactgcatgacttcagttcaggcatgttctgcttaaacgactcggccaactacggctctcagttgtagtcttcatggttttgttcctccattcttggcacgtccttatctgcaaatgaatgtcaaccttccattactatctgcctgcgatgtttcatcatgaaattcttcaccaaagatgctacttcgtcacaaattagtaacattctttcccccatatagttgatatggtttgagtgtactgagcactaacaattgcagctcatgaaaataaggcccttgatttttgtcatagaacaagagcggctattttaattgcagcactcacatgaaaataaatctactctgcatgccggggattgaggcgactgaagtgtgagccttcagctgcacgtagttggccatccaaggaacctagtcaggctgatttcagcaagaggcgcagcctacgactgaacttggttttattttttgtggttttgattcttcacttcttccttgtgttctgccttcactgcatcttattggtagtggtcgaataatgcttctgtatgtggtaaatcattcttggtacaatggctctcttttttctgctgatcaatgtatgtaggaatttctgatagtcgccgttaattgtagtataaata

SEQ ID NO: 120079 - DNA, 1691 bp, Zea Mays
cccacccggtctccagaacagacaacccgtccttctccttcccatcggctccacacaaccagaaggttcttcgcttcactctgccctgcgccgccgccaacgctgcagccgcagttgccgcaggcgggaacttggacgtgctactcgcgactgctctcatctgttcccgcgtaggattcgttcacaatggcccgtgtgtatgtcggcaacttggatgcacgcgtgacttccggggaactcgaagatgagttccgtgtgtttggagttctgcgaagtgtttgggtcgcacgcaaaccacctggttttgcatttattgattttgacgacaggagggatgcagaggatgctattcgtgatctagatggtaagaatggatggaaagttgaactatctcgtagcaccaatggtcgtggcagtcgtgatcggcatggtggatctgagtcaaagtgctatgagtgtggtgagactgggcactttgcacgtgaatgtcgtctgcgcattggctctggaggtctaggcagtggaagacgtcgcagcaggagcaggagccgcagtcgcagccctagataccgcaggagtccgagctataatagaaggagctatagccctcgttatcgttctccaaggcgccgtactccttcaccggctcgtggacgcagctatagcaggtcgccatagtacaactgtgacaaatatgcatctccctcgttaacggagtaatgatggcagatactggtgtagcaggagcttggcctgaagcccgtgcctgattcttctctgtgtgaggacttggttcttggtttggctgtggggaacaaatttggaactgtcgtcaactgcatgacttcagttcaggtttaaaaccttatctagcttattgtgattgtcttgattatgccattaaagaacttttaagatttgtgtattatgccactaagacatattaccttctctgtgttaaaaaggcatgttctgcttaaacgactcggccaactacggctctcagttgtagtcttcatggttttgttcctccattcttggcacgtccttatctgcaaatgaatgtcaaccttccattactatctgcctgcgatgtttcatcatgaaattcttcaccaaagatgctacttcgtcacaaattagtaacattctttcccccatatagttgatatggtttgagtgtactgagcactaacaattgcagctcatgaaaataaggcccttgatttttgtcatagaacaagagcggctattttaattgcagcactcacatgaaaataaatctactctgcatgccggggattgaggcgactgaagtgtgagccttcagctgcacgtagttggccatccaaggaacctagtcaggctgatttcagcaagaggcgcagcctacgactgaacttggttttattttttgtggttttgattcttcacttcttccttgtgttctgccttcactgcatcttattggtagtggtcgaataatgcttctgtatgtggtaaatcattcttggtacaatggctctcttttttctgctgatcaatgtatgtaggaatttctgatagtcgccgttaattgtagtataaatatgtttcctctgcaagataattgtaattatatgtgaatactctcagaaaacatagatttgaggtataatctgctcttggcaaatgattttttttaaaaagca

SEQ ID NO: 120080 - DNA, 1687 bp, Zea Mays
cccacccggtctccagaacagacaacccgtccttctccttcccatcggctccacacaaccagaaggttcttcgcttcactctgccctgcgccgccgccaacgctgcagccgcagttgccgcaggcgggaacttggacgtgctactcgcgactgctctcatctgttcccgcgattcgttcacaatggcccgtgtgtatgtcggcaacttggatgcacgcgtgacttccggggaactcgaagatgagttccgtgtgtttggagttctgcgaagtgtttgggtcgcacgcaaaccacctggttttgcatttattgattttgacgacaggagggatgcagaggatgctattcgtgatctagatggtaagaatggatggaaagttgaactatctcgtagcaccaatggtcgtggcagtcgtgatcggcatggtggatctgagtcaaagtgctatgagtgtggtgagactgggcactttgcacgtgaatgtcgtctgcgcattggctctggaggtctaggcagtggaagacgtcgcagcaggagcaggagccgcagtcgcagccctagataccgcaggagtccgagctataatagaaggagctatagccctcgttatcgttctccaaggcgccgtactccttcaccggctcgtggacgcagctatagcaggtcgccatagtacaactgtgacaaatatgcatctccctcgttaacggagtaatgatggcagatactggtgtagcaggagcttggcctgaagcccgtgcctgattcttctctgtgtgaggacttggttcttggtttggctgtggggaacaaatttggaactgtcgtcaactgcatgacttcagttcaggtttaaaaccttatctagcttattgtgattgtcttgattatgccattaaagaacttttaagatttgtgtattatgccactaagacatattaccttctctgtgttaaaaaggcatgttctgcttaaacgactcggccaactacggctctcagttgtagtcttcatggttttgttcctccattcttggcacgtccttatctgcaaatgaatgtcaaccttccattactatctgcctgcgatgtttcatcatgaaattcttcaccaaagatgctacttcgtcacaaattagtaacattctttcccccatatagttgatatggtttgagtgtactgagcactaacaattgcagctcatgaaaataaggcccttgatttttgtcatagaacaagagcggctattttaattgcagcactcacatgaaaataaatctactctgcatgccggggattgaggcgactgaagtgtgagccttcagctgcacgtagttggccatccaaggaacctagtcaggctgatttcagcaagaggcgcagcctacgactgaacttggttttattttttgtggttttgattcttcacttcttccttgtgttctgccttcactgcatcttattggtagtggtcgaataatgcttctgtatgtggtaaatcattcttggtacaatggctctcttttttctgctgatcaatgtatgtaggaatttctgatagtcgccgttaattgtagtataaatatgtttcctctgcaagataattgtaattatatgtgaatactctcagaaaacatagatttgaggtataatctgctcttggcaaatgattttttttaaaaagca

SEQ ID NO: 120081 - DNA, 2103 bp, Zea Mays
acccggtctccagaacagacaacccgtccttctccttcccatcggctccacacaaccagaaggttcttcgcttcactctgccctgcgccgccgccaacgctgcagccgcagttgccgcaggcgggaacttggacgtgctactcgcgactgctctcatctgttcccgcgtaggattcgttcacaatggcccgtgtgtatgtcggcaacttggatgcacgcgtgacttccggggaactcgaagatgagttccgtgtgtttggagttctgcgaaggtcactcacttctgtcaaacttatcccggttttgtagaaacttctttttgtagttttttccatgttttcccttgagccttgaaggcttggcaagccaatgtaagaaccttgtcattcatatggtgatgaaactcaagagaatagctttatattgttttattgatttatttatgtgctcactaacttattgtggagggtgatagttcaaaaccaactttaatttcgcttcactaatattcttcatcaaatgtttgtgtggccaacttcctttcccaatttgttaaacttgtttttttcactgtggtatttgacttttcaagggctttggctgcgtataaaaattattgattggagtggtgtaaaactttgaattttgaaacatgattgtccaactattttgaccgcaaaggtggtttgtaatgtttatattcattatgcattctcttccaattatgtcttagtttcagaaaaaaaatgttttggatattttagatgaaggtgtgcatgtgtatcttcatgttggatctagcgagatggagaggttttatctgttatatttctttacgacttctttcgttatcagatgaacacctggtgcagtccactaactgttgttctcaatgcagtgtttgggtcgcacgcaaaccacctggttttgcatttattgattttgacgacaggagggatgcagaggatgctattcgtgatctagatggtaagaatggatggaaagttgaactatctcgtagcaccaatggtcgtggcagtcgtgatcggcatggtggatctgagtcaaagtgctatgagtgtggtgagactgggcactttgcacgtgaatgtcgtctgcgcattggctctggaggtctaggcagtggaagacgtcgcagcaggagcaggagccgcagtcgcagccctagataccgcaggagtccgagctataatagaaggagctatagccctcgttatcgttctccaaggcgccgtactccttcaccggctcgtggacgcagctatagcaggtcgccatagtacaactgtgacaaatatgcatctccctcgttaacggagtaatgatggcagatactggtgtagcaggagcttggcctgaagcccgtgcctgattcttctctgtgtgaggacttggttcttggtttggctgtggggaacaaatttggaactgtcgtcaactgcatgacttcagttcaggcatgttctgcttaaacgactcggccaactacggctctcagttgtagtcttcatggttttgttcctccattcttggcacgtccttatctgcaaatgaatgtcaaccttccattactatctgcctgcgatgtttcatcatgaaattcttcaccaaagatgctacttcgtcacaaattagtaacattctttcccccatatagttgatatggtttgagtgtactgagcactaacaattgcagctcatgaaaataaggcccttgatttttgtcatagaacaagagcggctattttaattgcagcactcacatgaaaataaatctactctgcatgccggggattgaggcgactgaagtgtgagccttcagctgcacgtagttggccatccaaggaacctagtcaggctgatttcagcaagaggcgcagcctacgactgaacttggttttattttttgtggttttgattcttcacttcttccttgtgttctgccttcactgcatcttattggtagtggtcgaataatgcttctgtatgtggtaaatcattcttggtacaatggctctcttttttctgctgatcaatgtatgtaggaatttctgatagtcgccgttaattgtagtataaata

SEQ ID NO: 120082 - DNA, 2418 bp, Zea Mays
gtggcccaccccacctccttccgagctccgaggagcgatcggcagggcgcgcctctggccgctttgtcgcgacgcgcgttcgctccaatcctgtcgcggccattaaaagccttcccggctttcccgctcagctcgtctcttccagaaacgtacctcgtcatctcttcgccttcgctacgcaattccgatccacgctgcgggccacttgtgacgactggcggaacccgcgagaaacagaggcgggcgagcggcgatcggagatggcgccggagaagccccggaaggaacaggaggaggagttgatgctggaggatggaggcatcgaggagagcccgcgccgcagcttcgaggactgcggcgactccgaggaggaccgcggggagggcgatgacgaggaggagcgggacagcgaccgcgacggcgtcggttcgacgcgctccttcctgccccaaaagtggccgcagagctacagggaaacaactgacacctacacaatcgctgcatcaccgagctttggttacttaggttcttctacaagcaaatactcgctcctcgaccttggtcgcagtattctgggctctgacctgaagtcacctctaatatcggccaaggctgattctgtcagaaacttgccgaaaacccttggttcaatgagagatgggagagtctcgtttcaattgcaacacacgggagaaatctacattagtcaagggtgcaatgtgacgcaaacagtcttcaacgggattaatgtgcttgctggtgttggccttctttccactccgtttacaattcatgaagctggatggactggccttgcagttctagcatgctttgcgattgtttgctgttatactggaattcttctaaaacattgttttgagagcaaagatggtatctcaagttatccagacattggagaggctgcatttggaagaattggccgtgtgttgatatctattattttgtataccgagctatattcatactgtgtggaattcatcattttggagggtgataacctcacatcaatttttcctaaagctggttttgattggcttgggattcatgttgatggaaaacattttttcggagtgttaactgctattttagtcttgccaacagtatggctgcgagatcttcgagtactctcgtacctttcagcgggtggtgtgattgcaactcttctcgtattcctgtccgttggtttagtcggtgttaccgatggtataggcttccattcaactgggaaggcagtaaactggagtggcatgccttttgccattggtatttatggattttgctactccgggcattcggtatttccaaatatctaccagtcaatgtccgatagatctaagttccctaaggcactgttcatatgtttcgcaatttgcacagcaatatatggctcttttgctgtcattggctttctcatgtttggaaagaacactttatcacaaatcactttaaaccttccaaagcattcgtttgcctcagaagttgcactatggaccacggtgatcaaccctttcaccaaatttgccttgttgttaaacccattagctcggagtttagaagagttgcgtcctgaaggttttatgaacgaaacatcatgcgctattatactgaggactgcccttcttgcatcaactgtatgcattgcctttcttctgccgttctttggtcttgtgatgtctctcattggatctcttcttagtatacttgtggcagtcataatgccacccttgtgtttcctgaagatcgcgcagaacaaagcaacttgtgcacaggtaatcgcaagcatttgtatcgtaatgttgggcgtcatcagtgctgccctggggacatactcctccgtgaaaaagattgtagaaaactactaagctcttcgacaataattgcctgcctgcaccagactccacgtatggaactcgaaatggtcaggttttactgtacgaccaaatttttactagaactaccggatttcctgtacattattgctgctgttattattcggaccacactagcctactaaaaaggaacacttccaataatgtaatcttgcgcacctttacctgagttctttatcatttagttgtactgtagcaagttcctgtgctgccgattgttcctaggataagcttctgccttttacagttgaggcatctatatatacggcgacgactactgtacaatcagagtacaccttatgtacagtcaggatcagctagcactatattcttagaacttggtcgagtgcagcgaggatgcatgttcgttggccttttatggtgccaccatggtcgaagccatagcctgagcatgataatggcgccatgcactgttgtcttgtatcatatgcgctgttctatctcaagttctttttgaaggaagcaggcttgatttgtttgtagtgtg

SEQ ID NO: 120083 - DNA, 2028 bp, Zea Mays
ggagcgatcggcagggcgcgcctctggccgctttgtcgcgacgcgcgttcgctccaatcctgtcgcggccattaaaagccttcccggctttcccgctcagctcgtctcttccagaaacgtacctcgtcatctcttcgccttcgctacgcaattccgatccacgctgcgggccacttgtgacgactggcggaacccgcgagaaacagaggcgggcgagcggcgatcggagatggcgccggagaagccccggaaggaacaggaggaggagttgatgctggaggatggaggcatcgaggagagcccgcgccgcagcttcgaggactgcggcgactccgaggaggaccgcggggagggcgatgacgaggaggagcgggacagcgaccgcgacggcgtcggttcgacgcgctccttcctgccccaaaagtggccgcagagctacagggaaacaactgacacctacacaatcgctgcatcaccgagctttggttacttaggttcttctacaagcaaatactcgctcctcgaccttggtcgcagtattctgggctctgacctgaagtcacctctaatatcggccaaggctgattctgtcagaaacttgccgaaaacccttggttcaatgagagatgggagagtctcgtttcaattgcaacacacgggagaaatctacattagtcaagggtgcaatgtgacgcaaacagtcttcaacgggattaatgtgcttgctggtgttggccttctttccactccgtttacaattcatgaagctggatggactggccttgcagttctagcatgctttgcgattgtttgctgttatactggaattcttctaaaacattgttttgagagcaaagatggtatctcaagttatccagacattggagaggctgcatttggaagaattggccgtgtgttgatatcttcatactgtgtggaattcatcattttggagggtgataacctcacatcaatttttcctaaagctggttttgattggcttgggattcatgttgatggaaaacattttttcggagtgttaactgctattttagtcttgccaacagtatggctgcgagatcttcgagtactctcgtacctttcagcgggtggtgtgattgcaactcttctcgtattcctgtccgttggtttagtcggtgttaccgatggtataggcttccattcaactgggaaggcagtaaactggagtggcatgccttttgccattggtatttatggattttgctactccgggcattcggtatttccaaatatctaccagtcaatgtccgatagatctaagttccctaaggcactgttcatatgtttcgcaatttgcacagcaatatatggctcttttgctgtcattggctttctcatgtttggaaagaacactttatcacaaatcactttaaaccttccaaagcattcgtttgcctcagaagttgcactatggaccacggtgatcaaccctttcaccaaatttgccttgttgttaaacccattagctcggagtttagaagagttgcgtcctgaaggttttatgaacgaaacatcatgcgctattatactgaggactgcccttcttgcatcaactgtatgcattgcctttcttctgccgttctttggtcttgtgatgtctctcattggatctcttcttagtatacttgtggcagtcataatgccacccttgtgtttcctgaagatcgcgcagaacaaagcaacttgtgcacaggtaatcgcaagcatttgtatcgtaatgttgggcgtcatcagtgctgccctggggacatactcctccgtgaaaaagattgtagaaaactactaagctcttcgacaataattgcctgcctgcaccagactccacgtatggaactcgaaatgttgaggcatctatatatacggcgacgactactgtacaatcagagtacaccttatgtacagtcaggatcagctagcactatattcttagaacttggtcgagtgcagcgaggatgcatgttcgttggccttttatggtgccaccat

SEQ ID NO: 120084 - DNA, 1436 bp, Zea Mays
gctcgcagcagcggagggagacctcggcgaagcggtgcgcctcgtccattggccagtcgtggacggccgggtcgaggaggtcggcgaaggtgccgcgctccagggcgcgcccgacgtggtgcgtcagccccatgggggaacgcgccgtgaccagctgcagcagcatcacgcccagcgagtacacgtccgacttcacccccagcatgcccgtctgctggtactccgggtcgatgtagcagaaggtgcccgccgccgacgtcatgtggcactgcgtcacgttgtccgccaccgacgccggcaccaggcgcgccagcccgacgtcgctgatcttgctcacgtagttgcggtccaggaggatgttgcccggcttgaggtcgcggtgcaccagcggctccggcttggcctggtgcaggaacaggaggcccgtcgcgatctccgccgcgatgcggaaccggtgctgccacgggagcaccggcccgccgccgccgcggtggaacaggcagtcgtccaggctgccgttggccatgtactcgtacacgaggcagccgtactcggggcaggcgcccaggaggagcaccatgttggggtggcggatgcagctcagcacctccacctcctgctggaactgcgaccgcccctgcgccgcgtcggggcggagcaccttgatggccaccggcgtgtggtccaggtggcccttgtacacggggccgtacccgccctcgcccaccttgcgggcctcgttgaagcggtcggtgccgatctcgatctcctcgatggtgtacctgcggtaccggaccgccgactcgcgcgccccggcggccatggaccggagccgctcctcggcctccttgagcgccttcatctccgcgctgatccgcttctgcgcctccaggtccgccagccgctgcgacgcctcggccgcctcgatggccgccctcgccttggccttctcctgctcgatgagcgccatggccgactcctccgtcagccgcgtctcctgcgaccgctgctcctcgtccatcttccagcgctgcagctccagcgccttctgcttcgcgctcagcgcctccttgcacgccgtgctgtacatgtccatggtctgcttcagctccagccgcagccgcttcatctccgcctccatctcgtccggaggctgcgagcaccaggaggaggtgctggtctgggagtgcgacgtgctgtcgttgccgaacgagtcgccccaccggctgggcgtgcgcgacgcctcgaagctgtgctgctgctgctggtccacgccgtccgacccgctggacagccgcggcgggtaccgctccgtgctcctgcggggggcggacccgatgaacgatatgtccgacgactccggcagcgagaagtccgggaacgccttccgcgccgacccggcgctgtgccccgtcgtcctcgcgaacggcgacctg

SEQ ID NO: 120085 - DNA, 692 bp, Zea Mays
tgctcagctcgagtataaaaggacgtaccattaccagcttttctttcttacacacagctagacacgacaccagtagtcttagctccaacctccagtagctaaacgaccatggagtactgctgcacctcaagaagccgccggctctcgtactgcctcctcctgctggtcctggtgtgcgccgccgtcctcccagtgccgccagcggcggacgcggcgggcgtgccccgccggctgctgcagactagtacgtgcacggggcaggacttcgacgtgccccacgcgcacctgcgcgcgcgggacaacgtgaggccgctcaagtacacggaggcgctgtcggcgcgggcggcgcagtgggcgcagcggttcaagggcgactgcgcggccgcggggcccgcgccgggcgtcaacgtgttcctgggcgcggcgggggcggcggcggcgtggctgcccagcgacgccgtcgcggcgtgggcggaggaggagcagcactacgactacggctccaactcctgctccgccggccacaacgcgtgcgggcgctacacgcagatgatgtggcgggacaccagggagttcggctgcgccgtcgtgctgtgcgactccggggacacgctcatggcgtgccactacgagccaaagggcaacgtcgcggggcagaggccgttctgatcgtgccggagcggagctaccat

SEQ ID NO: 120086 - DNA, 105 bp, Zea Mays
ttgtgcttaagaactgctgatgcagacataaggttagggcaaggattttggttaattggaataaggcagcgctttaaccttagttcctcagtttcagctttaaca

SEQ ID NO: 120087 - DNA, 102 bp, Zea Mays
tttttgtacttgacacattttttggattcttatgtgctttattgcagttagtcttcccacatgtagtcatggaaggctaccagattttgatgtgcattttgt

SEQ ID NO: 120088 - DNA, 560 bp, Zea Mays
gaggatctatggatatctgctttcctgttggtactaaggaagccaacaggaaattttggactgctacttggattaatgctcgagaaaaaaggtgcatgacatcaatattgatattctatttgttctatagaaccttatgtggaaacatgcattacacagtcccagcctcctagagactatatacatggtatgcagtccctagggaccgagcctcagagctagaggaagttattcgtgtacatggatatggaggaaaccctgaccgccttgcatcgctggcagtgcttggggagaagacaacattgatgtctccagatgttcttgtagcccgtggtgtgcctgctgtaggttagtacagtatcctggagagtttgtggtgacattcccaagggcataccacattgggtttagtcatgggcgtccacaggctacgccatgcctccacctccgtagatcacgcctaccctgccccgcccgcgacagcctgcaagcattaatgaagttgtctgttttgcaataactatgtggagcggtttgatcatcactgtccatgggtcggt

SEQ ID NO: 120089 - DNA, 333 bp, Zea Mays
atggcgcggaagagcggaagcgatttgccgacgacagcgatgcagcagcaggttagagcgacgctattggtgtcgggagcaatggcgggcagggggcaaggcgtcgagcggtgggggagagagacggccaccaaggcatgggattatgggaaggagactgggagagggatctggaagcttcggggccaatcccagcaagcaaaatggacgagggaaagggaagagagctcttcgggaaggggaatgtggaggggacgacgaaccctagcaaggaaaacgaatgggggggaaggggaagagccgtcacgcttaccgggactgttggagcactag

SEQ ID NO: 120090 - DNA, 345 bp, Zea Mays
aaaatggagggagggagggaaagcgaggtcaggaggggggctcacgagaaaacactcgaactggtcctcgaggtcctccagcgcggcgcggatggcgtgcaggctcctgtcctcctcagccagggccgccagggcgacgacctcgtctccgccgcgcgcgccgagacccagacccctgcccttgacgtgcacgaggccgggggcggatgcggaggcggaggcgcggcggcggacagcgcgcaggaagtgggcgcgggagagggcgtggatggcatcgctgaccttgtcgtggaggtcccagatggtctccagcagcacgacctcctcttcttatttaccgtttaa

SEQ ID NO: 120091 - DNA, 429 bp, Zea Mays
atggctgactacatgcttccatgcaccggcccacatggcacatgcctgctgctgccgctgccctctgtctcgcgaacacaggcgtacaggacacgtccaggcatgatgaagatgaacaaaattacaggtcatgccaaccatggagcggtgccaagcaagtgtcatgccaagaaagtgccaaccatcaaggcatggactgctgattgtttttggcgactcatgatgcctgtatctgatacctgtgctgaaaaggtcttatacatgttgagtatacgcaaacttgcacaacgagagggtgtgaccacgaacaacgagcttgcacatgctaccagccatggaaaagaagcaccgaaactggcatatggcctgcagtccagcgttgcagtgcctgaaccaaataccatgcttcgtgctatctctcctgcttaa

SEQ ID NO: 120092 - DNA, 1723 bp, Zea Mays
acacggtgtacaaaggtcccttggtcaagtgtaaagaaagaacaccgataaaacgccgtcgaactactccggacgggaagcacctccaatcccctcgcccccacggaccctcgccgccggggaagcgccgctcgctcaggaggacagccatggcgccggagccggaggatgatattatgaacgagaagaatccccgcccgctcgacgaggacgacatcgcgctcctcaaaacctatgggcttgggccgtactcgactagcattaagaaggtcgagaaggagatcaaggaaatggccaagaaaatcaatgacctttgtggtataaaggagtctgatacagggttggctccacctagccagtgggatttggtttcagataaacagatgatgcaagaagaacaaccgttacaagtggcaaggtgtacaaagatcataagccctaatacggatgatgccaaatatgttataaatgtaaaacaaatcgcaaaatttgttgttggactgggggataaagtgtctccaactgacatcgaggaagggatgagggtcggtgttgatcgcaacaagtaccagattcaaatccctcttccaccaaaaattgacccaagtgttaccatgatgaccgtggaggaaaagccagatgtgacgtacaatgatgttggtggctgcaaggagcagattgagaaaatgcgtgaagttgttgaacttcctatgcttcacccagaaaagtttgtcaagcttggtattgatcctccaaaaggcgtcctttgctatggcccacctggcactggcaagacacttcttgcaagagctgtagcaaatcggactgatgcttgtttcatccgtgtaattggaagtgagttagttcagaagtatgtcggcgaaggtgctcggatggtcagggaacttttccagatggcccgctcaaagaaagcgtgcattgtattcttcgatgaagttgatgctattggtggtgctcgttttgatgatggggtgggtggcgacaatgaggtgcagcgtacaatgttggaaatagtaaaccagcttgatgggtttgatgcaagagggaacatcaaagttctcatggccactaataggcctgatacattggatcctgcacttctgcgtcctggtcgtctggacagaaaggtagaattcgggctacctgacctggagggccgtacccaaatctttaagatccatacacgcaccatgaactgcgagcgagatattcgtttcgagcttctggcacggctctgccccaactctactggagcggatataaggagcgtctgcacagaagccgggatgtatgccattcgtgcccgcaggaaaacggtgacagagaaggattttctcgatgctgtcaataaggtcatcaagggctaccagaaattcagtgcaacacccaagtatatggtgtacaactagagagtgtcttcatggaatatgttgattttagaactccgggatcttttcggtgattgtgtcatcgtgaggttctatgcaaggattgttgtttgttttgaaatctggatccccagggattgcatcctgtaccacatgtttttaagacaaggttatccgcttggtggttcactgtacctgtggcaattgttgccgacaccgaactgaacataaagtcagaaacaggctacagtgagtgttgaaaaggaagaaatacagtgggtgcctgtttaaatatagcgttgtattactgactg

SEQ ID NO: 120093 - DNA, 132 bp, Zea Mays
atggcagtccatgaatcaagagatcacatgctgcaaggtttgttagagcagcaggtggaaaagaacaaagtcatatatgaggatgtctccatggagagaggagcttttctggtgcagcaagccatggggtaa

SEQ ID NO: 120094 - DNA, 2827 bp, Zea Mays
cgcgcgccacttcgtcacggcccaaagaccagccgccgccggcagaaccccacgccgctcaatccagcctccgcctcgccgccgccgccgcctgtgctgctccgggcgcgccgcgtccatcagccatgctcgccctcgcccgcgcgctccggagccttggccaggcgggggccaggcgggagggccccctcctcgcctggctctcttccttgaggtcggccgccttctcctcctcatccgcgccgccggagtacgacatgccgtcggtgacatggggcgtaatacaggggcgcaaggagcgtctcgtctcgcgcgtgttggcgctcgacttcctccgctccgcgggcgtctccgaccccgccggggagctcgaggcggtcgagctcccctcgtccctcgaggtgctccaggagcgcctcgacttcctcctccgcctcggcctctccaccgacgacctctccaactacccgctattactggcctgctccctcaggaagaacgtcatccccgtcctctcctacctcgagaagctcggcgtcacgcgcgcccgcctggccgcctttgtccgcgcctacccggcctgcctccacgcctctgtcgccgtcgacctcgctcccatggtcaaggcgctccgtggcctggacgtcgaccgccaggacctcccccgcgtcctcgagcggtaccccgacgtcctgggactcaagcccgacggcacaatcagcacctccgtcgcctaccttgtcggcatcgtcggcgtggcgccacgagacatcggtcccatggtaacgcacttccctttcttccttggcatgagggttggcactaccatcaagccgttctgcgactacatcacctccctcgggctgcccatgcggatcctggcgaggatcctagagaagcgaccttacattctcggctatgatcttgaggaaacggtcaaaccaaacgtggaggcattgctcagctttggcattcagaaggaggccctgccgttggtgattgcacagtacccatctatactcgggctgccactgaaagcgaagctagcggcacaacagtacttcttcaccttgaagctccagatcgacccagatgggttcgcacgtgtgattgagaagttgccacagcttgtaagcttaaatcagaatgtgatcttgaagcctgtggagttcctccgtggacgagggatctccaatgaggatgttgctcggatggtggtccgctgtcctcagattctactgctgcggatcgagctcatgaagaacagtttgtacttcttcaagagtgagatgaagagaccaatgagtgaattgttagaatacccagaatattttacttacagcttggagtcaagaatcaagcctaggtatatgagagttacaagtcgggggattaagtgtagcttggattggttcttgaactgcagtgatatgaggtttgaggacaggatgcaaggggattttatagaaggggatgcaccaggtccttcgtttacgatgggtgggaagcttcagatgccaggcagccagctagtgtcagatgatgacgaggatactgatgatgaggtgctatataggaggacggtcatgatctaatttggtggaagataatcccaatggtctttcatgacatgtttccctgcagtatcatataaacaagtaagtactggtttagtaatttgctttttttcttgaacatgtcaaaggatatctattctagttctgaacttctgatagttagggcttgtttgttttagttctggattcttaaaagctaattataggttgtagggtataaagggtcggacccttaaaagctgtaagccgaatgatgtagcttgtggattgtggtgtagaaaggagtttgattgaacccatttgttttagctttagcgtttgaaaccagaatccacaaaccaaagctaaaacaatcaggcccttacagcaggagaaatttacaggcaaactataaggtagagtggctccatagtagagaattatattattaaggggcaataagctgtcgttagaaatgtatagaataacaatgtttgcaaccctgttatttcgaaatggtgcactgacatgaaagtttactacacatttcattaggcatgtgagagcagagaagatgtcgaaactaagtgtataatgtcaacacccttgtggcagtttttgtactgttcaacaggatatagtctggggttttaatcataaattaaataactgtacaggattttgaagttgattctaattggttgcctagtttttcaaggtttaaagtttatactattactatcagccaattgtatagtagtttgttttcatttaaagtataaatacgttgactatgtaggtatcctcacatgctaggtgataagacaccagaatatgattgatgagtgttctcttggcaccagccgcagtagtttgagtgctgccctagcaaaaactcggaggcattgataacgactctgatggtactcgggcacgacctttgatcatgtgccccaaagatggaagtgggaggtccattgacaacctaagcagggaagagtttgtagtaaaacggatatgacgtgctgccaaaaatctccttccagctaaacagtcgattctttcattgattaattaatgctactctaaggcaggtcagggggtgatcatacaataggatcagatatttgtagcatgtgactatctactatttgtaactgaaatgtcccacctactttttccctattgaaatagaacctcatgtacagctcgagtgtgttccatgaaaccatcttgacgtagccaattaattaatatgatcatgattttct

SEQ ID NO: 120095 - DNA, 2130 bp, Zea Mays
cgcgcgccacttcgtcacggcccaaagaccagccgccgccggcagaaccccacgccgctcaatccagcctccgcctcgccgccgccgccgcctgtgctgctccgggcgcgccgcgtccatcagccatgctcgccctcgcccgcgcgctccggagccttggccaggcgggggccaggcgggagggccccctcctcgcctggctctcttccttgaggtcggccgccttctcctcctcatccgcgccgccggagtacgacatgccgtcggtgacatggggcgtaatacaggggcgcaaggagcgtctcgtctcgcgcgtgttggcgctcgacttcctccgctccgcgggcgtctccgaccccgccggggagctcgaggcggtcgagctcccctcgtccctcgaggtgctccaggagcgcctcgacttcctcctccgcctcggcctctccaccgacgacctctccaactacccgctattactggcctgctccctcaggaagaacgtcatccccgtcctctcctacctcgagaagctcggcgtcacgcgcgcccgcctggccgcctttgtccgcgcctacccggcctgcctccacgcctctgtcgccgtcgacctcgctcccatggtcaaggcgctccgtggcctggacgtcgaccgccaggacctcccccgcgtcctcgagcggtaccccgacgtcctgggactcaagcccgacggcacaatcagcacctccgtcgcctaccttgtcggcatcgtcggcgtggcgccacgagacatcggtcccatggtaacgcacttccctttcttccttggcatgagggttggcactaccatcaagccgttctgcgactacatcacctccctcgggctgcccatgcggatcctggcgaggatcctagagaagcgaccttacattctcggctatgatcttgaggaaacggtcaaaccaaacgtggaggcattgctcagctttggcattcagaaggaggccctgccgttggtgattgcacagtacccatctatactcgggctgccactgaaagcgaagctagcggcacaacagtacttcttcaccttgaagctccagatcgacccagatgggttcgcacgtgtgattgagaagttgccacagcttgtaagcttaaatcagaatgtgatcttgaagcctgtggagttcctccgtggacgagggatctccaatgaggatgttgctcggatggtggtccgctgtcctcagattctactgctgcggatcgagctcatgaagaacagtttgtacttcttcaagagtgagatgaagagaccaatgagtgaattgttagaatacccagaatattttacttacagcttggagtcaagaatcaagcctaggtatatgagagttacaagtcgggggattaagtgtagcttggattggttcttgaactgcagtgatatgaggtttgaggacaggatgcaaggggattttatagaaggggatgcaccaggtccttcgtttacgatgggtgggaagcttcagatgccaggcagccagctagtgtcagatgatgacgaggatactgatgatgaggtgctatataggaggacggtcatgatctaatttggtggaagataatcccaatggtctttcatgacatgtttccctgcagtatcatataaacaagtatcctcacatgctaggtgataagacaccagaatatgattgatgagtgttctcttggcaccagccgcagtagtttgagtgctgccctagcaaaaactcggaggcattgataacgactctgatggtactcgggcacgacctttgatcatgtgccccaaagatggaagtgggaggtccattgacaacctaagcagggaagagtttgtagtaaaacggatatgacgtgctgccaaaaatctccttccagctaaacagtcgattctttcattgattaattaatgctactctaaggcaggtcagggggtgatcatacaataggatcagatatttgtagcatgtgactatctactatttgtaactgaaatgtcccacctactttttccctattgaaatagaacctcatgtacagctcgagtgtgttccatgaaaccatcttgacgtagccaattaattaatatgatcatgattttct

SEQ ID NO: 120096 - DNA, 1637 bp, Zea Mays
tccccccccccacccccacgcgcctggccgcctgcagactgtgccagtggcggccagccaatatatagggcccacgccccgtccgcgctctccaaagtttcgtccaccatttcgctctcgcaagtcgcaagccaccgatttgtttacaggcgccggagctcccgacgacgactgagccatgtgcggcggcgcgatccttgccgagctccgcgagccggcgccgcgccggctcacggagcgggacatctggcagcagaagaagaagcccaagaggggcggcgccggcgggaggcgctcgttcgcggcggaagacgatgaggacttcgaggccgacttcgaggactttgaagccgactccggtgattcggatttggagctcggggaaggggctgacgacgacgtcatcgagatcaagcccttcgccgccaagagtactttctccagagatggcttaagcaccatgactactgctggttatgatgcccctgcagcaaggttggccaaaaggaagaggaagaatcaatacaggggtatccgccagcgcccttggggtaagtgggctgctgagatcagagatccccagaagggcgttcgtgtttggcttggtactttcaatagtccggaggaagctgcaagagcttatgatgctgaagcgcgcaggattcgtggcaagaaggccaaggttaactttcctgatgcaccagcagttggtcagaagtgccgttctagttcagcttctgctaaagcactcaagtcatgtgttgaacagaagccaattgtcaaaacagatatgaacatccttgccaacacaaatgcacccttctaccaatctgttaactacgcatccaacaatccatttgttccagcaatgaactctactgtttcttttgaggatcctatcatgaatctgcactctgaccagggaagtaactcccttggctgctcagacttgggctgggagaatgatactaagacaccagacatcacatccattgctcccattcccactattgctgaaggcgatgagtctgtatttgtcaactccaattcaaacagctcgatggtgcctcctgtcctggagaacaatgctgttgatctcactgatgggctgacagatttggaatcctatatgaggtttcttatggatggcggtgcaagtgattcaattgatagccttctgaaccttgatggatcacaggatcttggtagcaatatggacctctggaccttcgatgacatgcccatcgctggcgatttcttctgaggaatttgaagcttggccataggactatgtacatagggactagggaataaagactgggagattgggaagcacctgcttggcaccttggggtagcatatgctcgtgtctagctcagatgcagaagtcgcattctgaaactctttggttatcgacctgttccctattttaactatctctgtatgagagccatttatgagactgaaccattttaccattttgttttcccccttctttcgttgttacagtatatggtttaacattatgatttatggatatgtggccaaacatgccttttatatgcgctttgtgcttggttgaaattgagttaactagttatctgctgaagcttttgctaaatattcaagatttcatc

SEQ ID NO: 120097 - DNA, 703 bp, Zea Mays
atgggccacaccctgctgtcgctctcgctcgcaggccacctcgtgtcaccgtggtgtgggtcccaagcgccagtcccacgaccgattcttcctataccgcttgaacacccgctgagccatggacccaagtcgttgtttctcttctctgctccgcagaaagcaccggccagcgtacaatgttgtcgcgtcctcgcgggcgccagctggccatccttaggttgttgcagttcgaccatcgatataaatccaaggccctgcgtccgccatgtctatctacttgtggcggtgaacgcagatcttgggatcggggggatggggcgagtattcgccgccgtagatcccaatgtcagccgtcgtaatccaaactcctctgcgcatatgtaccggccacggtttccccatggtgtcggtgcccagacccctgagtctcattaccaagagggggagctctgtcgccaggagagggagagaacgtcgtcaagtatggcagtgggagaagctgtcggcgtctttcgcgtatgccgtcgtcgagccctcgatgatcgctctatggggttcgcgaggatccagggaaggcattcatgaactaaccagtgccgggcatcatgcctagaccgaccaattgctcgccggaggacaacttccgctgtggtgcgtggtcgcgatgttctgcgtcataattacaggtaagaagctatccgaa

SEQ ID NO: 120098 - DNA, 154 bp, Zea Mays
ttttcgtgttcctcacagaggagttcttctttcttgccaagccggcaataagtctggggttcgatgtcaacaactccctattacaaggtatttatacctgctgtccttctctcccttttacttaagctaaacaccctctctgatacgaaatcac

SEQ ID NO: 120099 - DNA, 1059 bp, Zea Mays
ctggaggcttcctgcgtcgcgtggaggcagacagagctcagggagggagggaggggaagaacgaagcagcagcaacagcgccatccgctcgcttccttccccttctctccctcctcccccaccgccggcgtcgcctctacgcgcgcgcgccccgccgggggctgccgtcgctgcacccgtggcccgtgggcggcggccgcgtacctgtacctacgtgctgccgggggggggggggggggggggagctacgcgtctcctctcgccatggacgccggtgtagagaagtgcggcgacgcggcggcggagggcggcggcgacctctacgctgtcctcgggctcaagaaggagtgctccgacgccgacctcaaggtcgcttaccggaagctcgccaagaaatggcacccggacaaatgctcctcctcctccatcagcgtgaagcacatggaggaagccaaggagaagttccaagagatccagggcgcctattcggtactctccgacgccaataaacggctcctctacgatgtgggagtatatgatgacgaggacgacgaggatagcatgcaggggatgggggacttcattggtgagatgacccagatgatgagccaggtgcggccgatgaggcaggaaagctttgaggagctgcagcagctttttgtcgacatgttccagtctgatattgattcaggattctgcaatgggactgctaagggccatcaggttcaggggcaagccaaaagtagaacatgctcaccacggtcccctcctactactatagtaaaggaggcagaggtgtcatcatgtaatggcttcaataagcggggttcatcagcaatggactcaggaaagcctccaaggcctgttgaatgtggtgcaggtcagagccaggctggattttgttttgggcttgcttctgacgaacggtcatgcaattgaccaaacatgtaccataagcaaatgtgatgtaggagattgttatgtaaagagacttttgtggccactttgatgttttgttttatgcgtaccttttttgaaaaaaaaaatgattgtggtgct

SEQ ID NO: 120100 - DNA, 2417 bp, Zea Mays
agtttcgactttcgattcccctcgccctcgccgacggccagacgccgaacgtctcgccctctcccgacgctccccgcctcccccttgatccgccgagcgcggcggccgccgccgccgccgaacccgatctccccccctcccgcgtgacaggcacggcctcccctcggttggaagggtttgctgtatcatgcattttttgtggataatcttcattttctcttgagtcaccgattcttttgttgtcttcaaaatgtcgggcttgctgaactcaaaccttaatagttcggcatcaaatctttcagactcagctggaaggccatttacagcatccttttcgggtcaatctggatcaattccaggttttcatcattctggcttgcataacactcatggaagttacaatcttccgagtatgcctggatcacttgcacaaaggaatgctgccatgagtggccttccgtcctctggggttcaacaacctggaggtagcattcctgggagattcccttcaaacaaccttccagttggcatgcctcagattcctcatgcacattcaggtgtcagtggtagagggatgaattttggcgcaggtccggcatttagtagcagcatgaatattggtggtaacatccaaggcttatcctcgggcttgggctccggtggtaatcgcaattctgttcatgggatgccagtatcttcatctataggaaactcgggtcaacggataagttctgtaggaaatatggtaagtgcaagcaatattggaagaaatataggcactggtggtttgtccgtgccaagtattgcatcacgaatcaatttgaatggtagtggtgggagtggtagtctgaatgtgcaaggatccagtcgaatgatgaatggattgcttcatcaacaagcaactcctcagttgataaatatgcttggaagttcatatccaacatctggaggttcattatcacagagccaaattcaagcaggaaataattcttttagttctatggggatgttgcatgatgccagtgacactgctccatttgacataaatgattttccccaattgtctggtcgacctagttctgctggtggtccgcaaggacaatatggatcactgcgcaagcaaggagttggtgttaatacccttgtgcaacaaaaccaggaattcagcattcaaaatgaagacttcccggctttgcctggatataaaggtaacccttcggattataatgctatagagttgcatcacaaggaacaactccacgataatgtacctgtaattcaagcacagcagtatcctatggcaaggtcaggcttaggaagtagctacctacccaatcgacaacaacaccagcaaggtgctaattcagtccagaatggcggatcccacaatattttactgagaccacccagtcaaacttctagtttgggatcatatgatccatttctgcagcaataccagcagcctcagcctcaaaatcatttcagattgcagcagatgtcttcagctgcacattcatatcgggatcagattcaaaagattcaggcgggaccgacaccacctgatccatatggcttgttaggatttttgggtgttataaggatgaatgatgctgatttagcatctcttgctttaggaatagatttgacagcattgggtttgaacttgaactcgccagataatctatacaagacatttggctcaccctggtcgaatgacccagcaaaaggagatactgattttcgaattccagcttgttacctctttgacaaaactcctccactacagaccttactttttcagaggtttcacatagtaacactatttttcgtcttctatagcatgccaaaagatgaagctcagctgtactctgccaatgaactgtataatcggggatggttttaccataaagaagtgcacttatggctcaccagaatttcaaatgtggaacctctagtaaaaactcacctctatgaacgtggatcttactattgctttgacccagaatcctgggacacaatacgcaaggacaactttgttctccactatgagatggtagagaaaaggccagttctgccttcaacatcaccaaaccttagatgaaaagaaaatctaggacggggagaggaacaaagaaacatataacgatctgcaggaaggactaaggaggcaggaagtcgcagaacagaattggggatgtccaattaacaccccttgtaattactaaaactgtgagcgaatgttgcgtttttcttgcactccccccttcgccctcctaattaaactgcctaatgttcaggattagtttttctccagcttcaaaataacaacgcatagatggttttgatgttctgtcctctgtccaaccatatcatgtcgatgctcagcgaaagataaaatcataccatgtcgatgatca

SEQ ID NO: 120101 - DNA, 1582 bp, Zea Mays
gtgtgctgtttattacgtatctgtttatcagagtgcatgtctcatccagcttttttaatctctgaaaccagcaactcctcagttgataaatatgcttggaagttcatatccaacatctggaggttcattatcacagagccaaattcaagcaggaaataattcttttagttctatggggatgttgcatgatgccagtgacactgctccatttgacataaatgattttccccaattgtctggtcgacctagttctgctggtggtccgcaaggacaatatggatcactgcgcaagcaaggagttggtgttaatacccttgtgcaacaaaaccaggaattcagcattcaaaatgaagacttcccggctttgcctggatataaaggtaacccttcggattataatgctatagagttgcatcacaaggaacaactccacgataatgtacctgtaattcaagcacagcagtatcctatggcaaggtcaggcttaggaagtagctacctacccaatcgacaacaacaccagcaaggtgctaattcagtccagaatggcggatcccacaatattttactgagaccacccagtcaaacttctagtttgggatcatatgatccatttctgcagcaataccagcagcctcagcctcaaaatcatttcagattgcagcagatgtcttcagctgcacattcatatcgggatcagattcaaaagattcaggcgggaccgacaccacctgatccatatggcttgttaggatttttgggtgttataaggatgaatgatgctgatttagcatctcttgctttaggaatagatttgacagcattgggtttgaacttgaactcgccagataatctatacaagacatttggctcaccctggtcgaatgacccagcaaaaggagatactgattttcgaattccagcttgttacctctttgacaaaactcctccactacagaccttactttttcagaggtttcacatagtaacactatttttcgtcttctatagcatgccaaaagatgaagctcagctgtactctgccaatgaactgtataatcggggatggttttaccataaagaagtgcacttatggctcaccagaatttcaaatgtggaacctctagtaaaaactcacctctatgaacgtggatcttactattgctttgacccagaatcctgggacacaatacgcaaggacaactttgttctccactatgagatggtagagaaaaggccagttctgccttcaacatcaccaaaccttagatgaaaagaaaatctaggacggggagaggaacaaagaaacatataacgatctgcaggaaggactaaggaggcaggaagtcgcagaacagaattggggatgtccaattaacaccccttgtaattactaaaactgtgagcgaatgttgcgtttttcttgcactccccccttcgccctcctaattaaactgcctaatgttcaggattagtttttctccagcttcaaaataacaacgcatagatggttttgatgttctgtcctctgtccaaccatatcatgtcgatgctcagcgaaagataaaatcataccatgtcg

SEQ ID NO: 120102 - DNA, 101 bp, Zea Mays
ttttataacaattaacaaccattgtgcgttgatccgatcgcgctggttgcaaataatggaaggaatcgaatcttcatgtctttcaattcactatactatag

SEQ ID NO: 120103 - DNA, 1049 bp, Zea Mays
agaatcgtggcgtctccctggggataaagtacttctccagctcctctgcgtcttccgccgctcttgctgtcctctgtgctatccgctagggtttatctgctcgaggaatggcgtcggtgcaggtctccggcgcgggggtcggtgccgcggccttctctgtgaaggggaaggcctccaccggtgcgctccggcttcgctctacgttgaccttcggcgaggtctgcccggcgcggcgggcgttccgcggcctcgtcgtcagggccgctaccgtcgtcgcccccaagtatacaacacttaagcccttggctgatagagtgcttgtaaagattaactcttccgaggagaagacaactggtggaatcttgctccctacgactgctcagtccagacctcaaggtggcgaggtagttgctgttggagaaggaaggataattggggataagaaagttgatgtcagcattcaggttggagctcaggttgtgtattctaagtacgctggaaccgaggtcgcgttgaacgatcacagccatctggttctcaaagaggatgacgttataggtatcttagaaactgatgacgtgaaagacatgaagcctctgaacgaccgtgttctaatcaaggtggttgctgaagctgaagacaaaactccaggaggcctactgcttacggaaactgccaaggagaagccatctatcggaacggtcgtagcggttggcccaggccccctggacgaggatggcgagaggctcgcgctgtccgtctccgcggggagcactgtcctgtactccaagtacgccggcagcgagttcaagggcgccgacggcacgaactacatcgtgctgagggcgtcggatctgatggccgttctctcctgaactgggcttgggctggaggacgaacgaggtgcaggtgcaggagcaggcttagcaataccgtaggattcctcgcggctttcccgtcccctcccccctcctacttggttgtcttgtttgactgtcttctgaggaaccgaacaacagtaataagcacaccgatgccgttcatacaga

SEQ ID NO: 120104 - DNA, 1048 bp, Zea Mays
agaatcgtggcgtctccctggggataaagtacttctccagctcctctgcgtcttccgccgctcttgctgtcctctgtgctatccgctagggtttatctgctcgaggaatggcgtcggtgcaggtctccggcgcgggggtcggtgccgcggccttctctgtgaaggggaaggcctccaccggtgcgctccggcttcgctctacgttgaccttcggcgaggtctgcccggcgcggcgggcgttccgcggcctcgtcgtcagggccgctaccgtcgtcgcccccaagtatacaacacttaagcccttggctgatagagtgcttgtaaagattaactcttccgaggagaagacaactggtggaatcttgctccctacgactgctcagtccagacctcaaggtggcgaggtagttgctgttggagaaggaaggataattggggataagaaagttgatgtcagcattcaggttggagctcaggttgtgtattctaagtacgctggaaccgaggtcgcgttgaacgatcacagccatctggttctcaaagaggatgacgttataggtatcttagaaactgatgacgtgaaagacatgaagcctctgaacgaccgtgttctaatcaaggttgctgaagctgaagacaaaactccaggaggcctactgcttacggaaactgccaaggagaagccatctatcggaacggtcgtagcggttggcccaggccccctggacgaggatggcgagaggctcgcgctgtccgtctccgcggggagcactgtcctgtactccaagtacgccggcagcgagttcaagggcgccgacggcacgaactacatcgtgctgagggcgtcggatctgatggccgttctctcctgaactgggcttgggctggaggacgaacgaggtgcaggtgcaggagcaggcttagcaataccgtaggattcctcgcggctttcccgtcccctcccccctcctacttggttgtcttgtttgactgtcttctgaggaaccgaacaacagtaataagcacaccgatgccgttcatacagatt

SEQ ID NO: 120105 - DNA, 529 bp, Zea Mays
ggtttacacagtctcgtcgtatttgtgcttgttccagtaaaagtatgcatcgctggtcaggttggctcacccttgtgtttgcatgacgtgtctcttctggtaggttgctgaagctgaagacaaaactccaggaggcctactgcttacggaaactgccaaggagaagccatctatcggaacggtcgtagcggttggcccaggccccctggacgaggatggcgagaggctcgcgctgtccgtctccgcggggagcactgtcctgtactccaagtacgccggcagcgagttcaagggcgccgacggcacgaactacatcgtgctgagggcgtcggatctgatggccgttctctcctgaactgggcttgggctggaggacgaacgaggtgcaggtgcaggagcaggcttagcaataccgtaggattcctcgcggctttcccgtcccctcccccctcctacttggttgtcttgtttgactgtcttctgaggaaccgaacaacagtaataagcacaccgatgccgttcatacaga

SEQ ID NO: 120106 - DNA, 501 bp, Zea Mays
atggcatccaagtctagggctagtgaaaccaatccttatccttgtcctaatcctaatcctaatactaacgttggtgcgtctggtggtgaactaggtgtgagtggtagtgtggctgctggtgaactggatgtggatgtgggtcgtgtggctgctggtgaaccaccacaaacaccatatgtcgtccatgggggtgaactgggtgatggtgattgtgcaccagcgtcggcgttatcaagcagtgcaaagtatagctcgagggcagactgctggaaacatatggtgaagaaggaagtcattgaggatggtgtagtatatttttttgctgtatgtaactattgcaaaagtgaattgagtgcaggttcagctgttggcacgagacatttgaatcggcactacaaagcgtgtttgacaaagctaggaaaaactcaaggaggaggtacgcaaaccaatcttaactttagtgctgatggtacaataagtacatgggtttacaacccatag

SEQ ID NO: 120107 - DNA, 1114 bp, Zea Mays
atgccatgcccgccgcgatcgacgtaggaggagagggaggtgttagcaggcttattcgatcggctcgcgccattgcaccgcagcagcgttcggcggcatgtcgtcgtcgccggagacagaggccgccgggagcagcagcagcagcaggaagttcaagggcgtgcggaagcgcaagtggggcaagtgggtgtctgagatccggctacccaacagccgcgagcgtatctggctgggctcctacgacgcccccgacaaggccgcgcgcgccttcgacgccgccttcgtctgcctccgcggccgcggcgccgccggcgcggacctcaacttcccggactcgccgccgccgtgccgcgcgggggggtgcagcagcgacccgcgggaggtgcaggcggccgcgctctcccacgccaaccgcgccgccgtcacggcccagcaggcggccgccgcgctcaccatggacggcggcggcgccgatggctcggcgccgccatgggactactactactactactccgtggcgcacgacgcgggcggcgtccttggtggcgctgcagctaccagcagcacggcggaggtggtggcgcccgtgcgcgccgacgggagcatcgactggcggcccgttatggcgcacccgccgccgctcttctcccctaccggctggggcagcaatgcgtacgacttcctgcaggtgccaccgccgccggcggctgtggccgacgaggacatgcttgatgacggtgtccatggcgcaaccgcttctctctggagcttcgactcgagagactcctacttcagatactagcaaaagcaggctacatcaataataataataaatccttcatgcatgctgatgctgtacaagatgcatggtggtgccatggcggcgcacgcacaggcacagctacctccatgcatcctgcattgctacacagccggccggcattattaattagatgcatgcatgcatgctcactactcaagtagatcatgtcgagcatatgtgatcattaaccctagctgtttaacggaattttgggggataacgaatggatatgcatgtaagtagaattcatcaagaatgagatagagcgtagaatatatgaaaaaagagaaa

SEQ ID NO: 120108 - DNA, 270 bp, Zea Mays
atgaggcccgtggacgttggcaaagagcggcgagacttggcgctggcgaactgggtggtgcccaagatccaggtcggcgagcacagggtggtcgtcgaccaccggtgctgcccaagatccagtttggctttgcagattgttctgtcagcaactcttggtataattgtttgcagtggcgatatcacaagctcttcatggattggtgatgatggtttgggttacatgtacctcatggatcactttttctgcacactttctcggaaggaataa

SEQ ID NO: 120109 - DNA, 117 bp, Zea Mays
gactcggcagcggtagaggggcttgaagcactacgaaactttgtcagtaattcagttaagctcgccaacaaacctaatccatgtatgtcaaacgaacaacacaagcaaaaaaaaaaa

SEQ ID NO: 120110 - DNA, 2089 bp, Zea Mays
catcccaccacctatcgcgtcggcttcactcaaacggcttctgccgcatcctataaaacctcctcaccaacctccgatggcggaaattcttgccctcccacaccgaccccctcccccacggcccgccttcccccgggagcacgagaccctcgttccctgcgccaccgactgagccaaggccgcgctttgccgtttccgacctaggtcgcgagatctcggaggagcggagccccgccgtgccgccgcctgctacaggggggcacgcagggaccgcacggcgcgatggtggacacgggcggggggaggctctaccagcgccgtggcgcggtcgctttcgtcgcggccaacaaggcgctgctcgccgctgcgtgggtcgtcgggttcgcgctcgtgttcctatggcagagcgcctccatgtccttcggcagcgccggcggcggagggtacctcaggctcctgtcggtgccgcctccgccgccgcgccccgcgccgcggctccgccccacggcgtacaacatcacggacttcggcgccgtcggggacggccgggcggtcaacaccgcggcgttcgagcgtgctgtcgaggccatcgcggcgctcgcggagcgaggcggcgggcagctcaatgtgccacccgggcgctggctcacggcacccttcaacctcaccagccacatgacgctgtttcttgccgagggcgcggaaatccttggcattacggatgagaagtactggccattgatgccagcattaccgtcatatgggtatgggcgggagcgcaaaggaccacgatttgggagcctcattcatggacagaatttgagagatgtagtcattacaggacataatgggagcataaatggccagggtgaagtttggtggatgaagcatcgcagaagaattctgaataacacaaggcctcctcttgtgcagctgatgtggtccaaggacattattgttgcaaacataacactgaggaactcacctttctggcacttgcatccttatgattgcacaaatgtgactgtttcgaatgttactatcatgtctcctgtttctggtgctccaaacacagatggcatagatccagattcttgtcaggatgtgcttattgagaattgctacatatcggttggcgatgatgcaatagctataaagagtggttgggatcagtatggtattgcatacggtcgtccatcttctgacattttaattcgcaatgtaaccgcccgttctcttgtgagtgctggaatttcaataggcagtgagatgtctggcggagttgcaaatgttactgtggagaatgtgcgcatctgggaatcaaggagaggtgtgaggataaagactgccacaggaagaggcggctacatccgtaacatctcataccgcaacataactttcgacaatgtccgtgctgggattgtgataaaggttgactacaacgagcacgctgatgatggatacgaccggactgccttcccagacatcacaagcatatcattcaagggaatccatgggcagggtgttcgggtgcctgtccgagctcatggcagcgacgtcatccccatcaaggacatcagcttccaggacatgtcggtaggcatcagctacaagaagaagcacatcttccagtgctcctacctcgaggggcgtgtcatcaggcctgtgttcccgaaaccatgtgagaacctggacgtctatgatgagcaagggcagcttgtgaagcgggcagtggccctaaacagcacagaacttgactacgatatatgaggtgcacatatcataccacagctttgatagttgtagtggaaattggtgctctctaccctcagaaatcaattttctccgattgtccatggctttttgggtctagaattgtagatagagaggagattctcctcttgataggtttgctgcttacagtggctgaatgtatctcaccggcgatttactgatttgtccatgaacatttgtaatcgccagaaccttcctggcgacaaatgtatgctgtcaatatattgtacacctgaagattgtattggagtatacacagtacatgatctctaaatatctgccagcagatttttct

SEQ ID NO: 120111 - DNA, 282 bp, Zea Mays
atggggattgaggttgtcatcaaggcggcggagatcgaggataccattgctcccaaagttccagcgctacgcccatggttcagtgttttgcaggtggcgccgacgcaggaaggtacgctgctagacccgcctagctccgggaaccttttcgcgacggactcgactgcacttgtcgggctccaacccgtggcgtggaatgcgcgaggggaagcttccaccccggcggcgcgggagggagagagagtgacgtatcgcgaactccaagaggaactccacatttag

SEQ ID NO: 120112 - DNA, 540 bp, Zea Mays
atgcccgcgatcccaacggcccccgccccctgccccgtgcgcttcctcctcgcccgccgccacagcctccacgtctcctacccgtcgccttgctctaaccaccagcggctcccaccccgcctcctgcgcctgcccgctcgcccccgggccgctcccatgtcgaccgtggcgcgggcacccgcgtctccagtggcgccgccggcgcaccccacctacgacctcagggccgtcatcgcgctcgccctcacagaggacgccggcgaccgaggggacataactcctccaactgggattaggcaggctatggagatgcaggctgaagtagaaaggagaaaatgcgctcaagtccttgaatcagaagggaagaaacaagcccaaatccttgaattagaagggaagaaaactgcccagatctttgaatctgaagatgaggatataatcttatactgccagtctgttggaagtggtccaaccattgatcttgcttcacaattgccagacttgcgagccgtggttttgcaactattttatctggactaa

SEQ ID NO: 120113 - DNA, 2952 bp, Zea Mays
gaggaggccatcgcatccgccggctggtcctgatcccggtcccgggtcgtatttgggcgccgccgcacgcagcaggaggaagacatcagcgcggggcatttaggatggtggacaagaatgatgggtcagagggtattaaattcaacacatcaaacctcattcaaacaaccgaagaggttgcaagagcgtttatcgctgcggcctcggctgccactgcacagtctgcacggacatctgtagtgtattcatccaaagatgagagtggcagcccaatgcagaagcttcagcagcatttttcgaaaatcatgaaagggttttcgtccgcaccagacctgtcaggaacttacaatccggaagtccttacaacgcaaaagcggcagtggtcgaggtaccagatgaagtcattgggtgataggtgcatcagagaaccatcacatctgttcgagagcatagtgattgttgggcttccacctcacgcagatatccaggagctggaaaacattgcattagggagaaatgatgaagatggaaaaagatcaaaaaatttatttggcaatagtcaccaccaagttcacgcaataacaaatttggaaccacaggttctttttgcataccctccagagaagcctcttccactcaagtacaaggataccctctctttctgccttcccggaggtgtacaggttcatgctgtcgaacgtactccttcgttcagtgagctgaatgaaattctcctgggacaggaacagcttaaagaaagcaaccaatcatttgtgttccgcctacaggtggctgataactctgcattatatggatgctgtgtgcttgttgaagagatcgtacagagaccatcaaagttggtatcgatgctcatgaatgaaaaacccgtctttccacgccggagtcgatatgtgataactacgccccggtgttattgcatcctatccaggcttccattctttgaactacattttggggtgttgcagagtattcttatggaagaacgtcttgaatggctcacagatggtgttagcatgctaacttccttatcgcttgaggaatcctgtgagaacgatatctgtgaaggaactgcagttacagcacagaaacattatttagatagcaacacaactgatgtggataaatcatctgaatctagcaatggagtttcgtcaacggagctgtctgatactgacagcagttctgggtgtagagaaaaccagcttgactttgtttctaaagaacaacagcaaaatagttcttgtgaagaacagagtaattttaaaagagaaatagtcacttgttctgatgcttccgaagtgtctgatcattttgttccagaagatacatcatctgatcagtctggagttaagcaccatgaacttcattctgcaccaagtatcccggatgaatctggtgcaaggaactgtgatgattccccgaaggaaaatgtggatgatgaggagcttgatctcttcattatagatactattttaccacttatgcgatctcgcctttgtgaagattgtgaatcatctccaagttcacagggttctccttctgaaggcagaaattttgacacccaagaatcggattcagaggagccatcttccattggtgatggagacttagttaaacacaacaacatactgcagtgggctaaggcaaaaaaatatggttctttgcaagttgtctgtcaatactaccagttacagtgtcctgctaggggttcaacacttgcttttcatcccttggagcatttgcattctttgagttttcaccggcctggtgaaacagttcttcacattgctggttctactattgagcttaggtcacgtgatacaagcttagaggttgctgagatgcgcaatgcactctttgctgaggaggaatcgactgctttgtccacatgggcagtggcatccatttgtggatgcctcaggttggaacatgtaatgacactttttgctgccgcactcctggagaaacagattgttattgtctgttctaatctgggaatgttatcggcttcagttttgtccatcttacctctaatacgaccgtatcagtggcagagtctcctcatgacggttttgcctaatgacatgatggattttctggatgccccagttccatacatagtgggcgtacaaaacaagacatctgatgtgctcaaccggctaacaaatgccgtagtcattgatgccaacaggaatcagattaagtcctcttcagtcccacaactaccacagcacagagagttgctttctgccttgcgcccgtatcattcaatacttgttggcgaaagttatcttgcaagaaaacgccctgtttatgaatgcacagatgcccaggtggaaggggctaaaggtttcttggcagtgcttagagactaccttgacacactatgctcgaacttgagatctcatacaattaccaatgtgcaatctaacaatgacaaggtttccttacttttaaaagagagctttattggttctttcccaagccgggataggccttttatgaagctttttgtggacacccagttgttctcagtacatacagacctagttctctctttttatcagaaggactaagtgtctggcagacttgaatgtctgcctcgtcttgccaagctcagtgtttgtgcaaagagctcgaaggagaagccatataccgtcagaaaaaagtggtagattgccaggatccagttatgggtattgaagaagaatgcttgtagctgcttaagttagtctggtgcggtaatccaaggttttgttggctgtagttggtgcccccataagaagccttgtatggattgttcctgcaaatgcctgtgctgtaacggaaccgtgtctgtggcaaaatctccgaacatgaatgcgtccatttggcaaatctaagcgtgcaatgggacatcgaagaaaatgtaataattcgtggtactccctc

SEQ ID NO: 120114 - DNA, 3023 bp, Zea Mays
gaggaggccatcgcatccgccggctggtcctgatcccggtcccgggtcgtatttgggcgccgccgcacgcagcaggaggaagacatcagcgcggggcatttaggatggtggacaagaatgatgggtcagagggtattaaattcaacacatcaaacctcattcaaacaaccgaagaggttgcaagagcgtttatcgctgcggcctcggctgccactgcacagtctgcacggacatctgtagtgtattcatccaaagatgagagtggcagcccaatgcagaagcttcagcagcatttttcgaaaatcatgaaagggttttcgtccgcaccagacctgtcaggaacttacaatccggaagtccttacaacgcaaaagcggcagtggtcgaggtaccagatgaagtcattgggtgataggtgcatcagagaaccatcacatctgttcgagagcatagtgattgttgggcttccacctcacgcagatatccaggagctggaaaacattgcattagggagaaatgatgaagatggaaaaagatcaaaaaatttatttggcaatagtcaccaccaagttcacgcaataacaaatttggaaccacaggttctttttgcataccctccagagaagcctcttccactcaagtacaaggataccctctctttctgccttcccggaggtgtacaggttcatgctgtcgaacgtactccttcgttcagtgagctgaatgaaattctcctgggacaggaacagcttaaagaaagcaaccaatcatttgtgttccgcctacaggtggctgataactctgcattatatggatgctgtgtgcttgttgaagagatcgtacagagaccatcaaagttggtatcgatgctcatgaatgaaaaacccgtctttccacgccggagtcgatatgtgataactacgccccggtgttattgcatcctatccaggcttccattctttgaactacattttggggtgttgcagagtattcttatggaagaacgtcttgaatggctcacagatggtgttagcatgctaacttccttatcgcttgaggaatcctgtgagaacgatatctgtgaaggaactgcagttacagcacagaaacattatttagatagcaacacaactgatgtggataaatcatctgaatctagcaatggagtttcgtcaacggagctgtctgatactgacagcagttctgggtgtagagaaaaccagcttgactttgtttctaaagaacaacagcaaaatagttcttgtgaagaacagagtaattttaaaagagaaatagtcacttgttctgatgcttccgaagtgtctgatcattttgttccagaagatacatcatctgatcagtctggagttaagcaccatgaacttcattctgcaccaagtatcccggatgaatctggtgcaaggaactgtgatgattccccgaaggaaaatgtggatgatgaggagcttgatctcttcattatagatactattttaccacttatgcgatctcgcctttgtgaagattgtgaatcatctccaagttcacagggttctccttctgaaggcagaaattttgacacccaagaatcggattcagaggagccatcttccattggtgatggagacttagttaaacacaacaacatactgcagtgggctaaggcaaaaaaatatggttctttgcaagttgtctgtcaatactaccagttacagtgtcctgctaggggttcaacacttgcttttcatcccttggagcatttgcattctttgagttttcaccggcctggtgaaacagttcttcacattgctggttctactattgagcttaggtcacgtgatacaagcttagaggttgctgagatgcgcaatgcactctttgctgaggaggaatcgactgctttgtccacatgggcagtggcatccatttgtggatgcctcaggttggaacatgtaatgacactttttgctgccgcactcctggagaaacagattgttattgtctgttctaatctgggaatgttatcggcttcagttttgtccatcttacctctaatacgaccgtatcagtggcagagtctcctcatgacggttttgcctaatgacatgatggattttctggatgccccagttccatacatagtgggcgtacaaaacaagacatctgatgtgctcaaccggctaacaaatgccgtagtcattgatgccaacaggaatcagattaagtcctcttcagtcccacaactaccacagcacagagagttgctttctgccttgcgcccgtatcattcaatacttgttggcgaaagttatcttgcaagaaaacgccctgtttatgaatgcacagatgcccaggtggaaggggctaaaggtttcttggcagtgcttagagactaccttgacacactatgctcgaacttgagatctcatacaattaccaatgtgcaatctaacaatgacaaggtttccttacttttaaaagagagctttattggttctttcccaagccgggataggccttttatgaagctttttgtggacacccagttgttctcagtacatacagacctagttctctctttttatcagaaggactaagtgtctggcagacttgaatgtctgcctcgtcttgccaagcctttagatgttgagctaaactgtacatatcggcagctcagtgtttgtgcaaagagctcgaaggagaagccatataccgtcagaaaaaagtggtagattgccaggatccagttatgggtattgaagaagaatgcttgtagctgcttaagttagtctggtgcggtaatccaaggttttgttggctgtagttggtgcccccataagaagccttgtatggattgttcctgcaaatgcctgtgctgtaacggaaccgtgtctgtggcaaaatctccgaacatgaatgcgtccatttggcaaatctaagcgtgcaatgggacatcgaagaaaatgtaataattcgtggtactccctccaggccgaatcagttgacgctatggtatttaataa

SEQ ID NO: 120115 - DNA, 1886 bp, Zea Mays
acacacagcttcgcttgattcagtaaatgaatagttcaaaccagcccactaataacttagatagtggcccttccactttattatagttgaccctacctattgacttcaaggtaagaccctttttttctcgaaagttcaggagaactgcgcatcattatattaagaagaaagatatatggtgcccctagagggccattacagcagagcagtcaaggttcataggaaggggaaaccaagacgtagtgggatgtaggcttcagttgtttcggtacttttgcactacctacgtcttattatttattttgtaactggcttttcaccggcaggtcagtgggccttttagaagacgaacaaacaaaatttctcgacgggcgttagcgctatcttgtttgtttttgtcaactgaagtcgcgcatatttcccatcaactgattgctggtagagtgcagagccccgagcccaagcaagcagagccatttctttctactgtcgtcaaaagaaaagaaaaaagtattgcaataaaaatatgtagtagtaccttgtacaggatcattttgtcttttttttaatgtgatcagtgatctagaattaacattgttgggcatgtgctttatctgtttcggataaaaaaaacgtagattatataaagctatattacattgttgtacgatttctaaagcaatagttttggcaggtaatgacactttttgctgccgcactcctggagaaacagattgttattgtctgttctaatctgggaatgttatcggcttcagttttgtccatcttacctctaatacgaccgtatcagtggcagagtctcctcatgacggttttgcctaatgacatgatggattttctggatgccccagttccatacatagtgggcgtacaaaacaagacatctgatgtgctcaaccggctaacaaatgccgtagtcattgatgccaacaggaatcagattaagtcctcttcagtcccacaactaccacagcacagagagttgctttctgccttgcgcccgtatcattcaatacttgttggcgaaagttatcttgcaagaaaacgccctgtttatgaatgcacagatgcccaggtggaaggggctaaaggtttcttggcagtgcttagagactaccttgacacactatgctcgaacttgagatctcatacaattaccaatgtgcaatctaacaatgacaaggtttccttacttttaaaagagagctttattggttctttcccaagccgggataggccttttatgaagctttttgtggacacccagttgttctcagtacatacagacctagttctctctttttatcagaaggactaagtgtctggcagacttgaatgtctgcctcgtcttgccaagcctttagatgttgagctaaactgtacatatcggcagctcagtgtttgtgcaaagagctcgaaggagaagccatataccgtcagaaaaaagtggtagattgccaggatccagttatgggtattgaagaagaatgcttgtagctgcttaagttagtctggtgcggtaatccaaggttttgttggctgtagttggtgcccccataagaagccttgtatggattgttcctgcaaatgcctgtgctgtaacggaaccgtgtctgtggcaaaatctccgaacatgaatgcgtccatttggcaaatctaagcgtgcaatgggacatcgaagaaaatgtaataattcgtggtactccctccaggccgaatcagttgacgctatggtatttaataacggtcgagctttcttattttaaactggatttgtagaaatattaacaatatttgtattattagaaaagtttattactaaaacagattcagagatttatataacaatactagttatgtgcttt

SEQ ID NO: 120116 - DNA, 1711 bp, Zea Mays
aagagactcactgctactcgcgctcttgccaccgtctactctccaacccttctgccatccctcggcaccagctcgctgacgctaccgccacccctaccgccaggccgcatagccgtgctccgctcaccttctctcgcgctacagtctcaagggtagctagccaagctaccaagctcgtcaggagcgagagaaagaggccgccggcggtgcgcggggatgatgatgatgagcagcggccgggcgggcggcggggccaccgcggggcggtacccgttcacggcgtcgcagtggcaggagctggagcaccaggcgctcatctacaagtgcctggcgtccggcaagcccatcccttcctacctcatgccgccgctccgccgcatcctcgactccgccctcgccacgtcgccgtccctcgcctacccgccgcaaccctcactgggctggggctgcttcgggatgggcttcacccggaaggccgacgaggacccggagcccgggcggtgccggcgcacggacggcaagaagtggcgctgctccaaggaggcgtacccggactccaagtactgcgagaagcacatgcaccggggcaagaaccgttcaagaaagcctgtggaaatgtccttggccacgccggccccggcgccggcccccgccgccgccacaaccgccaccgccacctcatccccggcgccgtcctaccaccgcccggcccacgacgccacgccgtctccgtaccacgcgctgtatggaggcggcggcggcggcggcggtagcccttactcggcgtcggcacgcccaggagcaaccggaggcggcggcgcgtaccaccacgcgcagcatgtgagccccttccacctccacctcgagaccacccacccgcacccgccgccgccctacaactactccgccgaccagagggactacgcgtacgggcacgcggccgccaaggaggtcggcgagcacgccttcttctcggacggcgcgggcgagcgggtcgaccggcaggccgcggcggggcagtggcagttcaggcagctcggggtggagacgaagccgggccccacgccgctgttccccgtcgccgggtacgggcacggcgcggcgtcgccgtacggcgtggagatgggcaaggacgacgacgagcaggaggagaggcgccgccagcactgcttcgttcttggagccgacctgcggctggagcggccgtcgtcgggccatggccatggccatgaccatgacgacgccgccgccgcgcagaagccgctccggcccttcttcgacgagtggccgcaccagaagggggacaaggccgggtcgtggatggggctcgacggcgagacgcagctctccatgtccatccccatggccgccaccgacctccccgtcacctcccgcttccgtaacggtgggcactacgagtgatgccacatcaaacctggcgctggaaactcggaacgtatggtgctgatgctgaccatgagatgtaccgtttcgctcaaggccggccgtcatcaccacggccacatcaaaccggtttgaagaacttgggaaggccgaatgaaacctccagaagaatgatctgtcctctttttctccattttcttttttcttttagtattactctgtattgcttcgcgtgtaatatgttttcctgtaatatcaagtgagggcgtttctgaattctcatgcagcatttgggctcagtgactgt

SEQ ID NO: 120117 - DNA, 1702 bp, Zea Mays
aagagactcactgctactcgcgctcttgccaccgtctactctccaacccttctgccatccctcggcaccagctcgctgacgctaccgccacccctaccgccaggccgcatagccgtgctccgctcaccttctctcgcgctacagtctcaagggtagctagccaagctaccaagctcgtcaggagcgagagaaagaggccgccggcggtgcgcggggatgatgatgatgagcagcggccgggcgggcggcggggccaccgcggggcggtacccgttcacggcgtcgcagtggcaggagctggagcaccaggcgctcatctacaagtgcctggcgtccggcaagcccatcccttcctacctcatgccgccgctccgccgcatcctcgactccgccctcgccacgtcgccgtccctcgcctacccgccgcaaccctcactgggctggggctgcttcgggatgggcttcacccggaaggccgacgaggacccggagcccgggcggtgccggcgcacggacggcaagaagtggcgctgctccaaggaggcgtacccggactccaagtactgcgagaagcacatgcaccggggcaagaaccgttcaagaaagcctgtggaaatgtccttggccacgccggccccggcgccggcccccgccgccgccacaaccgccaccgccacctcatccccggcgccgtcctaccaccgcccggcccacgacgccacgccgtctccgtaccacgcgctgtatggaggcggcggcggcggcggcggtagcccttactcggcgtcggcacgcccaggagcaaccggaggcggcggcgcgtaccaccacgcgcagcatgtgagccccttccacctccacctcgagaccacccacccgcacccgccgccgccctacaactactccgccgaccagagggactacgcgtacgggcacgcggccgccaaggaggtcggcgagcacgccttcttctcggacggcgcgggcgagcgggtcgaccggcaggccgcggcggggcagtggcagttcaggcagctcggggtggagacgaagccgggccccacgccgctgttccccgtcgccgggtacgggcacggcgcggcgtcgccgtacggcgtggagatgggcaaggacgacgacgagcaggaggagaggcgccgccagcactgcttcgttcttggagccgacctgcggctggagcggccgtcgtcgggccatggccatggccatgaccatgacgacgccgccgccgcgcagaagccgctccggcccttcttcgacgagtggccgcaccagaagggggacaaggccgggtcgtggatggggctcgacggcgagacgcagctctccatgtccatccccatggccgccaccgacctccccgtcacctcccgcttccgtaacgacgagtgatgccacatcaaacctggcgctggaaactcggaacgtatggtgctgatgctgaccatgagatgtaccgtttcgctcaaggccggccgtcatcaccacggccacatcaaaccggtttgaagaacttgggaaggccgaatgaaacctccagaagaatgatctgtcctctttttctccattttcttttttcttttagtattactctgtattgcttcgcgtgtaatatgttttcctgtaatatcaagtgagggcgtttctgaattctcatgcagcatttgggctcagtgactgt

SEQ ID NO: 120118 - DNA, 348 bp, Zea Mays
aaaaatcttaggtttgacttgagatcttttatactgcttgatattgtatattttgcatgtgaattcataaatatctaaaccaaattaggagaaaggatggtgtgcgcctctcaaagcttcggcctcagatttggtcctcgtggctgctcccttcaaattaatgcctcttgggtcatcgacatgatatgctacacattccacattccagaagggaatataattacttgggtctcaactcccacgaacaggtgcagaagcagaagcagaagcatagctgagactaatgcatacctgtcgaacatgcgtccgatgacgaaactccgaccacagtacacaaatgggctctcg

SEQ ID NO: 120119 - DNA, 2655 bp, Zea Mays
gagatacggccgtgcaaccgtgacgtcagcgcacaatgacagccgttcaatacacttgtacttccgatccgacggctactactatcgaagcatcagccagccatcagtgtgtgacctttttcttcctccggaaggaggcacgacgccatcgaaccgcctctccccgagtcccgtaccgtactcttgcggtcttgccgctccaacatttcagcccccacccctcatcaatttttcctcatccgccttcgtcccgcacgcttgccgtccaaccgctcccacaggtcgaggcggggagggggaggaggaggagttgctggtgggtgtggattcgccgtcgattcgagtctgcgatggcggcggcgaagctgacaggcaacgccgtggcggcggcgatggcgggggacaccaacctcaagccggtggtgcaggtcgtcgacctccggagcatcgcggtcaccggggccccgggctccgggcccaggttccgcgccatcatctccgatggcgtcgccacggggcacgcgctcttcgcctcgcagctctgcgacctcgcgcgctccggcgtcgtccgccgcggctcggtcgtgcagctcctcgactacatcgttaacaacgtcggccccacccggaacagaaaggcaattgttattctgaacatggaggttcttgttgcagagtgtgagattattggaaatccagcactacctcctgaatctggagattctagttcaaattccctgagagcagaccagtttaatggagcacctccaaatggttcaatggcagggagtactttgaacaaagtgataaagccctctgacaatgctccagtaatccagagatcgatgacaggtaactctttgaacatggttcctaggccaagtgacaatgcacaggtcttccaaccaaccgtacagccatcctatcgtcctgcacccaaatacagaagccatggcacaatcatgaaaaacgatgctcctgctagaataatccccatacctgctctaaatccttatcagggccgctgggctatcaaggctcgagtaactgccaaaggagagatccgccggtaccataatgcaaaaggtgatggcaaagtgttctcttttgacctgcttgatactgatggtggtgagattcgggctacatgtttcaatgctcttgttgatcgcttctatgaagttgtggaagttggtaaggtctatgtggtatctagaggaaacttgaaacccgcaaagaaggactacaaccatctgaataatgagtgggagattttcttggaacctcagtcaactattgaactttgtcttgatgagaacagctctattcctgcccagcggtttagcttctcatcgattgataaaattgaaaattcagagaacaatgcaattgttgatgtcattggtgttgttacatctgtcaaccctagtactacaatacagaggaaaaatggtatggaagctcagaaaaggaccatcaccctgaatgatatgtctggtcgaagtgttgagcttaccatgtggggtgacttctgcaacagagaaggctcgcagctgcaagaaatggttgaatgtggggcgtttcctgtgctcgctgtcaaagctggaaaagtcaatgattacagtgggaagtctgttggcacaatttcttcatctcaactccacataaaccctgatcttgctgaggctcattctctcaggcagtggtttgattgtggaggaagagatgcttctactcagtctatatccagggattttactccttcagcatcatggaatgaggtccgaaagacagtagcacagataaaggatgatggtcttggaatgggggacaaacccgattgggtcacggtgaaggctgctatttcgttcatcaaaaccgattccttctgctacacagcttgccccaatgtgattggagacaggcaatgtggtaaaaaggtgacaaagtctgattcaggcaactggctatgtgacaagtgcaatcaagagtttccagagtgtgattacaggtatctcctacagttgaacattcaagaccacacgggaacaacttctgtgacagcatttcaagatcgtggacaggagatacttggttgctcagctcgagagctcaacatttttaaagagaacaaagatcctcgctacacagatgtcttgatcaattgcttgtatcagaactatttgttcaggctaaaagtgaaagaagaacaatatggcgatgtacgacaagtgaaaaacactgtggccaaggtggagagggtggatcctttggctgagagtaaatttctgcttgattccatttcaaggtttataccatgagagttttgttcttacatctatcagctgctggtaagtgtgctgcccgcttagaagtggtaattaatatgtagctttccctattcacacgcccggaggtttctttgtcggatagaattctatcattcagcagtagagttttctccacttttggtctgccagatacctgcagcttgaagctatgtgttctttcataattaactgaacgcttgtaagtgtgattatgagagttctgtttagctcagctactttgtggttactactattttggtttagtttggtatagtcggacattcctactgctccaatagtgggcatgaatcaaccattaatgcga

SEQ ID NO: 120120 - DNA, 421 bp, Zea Mays
tcacgagatggagacgaggatgatggcggagcgggaggcgaagcgccgggcagatcatcagaggatggcggagatgttccagtacatgcagagccttggcgccgcacagggcatcgctccgccacctccattgttccctccagttgaccctgctctcttccacactcctggccaatctggggcggcatccaacaaccctccggaagggttcagcccaacgcagccccggtcaaaccgcccacctccatgagtgttgtgttttcattgtgttagacttcagaacttatgtataatacttatgtctgtgtttgatacttatgtgagagcttgcgacgtttgagacttatgtttgtgtttaatacttgtgttgaacacttatgtttgtgatggatatttatgtttgtggtgacggttttatgtt

SEQ ID NO: 120121 - DNA, 1877 bp, Zea Mays
atgaattcaaacactcatgtggaagctcttgaggatgatgtccttaatgctaatgaagatgagagaatgtttcctgagtttgttgaaaatggtcatgcacgtgggtatgacatgcttgcacaattcgaggataccgatgatgaagagagggaggagaaccttaccatgggtgtgcctgatgatgtagaagatgaggatagactgattgttgattgggatagagaaaatccaagtctagaagaaggcaatacttttccaaccatgagagattgtaggaatgcactcgcaacctattgcatcagaggggaatacgactttatcattgacaagagttcgcccaagagatacattgtgcattgttggtttgagcggtgtaagtggaggatgcatgcctccactatgaggaataacactattgttcaagttatggtcaacccttttccgcacacatgcccaagtgccgaaagaaaagtgacgcagagggcagccaagagcaggtggtgctgtgatgcagtgttacagtgggtgacagaaaatccttttattggtccaaccgcacttattaagaagattcatgagaagcataacattcaagtgccttacatgagggtcttctatgggaaacaaatggctcttgataaaatctatggtccatggaaggaaagttttcaactattgtactcatttaaatccgaagtggagaaggcttgtcctggaagtgttgtgcagattgacaagcacaaagtagtgtacaatgtgaaagggtataggaatgaaaacgagtataggaatgaaaacaaggactaccagaagccttccgtgtggaaagacgcagcagccacgacgaggagaggctggcaggggagatccacggcggcggcggcgggctgcgtccgtgtcggggcagcagccacggcggagaggggctgcggcgcggcggcggagagaggatcaccacaccggtctgtcatgaccatgagaacctacaacaaagcagtgctcctcgtccttgccatggtgatggcggtgctgtcgacagggatctgcacggtgccggcgccggcgccgagcttggaggagttcccgacgacgacagagaacacgtgtgtgaagatcctcgccgacagcggctgcgtccgcaaccacaaggcgtgccacgacaactgcttcatcaagctcaagggcaatggcgtgtgccttcgcgacgcgtgctggtgctcctacacatgcaagccatcgctgctgtcgccgccaccggcggcccagtgaaactgccatacagggcagcgggacgccgagatgacgttcagatttgtgtgacatcctagattcctagtatcctcctagaggccggcggtgtcgcttgccatgaggcatgctcgaaatcgagaataattttagatggatgagttcgtgtccaagccttgcgcttcgagaattgtgtgccaacacaacggaacggacacacgttctctgaattcatgtatggaataggtcgaacgtgtactccagagaattccgcgcgctcgccagtcttcctagctcgtcggcaaaccaacggatactcggcgtattttggatgagctcctctagtcctctctcctctgttagatgactgctcttaatccatttaaatgctagtatattgtatctattttgtccatcggtcatcccgtttgatcgggcgtttagcctgccctgaataaacggctaaactataggtgactaactatttaggttaggtgaacacatgcctagtagtatgtggtgttcagtggtccaactcatgtatttcttgtgtcaatgcacactttacttgtcagtctcgcaatgcgactgttagggcctgtttgagagagttttgcttcaaaaacttc

SEQ ID NO: 120122 - DNA, 1588 bp, Zea Mays
gccaatccagaggacgtactgaggagagcgatggatagatggcggagactgagctagcttgcatgccatttttaacaacaaaaaattgcttaacacattttctagctagcagaggatgagaggagactattaatagctatagctatatagctagcacacgcaccggcagagcgagagcaggccagccagggcacaaccacagcagctgcaacaactgccatgcatctgtacttggtggcgagaggcagggagctttaggcgagcctagagtcgtcgtcgtctcctctcccgatcggctggctcctacttgcatggtccccggcccgcgtctctttgctctccgatccgacctcagtcacggcgcccatcccggccgcccccttaaaaccgcaccaactcgtagccaaattctcgagctcacacccacatatatacacacagaaatatatactaccaagcttgccgcttgtcgcctcacaacctacgacgagcggctaccttaattagctaagctagaattcttgggggggcgcacgcggcagcgtctagctcggagccggcggccatggcgaagccgcaggaggtgcgcagcgtcgactccttctcgcagctgccgttcatccggccggccccgcccccggctccggcgcagccgagggacgccaccatccggctcttcggctgcgacttctccaacgacgaccagcagcagcggcaggccaagcagcagcagcagcaccgccaggacgccggcgcggccgccgactcccccgacgccgccaacggcagctcgatcacgtccgagagcaacaacggagccaacaagagcggcggcgccgacaggaagttcgagtgccactactgctgccgcaacttcccgacgtcgcaggcgctgggcgggcaccagaacgcgcacaagcgcgagcggcagcacgccaagcgggcccacctccaggcctccctcgccatgcaccgctacgtgcccggccacatgtacggcctcttcaactaccaccagcagcagcagcaccacctcggcggcggcggcggcggccgcttcgactaccccgcgccgctgcagttgccgcccccgccgccggcgcgctacccgatgtggacgagcgccggccccgcggggccctacggcggaggcccaggctccatgtcgcagccaatcaacggtagcccggtgccgccggggctctggagggtgccgccccccgctgcgacgacgaccaccactaccgccatggagaatttcggcgtgcccggccgccgccacggcgctggtggtggcacggcggctgtcctggccgctgggccggctggcgcggaggcggcggcatgcaaggacgacgcgatgggcttgttgtccccctcgccctcgctctcgtcgtgctcgtccacgtcgccggagaagaagaagctaggtaggtgcgaattgggccgccagaaggagaccgttagcttggacctccatctgtaattctttctttgtttgtttgtcactatatattaggtctccgatctccttcccgttgtggatggattagcagttgcgagtgcatgcaattctcaacagttttct

SEQ ID NO: 120123 - DNA, 719 bp, Zea Mays
cccgccatcatctcatcgatcacacacacccatacgccgcgaatccacacgcatctccctctccagtctccagttctccaccttgccagcgtctctccacgtacgccatggacgggtcggcgttcccgtcgctgtcgccggagctccgcgacgcgctcgccaaggtggccgtgttcgtgctcgtccaggggctggtctacctcatcctccgcagctcctccgacgtcttctccaaggacggccggctcaggtccctcagcttccgccccatgcgctccatgagcgtcaggcgcgtgctggcgccgctctccgacgtccccgtcggcaccgacgacgcctctccatcgttgtcgcccgccgcgacgtcgtcgcaccgcaaagctgcccgcgaggattgaaatggccgccacttctgggcagcttgcagttgcaggttgttcatctggtccttatgggttataaatgggtctgttactatgtaattaagtagtactatattggatggaatcttgtagacatattggttgagcagaattggaaacactggattatttgattctttacagcaacatgcttgctctttctttcttcctgtgaatatacaccactacttgtagcctcttgctggaaacgagtcagaagagaaattaaattgccagactggatagacttcagcggctatgatatgacagggacgtgaaaagtttagcttattgacc

SEQ ID NO: 120124 - DNA, 420 bp, Zea Mays
atggctaacagtggtggtgccagaataggggaagatggggctcttagatggtctgagtggttagcaaaagacgaggagagtagacaaaaattgtctacgcaagaaaattcacaagagactgaaacaggaggctggagtggttggtttgatccttctctgggtaatactgacgcaaatgatttgtcaaagaaatcactggaaccatcattgagcgacggaaaaggtgcggaagaccttgatgctgagaactcacctgcacaagatgatgttgaatccttgctgaaaaagcctggtatcgctgtagatgcagaatcctatagtgaagctaaagatgcagaaacctggaatagatgggccttgatggagttgtcacgggacaatgagccatggatgcctcttcatgaaaaatatagcaattag

SEQ ID NO: 120125 - DNA, 85 bp, Zea Mays
gttaacattgaaatcaggcgttcatcatagcaccacaatatttttcatcgattgcatcaataaacgacaccacatgaaaaaaaaa

SEQ ID NO: 120126 - DNA, 2679 bp, Zea Mays
cacggcggtctcgccatcctcgcttctgccgtctcctcacaccggcaccgcttgcgcctcctctaagccctaacaaactcccgcagcgcccgctcgcccgccttcgcacgccaccggatgaagggcgcgtggaagcagagcggcgtggtggccgtggccgatcaacttggctacctcggcggagcagggttcgtcgggcgcgcgcggcccgtcaccctctgtctctacggcctcgcgctcaccttcgccgggttcgcggtgttcctctgcttcgcgccctccctccccgtgccgccagcctcgtctccgggcgcggcgtggttcgacggcctgatcgcctccgcgtcgccgtaccgcgcgcaggtctcgggcttcctctcgtccctgttcccggccaactcgtcctccacggtgcctcctggtggtggcgtcgcggccaggcgtgccgggccgagcggcggcgggttcgcggcgagcggttcccgaggcaatggctccacctccagcgcggttcggcctggcgagcagttgggaagcggaggtggagttccgcccagcagagtgggcaacggcgaacctcccagcggcaaggaagcgccagttcctggggatgctactgcggcggtgcctagcggcgcgccgcccgatgatcatgtgcaaggcgaaggcggtgccggtgccaagcattccgtggggagtgccgctgccgaggcgaagggtgggtctggacctggtcctggacgcccgagcggtggttcagcccagaatggcacatcggctaaaggaagagtgcctattctgatcaacggctcttacgcgaacgcgaattccgcggatgccggagatggcaacggaatgagagcgagtgcaaggaatgctgccggctccacgcaccaattgagaagcggaactgcagctttaggcaataccgttgctgtttcatcccttaatcagactgcgagtgcagttgcagtagcggccagggaaggaaatggaactgcaactgcaggcaataaccagaccttcctgattcaggctcctgcggataacaagaaccacagttcagttgcttcagatggaagcaatagcagtccaaccaataagcagaatgaatcgcctgctagtcctcaggggagcactagcacggtgaaagatcaatctgcacgagggcccaccccagcagccattgtgccggtgaaagcagatgctaatgccggtcggcgcatgaaggctgattggactgagaacatggccggctgcgacttgttctacgggaattgggttcgagatgactcgtaccctctgtatcctgcgggatcatgccctcacatcgacgagtccttcaactgccacctcaacggccggcctgacaaagcttacgagaggctccggtggcaacccagcggatgcagaatcccgaggttgaacccaactgacatgttggagaggctgagggggaagaggctggtgtttgtcggtgattcgctcaacaggaacatgtgggaatccctgatttgtatattgaggaattctgttaaagacaagagtaaggtttttgaggtatccggtaggagccaattcagggctgagggctcctactctttcttgttccaggactacaactgcagtgtggagttcttccgctcccctttccttgttcaggaatgggagatgccagtcagcaatgggaagggtacacgggaaactctcaggcttgacattatcgatccctcgtttccgaggtacaagaatgcagatatcgttatcttcaatactggccactggtggacgcatgacaaaacttctctagggaaagattactaccaggagggcaaccgcgtatacagtgagctggatgttcatgacgcctttcggagagctctcaacacctgggctaagtgggttgattccaatgtgaaccccaagaaaaccactgtgtttttcagaggctactctgcatcccatttcagtgggggtcaatggaattcgggcggcagttgtgacagggaaacagagccaataacggatgaccagtacctcacgccatacccaacaaagatgagcattttggaggaggtgctccgggggatgaaaactcccgttgtgtacctgaacataacaaggatgactgactacaggaaggaggcccacccttcagtctaccgcaagcagaagttgaccgaagaggagaggaaatcgcctgagctataccaggactgcagccactggtgccttcctggagtaccggactcctggaacgaacttctctacgcacagattttgctgacacagcagcatgggatgcaacaataaaggcaagtgtggacttgttcttgtatatgaaatgttttcagacgtcaagctgcataggatacaaatctacatgaatcgatcaaagggaagcttatagtataagtgagaccaagggttttggaatccatgcatagagtaaagcaggcagttagctctgaataacacgaaatctgtataggctcgataggattatatgatgtaaacttcatgcctagttagaagaaaaaataataagaacaaagagaatagaatagatagtgcactagatgacataggactataggaggcccttgttttgtgagacttttgtctgcctgtattgtactaatatagtattctgaattcgtattcgtatatactttctgg

SEQ ID NO: 120127 - DNA, 1270 bp, Zea Mays
aaaccaacacacacagcacaacacaacacaagccaccccaccccaccccaccaccaccccctccttcgatttgcaccctcgctccccaaatctctcctcactccgccctctctccgctccgctagacccgcccatgaggatcaggaggcggcctccgggccagcctctcgcctacctgctgccctcagatccatccgccgcgccgcagtcgccgccgcgtgcgtcgtcgatagatcgtcaggagcgtcctcctccgcccccggggggcaagcaaggggagggggagttgcacttgcacccggcaacaaatgattcccccgcacccgcggatctcgaggacggccgcagccgctcctccgcgctccggcgcccagcattgctgccgcagttgcaggagcaggacgacgcggtggagcagcgcagccgctgcggcggcctaggtgcgcaacaacggcaacgacaggggccttcagatggccgcagcagcctagacaatggtcgcgactgccacgtgccggagccggtgacgatccaggccggagagcgtcgtctcagcaacggcgtcggcgcagcagcggtggcgacaacgacgacagcaacagcgggcgcgaaggcgacgaggcagcagcaagaggcaaagcaggataccggcggcggcgcgaggagggccgcgcggggccctgcaggcgcgctgatggaggggtcgcggtgcagccggaagaacgggcgcgggtggcggtgcagccagccgacgctggtgggctacgctctctgccagtaccacctcggcaagggccgtatgcggagcgggagcgccgcgaccggcgggcgcggcccaggccagctcggacgcaccgagcacgcgaagaaaacctccgccgctgcgcccaaggcggacgtgccgctgccgctgccgccgccgagcgtgcagcgctgctagaggcgcgcgcacatggctgtgatccgtcgaccatggggaacgcaagattcttggacatcgtggtggggttgcatatcatcctggcggtgcagtggtggcgactggaattcttttgttgcgtttctaaacattaattaatttaaatgttgtcctgcccacgtaccgtggctgttgttggctcagctttggcttgcggtccttgtggtggcgcatcgaagccccagtgcatttgccgcagctcgtttctttgttttactcggattattctaacccatgaaatttcaaaatgtttttgcatgaacagaacgcagtgcattgagccagggaaca

SEQ ID NO: 120128 - DNA, 1054 bp, Zea Mays
cgcatcgccgcgtcggcgtcggcgtcgtccacgttctttcgatctgtatgggtgtgcaactcggtgtttcgatctgtatgagtgcaagtgcaatgtatgggtgcaagagtgcaactcgatctgctttgggaaacatggtccatgtgcggttgtgtgcgcgccgcatcatgcatgaaacagtccagttcacttgcacattgcacttttgtttctgtcgggaggcattagtgctttgcattgcatccatgcctgctagcttggaggagttgcatccttttgtgcttggagtttattagtctcagcgctacggttactgtatatgatatgtactgcttctgccgctgcttctttcttcttcttctttttttttgttgttgatcgcattttattctgtccaacgacccagcatgcggacacaaaaccttaaagctacattacacctactttgctgcagcctagacaatggtcgcgactgccacgtgccggagccggtgacgatccaggccggagagcgtcgtctcagcaacggcgtcggcgcagcagcggtggcgacaacgacgacagcaacagcgggcgcgaaggcgacgaggcagcagcaagaggcaaagcaggataccggcggcggcgcgaggagggccgcgcggggccctgcaggcgcgctgatggaggggtcgcggtgcagccggaagaacgggcgcgggtggcggtgcagccagccgacgctggtgggctacgctctctgccagtaccacctcggcaagggccgtatgcggagcgggagcgccgcgaccggcgggcgcggcccaggccagctcggacgcaccgagcacgcgaagaaaacctccgccgctgcgcccaaggcggacgtgccgctgccgctgccgccgccgagcgtgcagcgctgctagaggcgcgcgcacatggctgtgatccgtcgaccatggggaacgcaagattcttggacatcgtggtggggttgcatatcatcctggcggtgcagtggtggcgactggaattcttttgttgcgtttctaaacattaattaatttaaatg

SEQ ID NO: 120129 - DNA, 1422 bp, Zea Mays
cccaactcccaattctcaaccctgtatccaaatcccaagctgaagcgcgactgcgtgagtaccaagacgccggtgggagcgacggctacatgggctcctccaaggacaagactgatggaggcggcggcggggacaggggaacaggaggaggtggacgagctgctggccgcgctcgggtacaaggtgcgttcgtcggatatggcggacgtcgctcaaaagctggagcagctcgagatggccatggggaggtgagagatggatctcgaccccgcaatttggcgccattgttgggcgggttttccctttccatctccctttgccattggtccctcgctttgtcttgtgccgcctcatgtttggctgtttctacgagctgggttttagcggcgcacagaggggaagagaaccagcgagagagagagagacggaaagaggaagatgagtcaggagcctgaggatcctggtgaagttcctccgtgagacagcgggtcacgtggtgacggtggagttgaagaccggcgaggtgtaccgacggtccactcaagtgcgaggataactagaattgccagctcaagaacattaccttcaccgctaaggtatactctctctgcctgcgctaccttcggatccgagatagaaccccacgggttctgttcccctgagtatttttcttcatttttgttgattaatctgcaagatggggacatttcgcacctggagcatgtattcatcagaggaagcagagtgagttaatggaaaaactagatttatttcgtgatgcaatgttgttgagttatggtggcctaattatttttgtgactgatgattcctgtactgcttagtgtcttactgcgagaaaaaacaatggtgatatggtacataatttgcttgttttgtcgaatgtaggacaaaggatcaactattggagttggctgtggtcgtgctgttgcaatgcgtgctcagagttcaaaagttgttcaagatggcagtaatccttacaccttggaagggacagatggctagaaattttagcaaaacttcagcgtacgtataggtaaattatataagctgaactgacttgacaaattataatctctaaattattttgtttgcaggcttttgtatacgaaattaaaaatatagaactttgatatatagaaaaggatctgagtttagcatatgtcttttgtatatgtaagcttttatattaagctctcacattgcaccgaacacatgtagctttgttccatttaagggcttgttcggttagctctcaatccatgtggattgagcgggattggatgagtttaaatcccaaacaagtcaaacttcttcataattttttccaatcccatccaatccatgtgtattgggaataaccgaacaagtcctaattgatttataagatgtatgcattctctt

SEQ ID NO: 120130 - DNA, 1305 bp, Zea Mays
ctcaaccctgtatccaaatcccaagctgaagcgcgactgcgtgagtaccaagacgccggtgggagcgacggctacatgggctcctccaaggacaagactgatggaggcggcggcggggacaggggaacaggaggaggtggacgagctgctggccgcgctcgggtacaaggtgcgttcgtcggatatggcggacgtcgctcaaaagctggagcagctcgagatggccatggggagcggcgcacagaggggaagagaaccagcgagagagagagagacggaaagaggaagatgagtcaggagcctgaggatcctggtgaagttcctccgtgagacagcgggtcacgtggtgacggtggagttgaagaccggcgaggtgtaccgacggtccactcaagtgcgaggataactagaattgccagctcaagaacattaccttcaccgctaaggtatactctctctgcctgcgctaccttcggatccgagatagaaccccacgggttctgttcccctgagtatttttcttcatttttgttgattaatctgcaagatggggacatttcgcacctggagcatgtattcatcagaggaagcagagtgagttaatggaaaaactagatttatttcgtgatgcaatgttgttgagttatggtggcctaattatttttgtgactgatgattcctgtactgcttagtgtcttactgcgagaaaaaacaatggtgatatggtacataatttgcttgttttgtcgaatgtaggacaaaggatcaactattggagttggctgtggtcgtgctgttgcaatgcgtgctcagagttcaaaagttgttcaagatggcagtaatccttacaccttggaagggacagatggctagaaattttagcaaaacttcagcgtacgtatagatgctaacagcaagacatggggagggaaggagaacggatgcagctactgaatgcatagcttgcagtagtagttgctactgcatctgatccagttcctaatgacatttatttggtcccctcatttatgtgtgatgacagttcatatttttttattgtcaagtacctcctccattctattttattttgtcgtgttttagttaaaaaataaactagccggcgacgaatattcgagaacgggggtagtaagatatatgactcgaaagtttctgcctcccaggacacaacctctgtccctcatcctcgatctaaaaatcgggtacagttcatctatttttcatctgcgactaaattgtaacagttcatctgtttttttcccatttatgtgtgatgatagttcatct

SEQ ID NO: 120131 - DNA, 670 bp, Zea Mays
acagcgggtcacgtggtgacggtggagttgaagaccggcgaggtgtaccgacggtccactcaagtgcgaggataactagaattgccagctcaagaacattaccttcaccgctaaggacaaaggatcaactattggagttggctgtggtcgtgctgttgcaatgcgtgctcagagttcaaaagttgttcaagatggcagtaatccttacaccttggaagggacagatggctagaaattttagcaaaacttcagcgtacgtatagaagcagatgctaacagcaagacatggggagggaaggagaacggatgcagctactgaatgcatagcttgcagtagtagttgctactgcatctgatccagttcctaatgacatttatttggtcccctcatttatgtgtgatgacagttcatatttttttattgtcaagtacctcctccattctattttattttgtcgtgttttagttaaaaaataaactagccggcgacgaatattcgagaacgggggtagtaagatatatgactcgaaagtttctgcctcccaggacacaacctctgtccctcatcctcgatctaaaaatcgggtacagttcatctatttttcatctgcgactaaattgtaacagttcatctgtttttttcccatttatgtgtgatgatagttcatct

SEQ ID NO: 120132 - DNA, 303 bp, Zea Mays
atgagctcgtccatggcgcgcgtcgccatctcggccatcatgggccgctccatctccgacaccggcatcgggaggtggaacgggggataccccgaggagccgccgctgaggaggtcgaggtccagcgacgggctgccgagcccgccgacggacaggtccagcgacgacatggacagcgccgcctgcgccggcggcagctgcgtgatgggccgccccaggtacttggacgtcaggctggacacccggtcaagctcttctttgagtcgcgcgttctccatgcgcagcttctgctcgtcgaagtag

SEQ ID NO: 120133 - DNA, 106 bp, Zea Mays
gtcatgaaaatctatatcatatagcaaagatgcttttgaagatcccgacaatattttcgtctacattattcgccaccgcgtgtaactctttattaactataaagga

SEQ ID NO: 120134 - DNA, 402 bp, Zea Mays
atgacgcagggcgccgccgacaggaagctgctgagtagcggcacaatcctcctccggtgcacgttcgtcgggggcgacgacgagcgcggcgacttcacgggcgagcagctcaggtacccctgcaagctgaggcggcacatctgcgccgagtgcgggatgcaccgcggcgagcacggcggcaggcccggcgcgggcgtcagggtcagggacgaggacctgcccccgcgcaagcgggccgtgttcagggcgcggggagagttgcagccgatggtgatgggcctcggcggcggcgaggacgagggcgacggcgagagggaggggcaggcctgggctaccgccgacgccatcgccaaggggaagcggggggccaggagacggcgcgcggcgtggcgcgagctttga

SEQ ID NO: 120135 - DNA, 1182 bp, Zea Mays
tccctcccgtcccctgctgcatcgacatgttttacctccttgctcgccagtcgcctataaatgaccgagcctccatgtcccgtgtacatacacacacgccgtcggccgctgctagcgaacacgcacagcacacgccatctacgcacaggcacagcaacagcaaccgcctgccgctcagtgcgtgccatgaagctggatgtcccggcgaggcagcagagcagccaggacgcagagcagagcggcaagacagtggccgcggccgtcctcggcactgaggcgtggagccacccggagctccctctcctcctccgcgacgccagcaccgacgacgccctggtgccgccgctcaacttcgccatggtcgacgacggcatcttccgctcgggcctcccggacgccgccaacttccgcttcctgctctccctcaacctgcgctccatcgtgtacctgtgcccggagccgtacgcggaggagaacgcgcggttcctgcgcacgaacgggatccggcttcaccagttcgccgtcgaagggagcaagagtggtccgacagtgctggataccatgtcggcgcaggaaccattcgtccacatccccgaagaaacgatccgggaggcgctcaaagttgtccttgacgtgagaaaccagccggtcctcatccactgcaagagaggcaagcaccggactggctgcgtcgtcggatgcctgaggaagctgcagaagtggtgcctgtcctccgtgttcgacgagtacctgcacttcgcggcggcgaaggcgaggaccaccgaccagaggttcatggagctgttcgacgcgtcgagcctgatgcacctgacggcggcctcgcagtactgaccactgaccagagcggggcgagtggttcccgagcggtcccgatcctgccaccatgccgcatcaagcaagccgtttccccctgctgtttccgaagcaactcggcagagaataatgctggaaccatgagtgtgctgtgttgcgtgagtgctgtggttgcttcgtgttcaactggtttcagattctgaactggcacggcctgcattcacttgaatcactgaaaaccgaacatgtctgaactctgaactgaagctgttgctcagttcagacgttcccgccaatcttccgatccgaccagatggcacgaagtcatataccgaccatcatttttct

SEQ ID NO: 120136 - DNA, 2405 bp, Zea Mays
cggcccttgagcccttccaccctctcccaggcatcacacattccaccaccaccgccgccgccatcaccactgtgaccaccagccccacactcgtatgtgattattggcacccggacgccaccgcctccgcctccaccaccgactgcgccatgggcgactcctcggtggccggcgcgcttgtgccgtccgtgcccaagccggagaccgcgccgtccggtgacaactctacggcggcgctggcgctgccggaagaggcggggacgcgcgcggcgtcggcgtcgccgcagggacctgcggaggaagagggccccgccgatagggacctcctctgcccgatctgcatggccgtcatcaaggatgccttcctcaccgcctgcggccacagcttctgctacatgtgcgtcgtcacgcacctcagcaacaagagcgactgcccctgctgcgggcactaccttaccaaggcccagctctacccaaactttctccttgacaaggttctgaagaaaatatcagcccgacaaatcgcaaaaacagcgtcaccggtcgatcaatttcgatgtgcattgcaacagggaaatgaaatgggagttaaagagttagatagccttatgactttgattgctgagaagaagcggcaaatggaacaacaagaatcggagacaaatatgcaaatattgttagtcttcttgcactgccttagaaagcaaaagctggaagagttgaatgagatccaaagtgatctacagtacatcaaagaggatataagtgctgtggagagacatagggtagaattataccgcacaaaagaaaggtactccatgaagctgcgcatgcttttagatgagcctactgcacaaaaaatgtggccctctcctatggacaaagctagttgtcgctttcctcccaactctcggacaccacttggcggatcatgtccaggaactttacagaataagaagcttgatccgaaagctcaaagacgagttcaagcacagttcaatgagcttcaagaatactacctgcaaagacggcgtactggagcacaggcacgcagacaagaagaaagagagaccgttgcaatgaatagagaaggctatcatgcaggtcttcaggatttccagtctgtgctaacaacattcactcgatatagtcgtctacgtgtcattgcggaactaagacatggagacttgtttcactctgccaatattgtgtccagtattgaatttgatcgtgatgatgaactatttgctactgctggagtctcgaaacgtattaaagtcttcgaattttctactgttgttaatgaaccatcagatgtgcattgcccggttgttgaaatggctaccagatctaaacttagctgcctaagctggaacaagtactcaaaaaatattatcgcaagcagtgactatgagggtatagtaactgtgtgggatgtccagacccgccagagtgtgatggaatatgaagagcatgagaaaagagcatggagtgttgatttttctcgaacagagccttcaatgctagtatctgggagtgacgattgcaaggtgaaagtgtggtgcacaaaacaagaagcaagcgtgatcaatattgatatgaaagcaaatatttgttcggttaaatataatcctgggtcaagcttctatgttgcagtcggatctgctgatcaccatattcattacttcgatttacgtaatccaagtgcgcctgtccatgtttttggggggcacaagaaagcagtatcgtatgtcaaattcttatctaacaatgagcttgcatctgcatcaacagatagcacgttacgtttatgggatgtcaaggataatttgccggtacggacattcagagggcacaaaaatgaaaagaacttcgttggattgtctgtgaacaatgagtatattgcttgtggaagtgaaacaaatgaggtttttgtttatcacaaggctatctcaaaaccagcagcaagccatagatttgtatcctctaacctggatgatgccgatgatgatcctggttcttatttcattagtgctgtctgctggaagagtgatagccccaccatgttagctgctaacagtcagggaaccataaaagttcatgtacttgctccttgatgtcgtggagggcgttcaagagatttacagccagcgcgtgtatgtcgtactgtccaggtgttccctttcgtgccattatattccccaaaagcgagaatggaggcattattgatctccggttagggcatgaatttttgcagacgatggccagctgacgtagggttttgaggtatcagaatgtgcataatcatgtttatgttgtacaggtgtaaatcagccaagttattgattacaagtgtgacatgagaaatacacattaataaaaactccagctcggttgtacagaga

SEQ ID NO: 120137 - DNA, 3219 bp, Zea Mays
ttggaggcggcgggaggcaacccctgagtcttgatcgcccggtcagctgttgccaaaacgggtagtgaagcattgaagtatggcatccatcctcctggcctggcgtctcaccaccggttacttggcctgtggtgacgccaacaattttgcatacatgtgccgcccgcgcatatgctgatacgttgcatcagccatcaggggtaagtatcatgcagcagtggaggagcaggactgtagaagccttcgcgctcgcggcgcgcctcctcctgcctatataaaccccgcacccccacctccccagcttccaagcgcaggtgccactcgagcttccaattaacctcgagctctggtcataacaaccgtcacctattcgtacctgcgacgacaatggcggcctccgttgagcggcacctggctcctcacccgtggccggccaatgcgcctcccaagagcttcgacatgttccgcaccggctccgactccgactccgaggacgaggacagcatccccgcggtcgactggcggtcgctgtaccgccctcgccttgaggtggagccgccagtccatgacccacgcgacgaggccacctccgacgcgtgggtgcggcgccacccggcgctcgtccggctgacgggcaagcaccccttcaactcggagcctccggtgccgcggctgatggcgcacgggttcatcaccccggcgccgctccactacgtgcgcaaccacggggcggtccccagggcggactggtccacgtggaccgtggaggtgacggggctcgtgacgcgccccgccaagctgaccatggagcggctggtgacggagttcgaggccgtggagctccccgtgacgctggtgtgcgcgggcaaccggcgcaaggagcagaacatggtgcgccagaccgtgggcttcaactggggccccggcgccgtctccacgtccgtgtggcgcggcgcgcggctccgcgacgtgctgcgccggtgcggcgtcatgcgcgccgcggacggcgccgccaacgtgtgcttcgagggcgccgaggacctccccggcggcaagtacggcaccagcctgcggcgcggggtggccatggacccggcgcgcgacgtcatcctcgcctacatgcagaacggggagccgctggcgcccgaccacggcttccccgtgcgcgtcatcgtgccgggcttcatcggcggccgcatggtcaagtggctcaggcgggtcgtcgtcgcgtccgacgagtccgacagctactaccactaccgggacaaccgggtgctgccgtcccacgtcgacgccgagctcgccaatgccgaagcgtggtggtaccggccggagtacataataaacgagctcaacatcaactcggtgatcaccacgccgggacacgacgaggtgctgcccatcaacgccctgacgacgcagcggccgtatacgatcaagggatatgcatactccggtggcggccggaaagtaacacgggtggaggtgacactggacggcggcgagacgtggcaggtgtgctcgctcgaccacccggagcgcccaaccaagtacggcaagtactggtgctggtgcttctggtccgtcgacgtcgaggtgctcgacgtgctcggggccaaggaaatcgccgtccgcgcctgggacgaggccatgaacacccagccggagaagctcatctgtaacctcatgggcatgatgaacaactgctggttccgggtgaaggtcaacgcgtgccggccgcacaagggcgagatcggcctggtgttcgagcacccgacgcagccgggcaaccagccgggcggctggatggcgcggcagaagcacctcgagacgtcggagagcgcgcagggcacgctcaagaagagcacgtccacgcccttcatgaacacggccaccgcgcagtacaccatgtccgaggtgcgccgccacaagtccccagactccgcctggatcgtcgtgcacggccacatctacgactgcacggggttcctcaaggaccacccgggaggcgccgacagcatcctcatcagcgccggcaccgactgcactgaggagttcgacgccatccactcggacaaggcccgcggcctcctcgagacgtaccgcgtcggcgagctcgtcgtcaccggcagcgactactccccacagaacagccacgccgacctcagggccatcgacgaggcccctgctgcagccgcgccgctgccggtgtcgaccgtcgcgctctccaacccgcgggagaaggtcaagtgccggctcgtcggcaagaagagcctgtcctacaacgtgcgcctcttccggttcgcgctgccgtcgccggaccagaagctcggtctccccgtcggaaggcacgtgtacgtgtgtgcgtcgatagacggcaagctctgcatgcgcgcgtacacgcctacgagccccgccgacgaggtcggccacgtcgagctcctgatcaagatatacttcaaggacgaggaccccaagtaccccaacggcgggctcatgtcgcagcacctggactccctgccgctcggcgcgaccatcgacatcaagggccccgtagggcacatcgagtacgccggccgcggcggcttcgtggtgaacggtgagcgccggttcgcgcgaaggctcgccatggtcgccggtgggacgggcatcacgccggtgtaccaggtgatccaggccgtgctgagggaccagcccgacgacgacacggagatgcacctcgtgtacgcgaaccggacggtggacgacatgctcctgcgtgaggagatcaaccgctgggttgccgcgtacccggcgcggctcaaggtgtggtacgtggtgagcaaggtggcacggccggaggacgggtgggaatacggcgtggggagagtggacgagcaagtcttgagggagcacctgcccctgggagacagcgagacgcttgcgctcgtgtgcgggccgccggcgatgatcgagtgcacggtgcgcccgggcctggagaagatggggtacgacctcgacagggcttgccttgtcttttgatcggaagctttggctaacgaatgtcatgcaaggcgcaacagtacatagaaatactgcgtcttgaccctagtaacgcgtcgatcttgttgtaatagtagcgagctaaagttgtttgtaactggccatgattgagatgtattggtcctactatacagcgcaataaaaacccaacggtcactgcaatgcttggtgggattc

SEQ ID NO: 120138 - DNA, 6713 bp, Zea Mays
cttcggtcatccacctagacggcaatggaggccgccgctgccgacctcatcgccgccctctcgtccccatcctcattcgctggcctctactctcgcttcgccgcctacctacagcccttcaccccctacctgcacagctcaaaccctaacaccaagccaccgcagaagagggcgacgaagcagaacaagcagccgccgcctcccgacgcggccaccctccgcccccttgcgaagcgattcctgccgtttctcggtcgcgcgctccacctcctcccgccgctcgtccgcgcttgtcctgtttcgggcgataagggcggcgaagccgccgacgaactgcttgagatctacggcctcctcttggactgcctagaggccatatcaccctgccttgcggggaaaccctactccgtgttgctccaacgcggccgcttcatctgttgcctcgagtcgcgcggtcacttcgcacgcgccagtgcggaggctgccgctaccctcgacgccctccgctccgcgctctctccacccaccacgagcaccaagtcgcgacgtggtgctgcaggcgttgatcccgtcctccttccggaccccggcagcgctggggaggctggcacggatcctgaagtcaccctccttgcggttgagctcactgtttgccttgctaattgttccagcaagggcaaggtgaaggaacctaccccttatgaacgactcatcagccttttcaaacagctaaaaccatggcttcgtattcttactaatgaagtcagcaggaagtatctcccgttgcttatgaatgccatgagccggtgtaccctttttctggtttctgagtcttcccttttcaatactgatctagtgcatggattctgtcgttacacgatgcaagagtgtgtgggggaggggatgattgagcttttgccagcaattgctcgcaagatttgctcttctgtagatttgacttggggagggagcacacagcttttgctccatgtgctaaaaactgtcactgattctgttgtacgtttaaaggatgatttaccaaaatctgtaaatgagcttctggtttcctctcctactgcctcaatgcttcttctttatgcgactgggttatacttgagtgcccagcaagcagaaagtgaaataccaccctatttatcggtgggtattcccaaggatcaaaagtatctacatgccttagagaagggtcttggcacattagcacgatgcccacatgataatacatctttggtcacatacttggactctttggagtttattagcaagatattatcacagcaagtgaatacactttggaaggacttctctgaaggaaaaccaacccattattctggtaacatggactatgtcttgacagcactgcatcagttcattgattcgagcttcacgtcttttagctgtaggcaaatgtctcaaggggacaacgagagacagcatgaacaacatggaaccttactgacagtccttgtttccgcgatcaagttttcctttcttaccaagaaagatatccagaagagcttgggtttcatcgtctgtgccatttcaagtaaatggtttacacttgaggagctcaaattcttgataccttcacttggcaacatcggagtgacacttcataacactggacatgttaaagaggcaccaaaggctttagaactgtgctgccaaacaatatgggcacacatcagccttttttactatagactatcttcaagaacaaaaggaaacgacattatgacagatctgtcgatggatacactgaaggatatggatatcattttggatgcattttcaagaattgcaaagatggttgatgctctctgtagatgtggcacagagatagaaacaccacttgtgattgttgcgaagagtttgtctataatgttgcctgatggcgacaattctgaatataacaaatgttcttttatactgatcaaggcatgggttaaggcagtacacaaggattttagggatactaaggtggatgatgctccacttctctatccctttcttctgaaatatcggtctccatggccaattaagctgataggcttaatagtagagcaggagttattagcatatggattaactgaagcccgaagcatagaattctgctctaaaatgcagataaggatcatagatgttctgcttcataaaatttactgtacgaaagaacattttttggagagatcaagggttcttattagaaaggcaggtgcacttcgtgcatctggagtggaaaacataaaaaactgccttgagtctctacgtgatgccatatctttactggaagacaaacttggtggggaggtaatatttgatagcgctgagaaagcacttaacttgtggttggacatggaggcttttgaccattcttcttctgatatggtcttgcaacagccatcaaaaactattgtaccacttatttgtttcctggttgatttgttgtctatgaagggctgttttgagcttcagtttaagttgtgcaaggttatgataatgatatggaagcaagaaaaattacccattgagaagttgttgtccttgctgagaacgctgcctagtgccttatttattcctcaatcatgtaagcatccctttggaaggcagttcagtttcgtcacgagtgttgatgaagtcagcaaagttgcctcatctctggtatctggagatacttcaaatgagcaatctacctttctagctggatgtttatactatgacttgtcagaaaaagttttttcacgcggacaacttttccaggccttttcatatggaaacaaagccctccatttgcgcaaaaagctcctaaaaaagaagttcaaaatcaattcgggcatatctggaaatatggaaagacaacactgtgggcaggacatctctcttgaagtgtgtggccctacaatagttgagatttggccaaattccagcagttcagtcaacactaaagattttttccttaccccatggaatgtccttaggtgctatcttgagagcactttacaggttgctatgatgcacgaattgattggcaatggtgctgaagctgaagttctcttacagacaggaaaagagatatcaaatttccatggtttatcagttttctgtattgtatttacatcatttctaggtcaactatattgtaagcggcagctatgggatgaagcggagagtgagcttaattatgcccgagatcttgtgaaaaatgatgcaacaatttcatgtaagctctgcagtctgactttggggatatctgttgacatgcaagttggtgatctgtcttggagtctgtttgaaaaaaaaattcataaacagattacagctggtttgtctaacactttaggcatgtaccaatctgcaatagacaaattgaatagcactaacttggaatattgtaacgggtcctttgatagacatacaactggttatcttgtgtgcagcaaagactgtataccgagcaagtatgaagcttgtaatttgggggcagaacccctaacttcaaatgatggattgttatctccatgtagtgtttgcatggtaatacaagttcgaaggaaaaactcagggaatgctgaagctggtccacctttagatgcaaaagcaaggaggtcatcaagaaattcatcacgtttagctaagggacagaatgtagagactcttgcaaagactagaactcgctctagtaaacgaaatgcatgtatgaaaagtgagaaggttttaactgagctaaatagtaaaaataacgtaactgggagtaaggaattggctgcagatgcttctgtttgtggtgaagcagagtgttttcctgatggcattgatcacagcaaagacgacctatgcaatatgtttggttgctggagctgccttttcattaaatccctcaattcggggtgcattcagaatattttgcagctgagattggactatgttcaccgacactaccttgtgtcacttcttttaaaaaaagctagagccttgggatctcatagcaatggggactgtgaagttcatagtgtctattggaagtgcatatcactgctgttcttcaggtcccttccacaagattgctgtaggacttatgggccttatttaattggactaatcatggataggagcattggtgattttcttcctttagagtgtgcagaaatactattcaatatgagcttcttcttgctaaaaagccccctttctgaacagtcaagggacatctgctgtatcttctctagtgtaacaatggcagacgttgtcccctggttgctcaaagcttttgttctatccagagagagcccctcacttgttcaggaggtttgcaagttacttgcatgcatattcttgctatcaactacagattcctcaattcaactgcctttgggttctcataaagaatctctttctttgaatcactgggccacatacttccatcaagtttctgtgggaactaatctcaattgtcattactttgctagcttacaagcatcgtccgaggaaaaggttccaaaggacacctataaagatttcagaaatgagacagatgacaatgtctcgaaatttctcaggttgtcatcaagggacatcaaatatattgagaaacatatgacagaattcttccaaaaacttcctgatgtaccagttctgtgcattagtatgcttggaggtgattatgttaatgcccttctgaaattccattgccatcctccgttttttcctgcttggatgttgctttcaaggtttgattcaacaaatgaacccacaacattgcttcttccagtggattctatttcagcagaaatgcaatttgaagattcctgcaccaaagatttgggcaatccaacgagagttttagataagtggcaatgcccttggggctatggaattactgactatgtagccccagtttttagaaatatactcgaggagaattttatgtccctctccagcgcaacccttactattgatgatgtaaatgcagatcgtgtcaggtggtggtcccatagaatgaagctcaacaattaccttgctaacacattgaaagacattgaagattcttggtttggaccctggaaatgccttctgttgggccatcaattatctgatgaacacattgagactgcctcatcaatgattatcactggtctggatacagaattcgaatttgaagtcaatccaatgctcatcaaggctatccttggtggtgctgtgtcagtggatgaagtacaagaatgttttctccaactcattttgtataaaggttactttggaaggggaggatgctgtgggaaagatagacttaaagctttctcttcctgccaaatggatgatggatctatggagacactcaaacgtataataacggatgcatcatatgagttgcctcagccagctgatagagatccagttattttagttcttgatgtcaatgttcagatgcttccttgggagaacctgcctgtactaaggaatcaagaaatttatcgcatgccgtcaatgggtagcatctttttagcattatctcgaaccaataatgattacaaagatcacagttctccttttcctgtcatcgatcctttcaatacatattatctgttgaatcctagcggtgatctgagtagcacacaagaagaatttgttcagttattcagaaactatgagtggaagggagtggctgggaattctccgaaggctgacgagctggttttggccttgacaaatcatgacctattcctgtactttgggcatggaagtggaacccagtatatttctagtaaggaagtcgaaaagatagataactgtgcagctgctcttcttatgggatgtagcagtggaacacttcattgcaaaggaagttatgctcctcgaggggccccattatcatatttatttgctggttcccctgctatcattgcgaatctctgggatgtttcagacaaggacattgacaggtttagtaaggctttgctcaattcatggttgcatgacaaatctctagatggcaacaattgttcaaaatgttgccagctaacaatggagcttgagtccatgagtattgcttccaaggaaaatggtaaagcaagacgacaaggcacacgaggaaagaagcaacaacatataaatgatagtaccaagtgctgcagctgcaagcagaggcgaatagcttcatatataagtgaagctaggagggcttgcaggcttccacttttgataggcgcatctcctgtgtgttacggcgtgcctacaatcattaggaagaaagtaatgacggattctaccacgagagagatgacctaaaagtgtggtagtatcggcatggtattggtgactattgatagtgtgatctatggcgttgatggagttggcacgaaagtgtgccagctcaaatgcactgactaatttatgctttatacccagtgcttggacgcatggtcttgctggacgacctgcagtgggcgtgcacctattggtattccagagctgtaacgagtgtatattgaagtaaatgttctgtacaatggcgctgtacataactgtaatgtcactggagcatcacttagagaaagtatgttgaggctattgatttcaattgtataacgtgtactatagttttgtccaggaacatagagaatgcatgttgaggcagttaatttcaattgtataaaatgtgtactacagttttgacccttgtaagttacttataagaa

SEQ ID NO: 120139 - DNA, 345 bp, Zea Mays
ggatccaggattgattcaagaggggggctgcaagcataggtcctaattattttagaaatagaagcatcttttttctagttcttgatgagaaatttatcatcttatttctgcctgctcgggctatcgggcactcggtcggcggctgtccggctcagcctcggcgggcgtgccgcgtgcggcagcggcagccaagccagcagcgggcagcgggcagcgccgcagtgggtggcggcgtggcgcagaagactcgcgcctggcggcctgggcgctggcctgggtgctggccacggcttgggtgcccaactgcccaaaagacttgcgcctgggctgggcggtggccggtgg

SEQ ID NO: 120140 - DNA, 2180 bp, Zea Mays
gccggcgaagaatttcttcgttactttacttccaagcggagtccagggcaaaatttcacagtagtgcgcagcttcagttcaatataccctagcgcctctcttcccccacagggctctttcccgtatgaacggggcccatatcgccgccgcctcgccggaggccggcgggtcgtcctcgtcggcctcgtcttccggcgtctcggcgtccgggcgctcctggctgctcaagggggtgcacctgcggcggcggcgccggtggcggcggcaggtggccgttaggggaggggtgagagccgatggcggcgatgtgcaggatcttgcgctgcctctcgggatgtccttcgcggcggtgcttgcccaggttgtaaatagatgcgctggttctgaagggggattacgacctgatgtcctctcaaagatgtgtacctcggcagtgaaggagtccttaacaaatatttatggtgacagatttcatagcttcatgagtaactttgagaaagcttttggtagtacattgagaaccattcaccttatcaatgaaacgcctgtttttgagcaagatgtggagcaatgttcttacaaagatgatgattctgtacctcaaatcaagttgggtggtgctgattcattacctgaaataaaggttggtggtgctgattcacaaagtcagatacatgatgtccagactgacatgccctcgagttcaatgaatagccagattgttcttcatacaggcatcaatgatcagttggttcatcttacttgtagcaggtctaatccagaaattggtcagcacatccttagtgtatttgagagatcgctgaatgagcaagctcgttcaaatgagctcaaagagcttgaaataggacttactatgagaaaattgcaattgagtcgatctcagttagctctgagctctgaatcacaaatgttagagaagatcaaagttcatatgggatttcagaaagcctcattcaaagagaagaaattcaagactgaaatggaggatacaaagcatgcagaacttttcaggaaacttatagatatgctccttactgcagtggtactcatgtctgtctgttttggatatggaacatatatttattcgtaccagcggataactgctgctacttcagcttgtgcagcaatttcaagggagtatacatcttggtggatgccaagttcagtgtcagcaatcaactccggtttgctgcttttcaaatgccatgtgatagccgcaacaaggatattctttggaattttgatgctcctactaatcggttggttgatattccagcgttctgcaatgactggaccaaacatgccagtaacattcaatgttatgatattgggagttctttgtggttattttggaagctgctgtgttgacacactgggcggggatggaaatgtatggcttatatactgggaggccctttgctccatccatttacttggaaatatttggccatctcttttacatcacatgctgtatggtcctatttctgtgactcacaggaccaaggctggtcatttgccatattgggcccgccgatacacattttacattttggtgtcacttattctgccatgcttggctggtttgctgccatttgcatctctgtcagactggaaagagcttgctgttcaatatttgaagtccagattcagtggaattaatattgaggattgattattgagagattggttgtggttaccggtgtaatctcaatcccattttgcgaaggtgtaaaggttttttctgtttgtcacatatgaattgtatatcattgtagcgaaggagggaagatttttttgtttggcttcctttcatcctcggactgaagatatgtaaacaaagttgttggaatgacaacaaaatatctcctttccttggtagtggaatatcagatgggctaggttctgatagttgtgctcctatgcgcactgctacagatatcaagagcaaggcacttcatatcgggaagcttagaaatataatacagtgtgcaatttcattgcagattttttgtgaccctttttgtgcaaggacattgtccacagtgattgttatctgatgatttctcttcccctctcttctcaatcatctaggttgcagttcttctcttcagtgggaatccactctacattgaaagttttgcttgcatatagtccttcag

SEQ ID NO: 120141 - DNA, 1936 bp, Zea Mays
aactaccccggtgttatggctgcggccgctcctccgtctctcgcccaccccgcacctccgcgctccacgaaagaattccaacgcgcaccgcgccatgcgccgcgggacgtcgtctcctggacgtctaccatctcgcgcgcggcgcgacagggtgacctgcatgcggcggcagcatctctctgcgctatggtctcctcccccgccgcgcccgcccccaacgacgtcacgctacttaccgttctctccgcctgcgccgactccccatcctcgccgctagccagccccctcgccctcaccctccacgcccgcgcgctcaagctattcccctcccacctcctcctctccacctgcctcgcgcggttctacctcgcgtcccgcctcccgcatctggcgctccagctgttcgactcaatgccggtccgctccgtcgtcacctacaacaccatgatctccgggcttatgcgcaacggcctcgtcgacgccgcgttcgaggtgttcgacgggatgcccggcccggacaaggtctcatggacggcgctcatcgacgggttcgtcaagaacgggcgccacgacgaggccatcgactgcttccgcgccatgctgctggacggcgtcgagacggactacatcacgttggtcgccgtcgtgtctgcgtgcgcggaggtaggcgcgctcgggctcgggatgtgggtgcaccggctcgtgctcaggcagcggctggagcgcaatgtccgcgtcgccaactcgctgatcgacatgtatgcgcggtgcggacaggtgaacctcgcggcgcaggtgttccgctccattaggaagcggacggtggtctcttggaactcgatgatcgtcgggttcgcagccaatggccggtgcacagacgcgatcgagctcttcgaggagatgcggaggcaggggttcaagccggacgcggtgacgctcaccggcgtcctcacggcttgcagccacgccggtctcacggagcacggcctgaggtactacgacctcatgacgacagagtacggtgtcgccgcgcggatggagcactacgggtgcgtggtcgacctgctcggccgggccgggcgcctggacgaggcgatgcacgtggtggagacgatgccgatgcggcccaacgaagtggtgctcggggcactcctcgcaggctgccggacgcacgggaacctggacatggccgagcagatgatgcagcacctcttcgagctggatccccagggcgacgccaactacgtgctgctttccaacatctacgcagccgtcgggaagtgggacggcgcggggaaggtccgaagcctgatgaaagcgcgcggggtgaagaaacggccggggcacagcaccgtggagatcgacggcgacgtgcacgagttcgtgtcgggagatcagtcccatccgctggccggggagatcggacagatgcttgggctgctctggcacgagatgacgaggtatggttgtgatgtgcatggaggcagcagctttgatggggattgagttgctgatactgcgttaacgtagaagatgccatgcctgcaggctgcaatctgggttcagcgttttgcctttgcctatggatttaggaatggtgatggaataagtcttgagcatctagatgacagcctgcttttgactgtcctctgtagtcctttagcatttagaggacagcttgactgtcctctgtagtctctttagcatctagaggacatcagtcattttttgactgtcctctgtagtcgctttagcatctagaggacaatcctgttgtgtagtgtgtgtgagaaggtgtggtagtgcagcccctagggctataaatatgtgttcccaacccctctaagggtatgacattgtgtagtgtttgaggaaataaacagaaaattgccccaactcatagtgtcatcctcttgatgagagttagagtccctct

SEQ ID NO: 120142 - DNA, 3095 bp, Zea Mays
atgtccattggtgggagttctgttgtcaacgaggttgagggtgcattacgtggaagaaaaattaatgacttaactgatgttgaactgggcccatgcttggagaaaggagtatcttcacatgatcattgttttgttcggggtgataatggtagagatagggtagattcagttgaaaatagcttcaatgctcgtgattgtgattcaaattgctctcatggacaaccttttttcaactttgatgattcacattcttatattcatccattcattcagaaaaagatatctcatcattgggacattactttcaatcagaataaggaagctctgaatcactatatacaagagtcatcatatccttcccttgagaaagtaccaactgattcctcggtagaagtagagggtacagccgatacaactgcaacaggtcaagttttgaaagcaaggtctttaaaaattcttgagcattcacctgatgatgaagtagaaggagagatggtatacttacaatctaggctgcttgacaatgctgttgttctgaagcacagatatgaaaaattgatagcaatggttgtccaaaatctctctcgcgagctggatgccctcagtaaaagaaaatgggatcttatttttgtgaatcagttccttcgtgatgtcagagaagctaagaaacgtgggagaaaagaaaagagacataaggaagcccaagctgtactagctgcagctgcagctgctattgcatcctcctcacggaactcaaccgtgagaaaagatgcaaaggaggatgcaccaaagagttctcccaaacttgctgctggatcttcaagggttgggcaacggacttcattgccacaggctaatgattcatcaaagtcatccaacagcaaaatatcatcggataaaaaatctggaagttttcttctgccaatctcctctaaagaaaatgggttatattgtgatgtatgcatgcgaactgaaacattgctgaaccgaatatttgtctgctacagatgcaaggctgctgtgcacataaattgctacagaaatttggagaattctattgggccctggaactgtgaactttgtgaagatcaagacatttcatcagaagctgcaaccgttagcgataaatcacattgtaatggcaagaaattaccctttgcacagtgtggcatgtgccatggcacatcaggtgcatttagaaagactgtagatgggaagtgggttcatgctttctgtgctgagtggttgttggacaccaagtatgtaaggggacaagataaacctgtagaaggaacggaaagccttgtagagggaaaggacacttgttgtgtctgcctccacaatgttggcgtgtgcttaaggtgtagcagtggggattgcaacattacatttcatcctacttgcgctagaagttgtggtttttacatgaacacaaaagggtttggtactacaccacagcacaaagcatactgtggcaaacacagcgtacaacagaaagaggctgatgcacagcaatatggacctgaggagctcacgagcatgaaacgaatgagggttgaattggaaaaactacgcctgttgtgtgagaggataattaagagagagaaggtgaagagagagacggttttgtgtgatcatgaaatacttgccaaaactaaggacacagttattttctcctaccttgcatgcggagcaagctcagaatctgcaactacttcagttaataacaggtcgtacagtggagcagcacaaagatctgatgatgtcacagtagatagtactatttctgggaagaaaaccataaggttttctctgaataacagaggtgctgatagaaacacagctgacagctcgaggacattgctatcattcaaacgcaagttgagtgagaggggaccacgagctggtaagcaacttccgcagaggccaactattgctgcagagaaattagaagatgaagacaagaagacaactgataagaagataactatgcaacagagagaaatgtttcaaaaggagctcattatgacatctgatcaagcttctacacagaacctacgccttcctaaaggatatgcttatgttcctcgggactctttatctaaagagaagctatggaaacaaaatacacagccccataatccacaggagcctggtggataggatcagttgaaatcaagccggttcatttctatcgaggaaggccataaaaaacttgtgcaagcttgttctttgcaactgaaaactacaagcggcaagcagggcaggccagcgctattgccacaagggtaacagcgaatccgtgatcttttttggaccgaagttgcataatggtgcagactgtgctatttgtgtgaacgtatggtgtggcaccataacaagaaggctgcctcccacccacccacacaccaggtaccttgaatatgaccagcaatatgggtgaattgacctacctgtgctataccaaagagagcgtgccaactgtatatatgagtttaatttgtgcgcagattttgtaaatttgccctgtacattcttttcctttgcatatgctagtttagttgtgcaggaaaaagggaattatgaatccttttaggttggataagaaaaggaattagcttggttctttatcatggttcagaagaaaatgcggtggtgcttgcggacaacattgggcaggagtgttggtttgatacatgtactctgtagggatggtgaaggtgccaaaaataaggtcatgccactgctttaacgcaactatttgttgttggttactgggaagtggtatcgtacaggctgagaaacaatgttttactgttttagataattgtcgccggtggctttccatgtccccttatgttattgggaaacactagtccctttagggctcgtttgatggacatgaaaatggagatcattgcctcattgggaagggatccccttgctattcaattttgaataacaaggggatctccttcatttcactgtccaccaaactaacccgaactggtttcgagatgtcaagatagcaacaatgttgaaataggcctgtaagttctttggtcgagaaggtatggtagctgacattatttttt

SEQ ID NO: 120143 - DNA, 3080 bp, Zea Mays
atgtccattggtgggagttctgttgtcaacgaggttgagggtgcattacgtggaagaaaaattaatgacttaactgatgttgaactgggcccatgcttggagaaaggagtatcttcacatgatcattgttttgttcggggtgataatggtagagatagggtagattcagttgaaaatagcttcaatgctcgtgattgtgattcaaattgctctcatggacaaccttttttcaactttgatgattcacattcttatattcatccattcattcagaaaaagatatctcatcattgggacattactttcaatcagaataaggaagctctgaatcactatatacaagagtcatcatatccttcccttgagaaagtaccaactgattcctcggtagaagtagagggtacagccgatacaactgcaacaggtcaagttttgaaagcaaggtctttaaaaattcttgagcattcacctgatgatgaagtagaaggagagatggtatacttacaatctaggctgcttgacaatgctgttgttctgaagcacagatatgaaaaattgatagcaatggttgtccaaaatctctctcgcgagctggatgccctcagtaaaagaaaatgggatcttatttttgtgaatcagttccttcgtgatgtcagagaagctaagaaacgtgggagaaaagaaaagagacataaggaagcccaagctgtactagctgcagctgcagctgctattgcatcctcctcacggaactcaaccgtgagaaaagatgcaaaggaggatgcaccaaagagttctcccaaacttgctgctggatcttcaagggttgggcaacggacttcattgccacaggctaatgattcatcaaagtcatccaacagcaaaatatcatcggataaaaaatctggaagttttcttctgccaatctcctctaaagaaaatgggttatattgtgatgtatgcatgcgaactgaaacattgctgaaccgaatatttgtctgctacagatgcaaggctgctgtgcacataaattgctacagaaatttggagaattctattgggccctggaactgtgaactttgtgaagatcaagacatttcatcagaagctgcaaccgttagcgataaatcacattgtaatggcaagaaattaccctttgcacagtgtggcatgtgccatggcacatcaggtgcatttagaaagactgtagatgggaagtgggttcatgctttctgtgctgagtggttgttggacaccaagtatgtaaggggacaagataaacctgtagaaggaacggaaagccttgtagagggaaaggacacttgttgtgtctgcctccacaatgttggcgtgtgcttaaggtgtagcagtggggattgcaacattacatttcatcctacttgcgctagaagttgtggtttttacatgaacacaaaagggtttggtactacaccacagcacaaagcatactgtggcaaacacagcgtacaacagaaagaggctgatgcacagcaatatggacctgaggagctcacgagcatgaaacgaatgagggttgaattggaaaaactacgcctgttgtgtgagaggataattaagagagagaaggtgaagagagagacggttttgtgtgatcatgaaatacttgccaaaactaaggacacagttattttctcctaccttgcatgcggagcaagctcagaatctgcaactacttcagttaataacaggtcgtacagtggagcagcacaaagatctgatgatgtcacagtagatagtactatttctgggaagaaaaccataaggttttctctgaataacagaggtgctgatagaaacacagctgacagctcgaggacattgctatcattcaaacgcaagttgagtgagaggggaccacgagctggtaagcaacttccgcagaggccaactattgctgcagagaaattagaagatgaagacaagaagacaactgataagaagagagaaatgtttcaaaaggagctcattatgacatctgatcaagcttctacacagaacctacgccttcctaaaggatatgcttatgttcctcgggactctttatctaaagagaagctatggaaacaaaatacacagccccataatccacaggagcctggtggataggatcagttgaaatcaagccggttcatttctatcgaggaaggccataaaaaacttgtgcaagcttgttctttgcaactgaaaactacaagcggcaagcagggcaggccagcgctattgccacaagggtaacagcgaatccgtgatcttttttggaccgaagttgcataatggtgcagactgtgctatttgtgtgaacgtatggtgtggcaccataacaagaaggctgcctcccacccacccacacaccaggtaccttgaatatgaccagcaatatgggtgaattgacctacctgtgctataccaaagagagcgtgccaactgtatatatgagtttaatttgtgcgcagattttgtaaatttgccctgtacattcttttcctttgcatatgctagtttagttgtgcaggaaaaagggaattatgaatccttttaggttggataagaaaaggaattagcttggttctttatcatggttcagaagaaaatgcggtggtgcttgcggacaacattgggcaggagtgttggtttgatacatgtactctgtagggatggtgaaggtgccaaaaataaggtcatgccactgctttaacgcaactatttgttgttggttactgggaagtggtatcgtacaggctgagaaacaatgttttactgttttagataattgtcgccggtggctttccatgtccccttatgttattgggaaacactagtccctttagggctcgtttgatggacatgaaaatggagatcattgcctcattgggaagggatccccttgctattcaattttgaataacaaggggatctccttcatttcactgtccaccaaactaacccgaactggtttcgagatgtcaagatagcaacaatgttgaaataggcctgtaagttctttggtcgagaaggtatggtagctgacattatttttt

SEQ ID NO: 120144 - DNA, 1286 bp, Zea Mays
acctcgcaccacaccgggcgctctagtgcgaacgctgtgcttgggcctgcactgcaccggtcgcgcgcggcctgcgactgcgagccgaggaatccaagaagccgggccggccggagtgtcgatcgttgtttccgccggttgcgagatcggagccagcaaggacaggtcgtcgtgggactagccatgctgcacgccgaggagaagaaggggaaggtgaagagagggtggctggcggtgcgcgtcggggcggcggagggcgacggcggctcccagcggttcgtcatccccatcgcgcacctgtaccacccgctgttccgccgcctgctggaggccgcgcgcgacgcctacggctacgactactccgcgggcccgctgcgcctgccctgctccgccgacgagttcctccgcctgcgcgcgctggtcgagcgggagacgccgccgcacgcggcgccagcgcccgcgtcctcgcaccgcgtgcacgaaggcggacactactctaccctctccccgtgcacccgcgccaaggtcacctcgtgatcgatcacggccggccggctggccgacctgcatgatcggctcgtcgaactcggctttcctacgcgcgcgcgcggcgaccgcgaagaagtttcccatgtctggtggtggtgtactggtatgtagtgtagagattagttagcccggccgtgcatgcatgggggtgggtgcttcctctttgatctccagttttggctgtttggtcttctctttttctgcgtttggttgtgcaggcgcatgtgctgtgtactaaagaattaacagatggatcagcgtatgattactaccgtagctgagttaacactcaatgcatacagttgcagttcatcatcagtcctggccacttggaaatccagcagctacctgcaggttctagaaagacagctgtcggagagcaaatctccggccgggtggcggagtgcacccgccctaaatcctaagatgaggaggggcttaagcgttttgcttgttagttggaaaattgggaagaaacactagagcacacaaggaattagagtggttcgggccgccggagcgtaacaccctactccaatgtgtgatgtattgcttgagagcttgtatgaacttgtgagtgtctgagtgagcctgaaagattgagcctgtgtataacgttgcatgactccccttttatagttgaagggcggcatgcacaaaggtactgagccccgacatgtgggcccagagacataaagaatatagcgcttgaagccataaatgtttgttgctggggc

SEQ ID NO: 120145 - DNA, 1369 bp, Zea Mays
cacaagacacaaccactgtgttgacctactccagtccccagctatcttgcgtagcggcattctcgatcgagctcgtacactcctaaccatcgacatcacgcatcctactcgctctagcggccagagcgtcagagccaggggcggcagcagcgcgcgcggcgcacgacgacgacaggttcgttcgcggcatggtgaagggcgcccagctccaggacgcggcggccgacgccgcccgcaatgcggcggcggcggcggcgaggcagcagggctgtggtggcggcggcccggcgggctgcggcaagaggcagtacaagggcgtgcggatgcggagctggggctcctgggtgtcggagatcagggcgcccaaccagaagacccggatatggctcggctcctactccaccgccgaggccgccgcgcgcgcctacgacgccgccctgctctgcctcaagggctccgccgccgacctcaacttccccgtgcacctccccttccacatccccgccgccgccatgtcgcccaagtccatccagcgcgtcgccgccgccgccgcggccaatgccacctgcggcagcccgctgcaggccggcgccggcgccgccgccgccgcgccccactactactcctactcctcctccgccgcctccacgatggccgccgacggcgccacccctccgtgcagctacggcgacgcgtcgtcgggcgtgagctccccggagacggccgggaacactgatgacctgtgctacggcgtggcgcacgacgacgacgtggacatggtggcgggcgacgcggacctcgccgcgctcgcggacatcgagtccttcttccggtcgcccaagtgcatggagtacgctatgatggacccatgcagcacgttcttcgcgccagcgcccatggcgacggacgcggccagcgagtgggagtgggaggaggaaggcgagatcgacctctggagcttctcgtccctcaactgatcgccagacatcagttcggaggtcaagccggcctcaagcggtcaccattcgtctcaaatcaacgctgactgattaattacaactgcaaccaacctacgtgatcaagaattggtcacggtataaataagcatcatatataaatatgctatgaaggattatttgattcataccactagttaattattgcactatatattactagtgctaggctaattatgcaatgtggagggaggctctcatggagctacatgttttaaggcagctttccatggagtcaatctcctctccgttgcatgccaggctatgtgtagacgaagctgtgtttttctgcaagtgcaagtaatgtataatgaattatcatgaattcatgatctactcctacttgtgtccaa

SEQ ID NO: 120146 - DNA, 117 bp, Zea Mays
ggcggctagggaagggagggagagaaaagaccaagcttgataccatgttaactccaatcagggtgggctacgttgcatatattggaaaaggagttacatgggcgggaccagggtcca

SEQ ID NO: 120147 - DNA, 905 bp, Zea Mays
agttcagcagtaaaccaaagaagtcgtaacagtaacagttcggatcgggtaacctgctatcgctagcatccgctaaccctagcagtctaacactagcagaggagaaccgtaggatttggcggacgggcgattgcacgcccgtgacttcgaccccgacgtcccttcccaactcgtccaccgccgccgcccgccgtcgcaaaactcgccagcggccagccatggggtacacgaaggaccagcttctcgcgcacctccagaagcttaagattgatttcacgtgctacgatcacccggttgtgttgacagtggaggaacaggccaaacatgttggccatttaggaggtgctttgagcaaaaatttactcttgaaggacaagaagcatcggttatatgttatttctgcccttgctggcaccaaagttgacatgaaaattctttcccaacgtcttgggttgggaaaaggtggtctacgaatggctcctgaggaaaatcttctagaagtacttcaggtgcccttagggtgtgttactccttttgctttaataaacgagtctgcgagtgctgtttcacttttacttgatcaaggtttcaagtctaaacagagctgctacttccatccactgacaaatgatgtgacaattgggcttgggacatcctatgttgagacaacatatgcagaattaagttcctcatgcgacaactcatctatttcacagtgacatggacattacagctgcataagagaatgtgatacaattttatttggcaaaaactttgctaaagatatataccaggggtattccaagatggttcaacaaagattatgctgactttggggccgatagactcagactcggtccgaggactcgaactcggtcttagggactcggcgaccgggagctcgg

SEQ ID NO: 120148 - DNA, 1540 bp, Zea Mays
accaaagaagtcgtaacagtaacagttcggatcgggtaacctgctatcgctagcatccgctaaccctagcagtctaacactagcagaggagaaccgtaggatttggcggacgggcgattgcacgcccgtgacttcgaccccgacgtcccttcccaactcgtccaccgccgccgcccgccgtcgcaaaactcgccagcggccagccatggggtacacgaaggaccagcttctcgcgcacctccagaagcttaagattgatttcacgtgctacgatcacccggttgtgttgacagtggaggaacaggccaaacatgttggccatttaggaggtgctttgagcaaaaatttactcttgaaggacaagaagcatcggttatatgttatttctgcccttgctggcaccaaagttgacatgaaaattctttcccaacgtcttgggttgggaaaaggtggtctacgaatggctcctgaggaaaatcttctagaagtacttcaggtgcccttagggtgtgttactccttttgctttaataaacgagtctgcgagtgctgtttcacttttacttgatcaaggtttcaagtctaaacagagctgctacttccatccactgacaaatgatgtgacaattgctcttagctcaagtaatctggacaagtttctcatctccattgggaagcaaccagcatatgtggacttggaggctgcaccagctgtgggtaaggataatcctcctgatctagcacatttggttccaactggtgtgccaaattcttcagaacaaccagttgagaacacggcacctactaatgttcttaaagagacagaagtgaaggctaaacccaaagttcagagcaagggtgcagaaacatcgagcaaagtagataaacctactaccgataccagtgttgacaaatttgtaaatgatgtgttcgagatcatctccccattgttcttgtctgaggcattgaagaaattggacattaagaaggaagatctttctttgatcttagaaggcctcaggggacgggcagatccagatttgaagagtatagcgatgactctgaagaatgcatcatatacctcagggtttcacgctggttacaaaaccatgcagaatcgtggtctaaacggctgacccacttaggtcccagtctctcaattgcatggtttgatacaagaaacaggaatctgattttacatatttgtatgctgttgaatgaagtcaacatattatgtttgatgctctcgttctatctatgacgtatgctctttttttgtgtatgtgtggatttgcctttttctctctctgagagatcaatgggaaattttcaccataccgtgcagtgttccatagaatatgtatttacaagattctgctactcgctctaccaacatcagagtttcagtgtatcagatacatcacatagaaatgtcttcggcgcgttccagaaattactgttaacatggtatatcacccaaacagtcgttttacgtgccctttaacgatgtgtaattcactcgcctttacagtgggcgtatt

SEQ ID NO: 120149 - DNA, 1494 bp, Zea Mays
aaactcgtgggcatggcatgtcgaaaacagagctccaattctttgttgtgtgcttgtacccttgtgggcttgtggtagtcactctgctattcatcatgtcttgcgacagtgctgcatgctggtcatcactctcatgtggcatgtggcatacttctgaaacaaatcattgagatggtgtctccaaaaattaatctacgtactcgtcactgtgtgccaagcatgtcattctgaccaccgaagatctcataaagccctaatatcattagagtcaaataatgtctgatagatgagttagcatgtgaatatattgattctaacatgatcagcatgcgattgattcaatgcaagtgcaaggatcataaacattcttccactgtcccacgacttaacccattgtcgtggtggcactgaacgtggtgtccttgggtgacccacttagaaaatttagagtttagtgatgggtttgctcattttatagtgcagtgacctatttgcacatacaagagaagtctggtgacctcggatgcaatttacccgatatattattttgtttcatggtttatttataatttacttcatccagctcttagctcaagtaatctggacaagtttctcatctccattgggaagcaaccagcatatgtggacttggaggctgcaccagctgtgggtaaggataatcctcctgatctagcacatttggttccaactggtgtgccaaattcttcagaacaaccagttgagaacacggcacctactaatgttcttaaagagacagaagtgaaggctaaacccaaagttcagagcaagggtgcagaaacatcgagcaaagtagataaacctactaccgataccagtgttgacaaatttgtaaatgatgtgttcgagatcatctccccattgttcttgtctgaggcattgaagaaattggacattaagaaggaagatctttctttgatcttagaaggcctcaggggacgggcagatccagatttgaagagtatagcgatgactctgaagaatgcatcatatacctcagggtttcacgctggttacaaaaccatgcagaatcgtggtctaaacggctgacccacttaggtcccagtctctcaattgcatggtttgatacaagaaacaggaatctgattttacatatttgtatgctgttgaatgaagtcaacatattatgtttgatgctctcgttctatctatgacgtatgctctttttttgtgtatgtgtggatttgcctttttctctctctgagagatcaatgggaaattttcaccataccgtgcagtgttccatagaatatgtatttacaagattctgctactcgctctaccaacatcagagtttcagtgtatcagatacatcacatagaaatgtcttcggcgcgttccagaaattactgttaacatggtatatcacccaaacagtcgttttacgtgccctttaacgatgtgtaattcactcgcctttacagtgggcgtatt

SEQ ID NO: 120150 - DNA, 1571 bp, Zea Mays
taccccccttcatattcgcctccgcctccgcggctgtctccctcgtcaaatccacgcgaccgccgcgaggggctctcagaaagcaccagtaccaaaagccacccgagggagacgaatcttccgaatctctcggcggcgatggcgctctccgaccgctcccgcgagtcgctcctcccgagcttcctctacgcctcctcggcgcgctccttcgccgccacaggcgccgccgcgcgcctccatgcctccgccccggcgcctgccgcggctggagcaggaggcgccgtgccgttctcgatccaggcgcccaacgagaagatcgagatgtactcgccggccttctatgccgcctgcaccgtcggaggaatcgccagctgcggcctcacccacatggccgtcacgccgctcgacctcgtcaaatgcaacatgcagattgatccagcgaaatacaagagtatttcatctggatttggtgtcctattaaaggagcaaggggctaggggctttttcagaggatgggttcctacattgcttggttacagtgctcagggggcttgcaagtttggcttctatgagttctttaaaaagtattactcagacattgcagggcctgagtatgctcagaagtacaagactctaatctacctcgcaggatccgcatctgctgaggtaattgctgatgtggctctctgtccttttgaagctgtgaaggtacgtgtgcagacacaacctggatttgctcgtggattgagtgacggtcttcccaaatttgtccgatctgagggtgctcttgggctttacaagggaattgttcctctctggggtcgtcagattccttataccatgatgaagtttgcttcctttgagaccatcgttgagcttatatacaagcacgctgtgcctgttccgaagtctgagtgcagcaagactacccagttgggtattagttttgctggtggttacattgctggtgtcttctgtgctattgtttctcacccggccgataaccttgtgtctttcctgaacaatgccaaggatgctactgttggcgatgctgttaagaagcttggtctctggggtcttttcactagagggctgcctcttcgtatcgtcatgattggtacccttactggtgctcagtggggaatttacgatgctttcaaagtgatggttggactcccaacaacgggaggtgttacacctgccccggcagcgaaggctgaactgaaagccagtgcttgatttttctgtattcacggagatcattacttggtggagggtggaagtgtatcagtcactcgagagtttagtttccgattttttttttcttaaaaggaaaatttgtccatcatccttttggtgagaggaactcattaaacaggtggagtagatcttttttgtcccgggaaaagtttatgctttgatgcataataatttgtaggacagcagtgctgttagagcgcaggttttgtttacctcctgtaccgaggaatgcttactaagtcacatttcacattatggtgtttattttgaaagcgtgcacctcgcttgatgtccttttttgcccttgctgt

SEQ ID NO: 120151 - DNA, 2717 bp, Zea Mays
tgacggcctgcctgccacggttcacggttgaaacggagcaacgcttgcgaacgcgccattccgctccacgctgccctgctctgctcccccagtcccccaccacaactggcgtcgccttccccggggaatgcgaccgcgcgccagagcatgccccgcccggagcccgcgctagggttccccgcccgcgcgtccaagccgccgccccagcgccgccgcaagaggcagccgccgacgaggcggaggcgaccggccggtgccgcaccggtggggccacgcggcgcggccgatccagatccggcgcactcctccgcgctgctgcccctcccaagcggcggcagtggcttcgcctcgcggggcacggttgcgccagacgaggaagaggggagagacggagcaagctccgcagaatcggaggaagtggcaaaagcaacaaatcattcgttctcccactcagtgagagagtgccagaagcagcgtcgactcaagtcagagaggtctgcactggcgcgcccgacggccttgcatgagctcaacagcgctggaggtgttgagctgctagtgctctcgccgagatgcttgattggtaacccgggaggaatgagcaagagctcgacgacatcatcccggagcagatcaggcacaggcacaggcacgttcccgagccctgggaccccgaactacaaccggcattgtgcaggcagcatgcagtactccaagggttggagttcagagcgcgtgccgctgggcactggtagcaatagacggtatgggggcagtggggttgtgcttccgtttaacaatgggaggaagctgccgtcgaaatgggaggacgcggagaagtggatcctaagtccggtttcctgtgatggtatgggaaggatgtctgcaccggctccgcatcatagacggcccaagtcgaagagcgggccccttggccacccagctggcattccaggggcttatgccgctgtctcaccgcttgttccttgctttgatggtgttctggcagaagctaattttgcagtgcattcacctttctctgctggggttctcataccagagcacgggcgcattggtgacttcagcagtggaagaggtagatgtggtgacgatggtagcagcagatcctactctgcagagaaggagccatatatattaagatctgcaagcatacatgcctggacagaaacgcttatggaggcatctgcttttgctaacatctccgaagaaaccgtacaagatgataaactgcaaggccagacagaagcaacttccaatatttcgagtccaatcataaagaaagatgtcggcacacaaatgagtcctgaggataatatagcatctcctccaaaagcaaggcattcctgctccagtctgccttcaaggcatctgatacaagaagcaaatagtcatatacctaaacctgaaattagggacgtgcaggttgatgaccaagtaactgtgacccggtggtccaggcgacatgtaacacgaggctctgataagaggtcaacaaatattgtcgaatggaggaagaagaccgttgaaacccgagctccatcttttgatgaaaaagaaagagaaggatgcatgtcaaagtgcaaaagggaggaggcaaagatcactgcttgggaaaatctacagaaagcaaaagcagaggctgccattcgaaagctggagatgaaacttgaaaagaaaagatcatcgtcaatggacagaattctaggcaaactccgctctgctcagaagaaagcacatgacatgcgaagtgtagtttcttatagtgaagatcattgtggtgcgaggacaaccaagaagacatctttccttgtcaaaactggcaagcctttcagctgctgctttacctaccgtgcttgctagttgtggcacagctggtgccactggattcagcaatggatatagttctatgcgagctcttctcaggcaacagttatggatgtgaagtcagttggattttgactacatggcctaattgtcaatgagatatgcacaatctgatgaacaagatattattatggagcagcagacaaagaagtgtctatctttctcaagagctcttctcaggcaacagttatggatgtgaagtcagttggattttgactacatggcctaattgtcaatgcgatttgcacaatctgatgaacaagatattattatggagcagcagacaaagaaagtcatcgagctaaatccactcatgtagctaatggtgtggactactatctgctgctgtatagcctgcgacgatgactctgtacacccggtaaaaaagctcgtttcacgagcttcatgctagttagaatctggattgagctgatattcatcctgcttcatgtgtagctttcatggaaattgtgtatgtaacccaaatcatgggcgcattacagacctaacggaaaaaagtcagtgctgcgcctttagaatgcagcttgctctcttccttattttgaaacttgtttggttcagttctggaggcttgcggtccagcactgaaacttggcttgtttgtttattggttcgcagcgagtggaatttgtaactgagacgacaaaaaccctatttcccctcctttttggtgaacatgataaacgtctccaacttccgttagggcacgtacaaagcctcttgatcagttttttttatgcacaagagataattaagagacaacatggtacaatcataagtccttatatcat

SEQ ID NO: 120152 - DNA, 2705 bp, Zea Mays
tgacggcctgcctgccacggttcacggttgaaacggagcaacgcttgcgaacgcgccattccgctccacgctgccctgctctgctcccccagtcccccaccacaactggcgtcgccttccccggggaatgcgaccgcgcgccagagcatgccccgcccggagcccgcgctagggttccccgcccgcgcgtccaagccgccgccccagcgccgccgcaagaggcagccgccgacgaggcggaggcgaccggccggtgccgcaccggtggggccacgcggcgcggccgatccagatccggcgcactcctccgcgctgctgcccctcccaagcggcggcagtggcttcgcctcgcggggcacggttgcgccagacgaggaagaggggagagacggagcaagctccgcagaatcggaggaagtggcaaaagcaacaaatcattcgttctcccactcagtgagagagtgccagaagcagcgtcgactcaagtcagagaggtctgcactggcgcgcccgacggccttgcatgagctcaacagcgctggaggtgttgagctgctagtgctctcgccgagatgcttgattggtaacccgggaggaatgagcaagagctcgacgacatcatcccggagcagatcaggcacaggcacaggcacgttcccgagccctgggaccccgaactacaaccggcattgtgcaggcagcatgcagtactccaagggttggagttcagagcgcgtgccgctgggcactggtagcaatagacggtatgggggcagtggggttgtgcttccgtttaacaatgggaggaagctgccgtcgaaatgggaggacgcggagaagtggatcctaagtccggtttcctgtgatggtatgggaaggatgtctgcaccggctccgcatcatagacggcccaagtcgaagagcgggccccttggccacccagctggcattccaggggcttatgccgctgtctcaccgcttgttccttgctttgatggtgttctggcagaagctaattttgcagtgcattcacctttctctgctggggttctcataccagagcacgggcgcattggtgacttcagcagtggaagaggtagatgtggtgacgatggtagcagcagatcctactctgcagagaaggagccatatatattaagatctgcaagcatacatgcctggacagaaacgcttatggaggcatctgcttttgctaacatctccgaagaaaccgtacaagatgataaactgcaaggccagacagaagcaacttccaatatttcgagtccaatcataaagaaagatgtcggcacacaaatgagtcctgaggataatatagcatctcctccaaaagcaaggcattcctgctccagtctgccttcaaggcatctgatacaagaagcaaatagtcatatacctaaacctgaaattagggacgtgcaggttgatgaccaagtaactgtgacccggtggtccaggcgacatgtaacacgaggctctgataagaggtcaacaaatattgtcgaatggaggaagaagaccgttgaaacccgagctccatcttttgatgaaaaagaaagagaaggatgcatgtcaaagtgcaaaagggaggaggcaaagatcactgcttgggaaaatctacagaaagcaaaagcagaggctgccattcgaaagctggagatgaaacttgaaaagaaaagatcatcgtcaatggacagaattctaggcaaactccgctctgctcagaagaaagcacatgacatgcgaagtgtagtttcttatagtgaagatcattgtggtgcgaggacaaccaagaagacatctttccttgtcaaaactggcaagcctttcagctgctgctttacctaccgtgcttgctagttgtggcacagctggtgccactggattcagcaatggatatagttctatgcggcaacagttatggatgtgaagtcagttggattttgactacatggcctaattgtcaatgagatatgcacaatctgatgaacaagatattattatggagcagcagacaaagaagtgtctatctttctcaagagctcttctcaggcaacagttatggatgtgaagtcagttggattttgactacatggcctaattgtcaatgcgatttgcacaatctgatgaacaagatattattatggagcagcagacaaagaaagtcatcgagctaaatccactcatgtagctaatggtgtggactactatctgctgctgtatagcctgcgacgatgactctgtacacccggtaaaaaagctcgtttcacgagcttcatgctagttagaatctggattgagctgatattcatcctgcttcatgtgtagctttcatggaaattgtgtatgtaacccaaatcatgggcgcattacagacctaacggaaaaaagtcagtgctgcgcctttagaatgcagcttgctctcttccttattttgaaacttgtttggttcagttctggaggcttgcggtccagcactgaaacttggcttgtttgtttattggttcgcagcgagtggaatttgtaactgagacgacaaaaaccctatttcccctcctttttggtgaacatgataaacgtctccaacttccgttagggcacgtacaaagcctcttgatcagttttttttatgcacaagagataattaagagacaacatggtacaatcataagtccttatatcat

SEQ ID NO: 120153 - DNA, 1545 bp, Zea Mays
atatccatccattcccctcgccaagccgccacggcctgactttccctcccgcacacccgcgaccatacaggcaagtcaggcatacaccaacaacgctcgtcgtgcacctcgcgcctcaggtcaccccaccaaattcctcttgatacgccgaatttcttttgctaattctgctacctcctgtcgctaagccaccatattcagtctaacccctgctctgagctcacctgattggcggctccgttcggcctctgggcctgggtgtaccgactaccgagggctctttcgaaatgtcaattgggtcgagtttggtgggctacgtgaagcatggatgaatttcccggctggaagcgggaggcggcagcagcatccggggccggagcacctgtcgccgatgacgccgctcccgctggcgcggtaggggtcggtctactcgctcacgttcgacgagttccagagctcgctcggtggggccaccaaggacttcggatccatgaacatggacgagctcctccgcaacatctggtcggcggaggagacacacagcgtcacagctgcggaccatgccgcgcgggcgccgtacgtccagtgccagggctcgctcaccctcccctgcacgctcagccagaagaccgtcgacgaggtctagcgtgacctcgtgtgcaacggtggaggaccctccgacgaggctgtggcgccgccccaccggcccaacggcagccgacgctcggggagatcatgctggaggagttcctcgtccgcgccggcgtggtgagggaggacatgatggcggcggcgcccgtaccaccagcgccgggttgcccaccacctcatctgcaaccgccaatgctgtttccacatggcaatgtgtttgctcccttagtgcctccgctccaattcgggaatgggtttgtgtcgggggctctcagtcagcagcagggaggtgttcttgaggccccggcggtatcgccgcggccggtgacggcaagcgggttcgggaagatggaaggagacgacttgtcgcatctgtcgccatcaccggtgtcgtacgtttttttgtgctggtttgaggggaaggaagccaccagctgtggagaaggtggttgagaggaggcaacgccggatgatcaagaaccgggagttggccgcgaggtcgcgtgggaggaaacaggcgtatatgatggagttggaagctgaggtggcaaaacttaaagagttgaacgatgagttgcaaaaaaacaggtcgaaatgctggagaagcaaaagaatgaggtcctggagagaatgagacggcaagtcggacccacgataaagagaatttgtctgcggaggacgttggcaggtctgtggtaagctcgtggacctgtacctagcagtatcgctcgtgaaggaggagtgtgtatagtagggggaagatggacacacggtggccagagtcgcccttgttcacaccgccattaatccaaagccttataggcgcagatagattgtctgtgattgtcactttataagcttttgccctttacatcaaaaaaaaaaaaaaaaaaa

SEQ ID NO: 120154 - DNA, 738 bp, Zea Mays
ttctcgaagcgaccggggattccttccttctgctgttctgcatctcgaatgattgattctctccccgcaccccacgccacaaatgcaaggtggtggcggcggcggccatggctcggccgtacgtcctcgagagctcatcggcggctcagcaaggacatcgcaaccacctgcgcccactgcttcagccgcatcttcaccgtctccggcggattacctggagatagtatggacatggggctgccgagcggcgactcgtcagaggacgcctccgacgcggcgccgcacgagcacttcggcccttccgcttcgcatgccccgcccccgccgtggacggcgtagtagaggtcgagcgcgggcagcgtgtccaggaggcggttcctcacggcgcagccgcacgccgcgcacaccgactccgcgggctcgaagccgaaccccaggtcgatgcacccgcggagctcggcgaggtcgtcgtccgtgacgctccgcgcgcgccgcagcgccgtgcctccgcggcgcatgtcccggcgccggcgctcccacacctcgtcgcgctcgatgtccggtgaccacgacttatgcttctgcagccccagcgcgggcgccgcggcaggacacgccttcttctccccgccgccgccgccgccgccgataagatgaagattgcgctgccacgccttgtccatggccacggcactgctgtacacccttcccttccctccacggctccacccccttgcg

SEQ ID NO: 120155 - DNA, 1299 bp, Zea Mays
cactccctcatgcagcatcgcggctaacttcccagccactgcttgcaccatcccgattcccccccacccgccgcgcaacaaggcgcaacccagaccccggcccctccagctcggaaaacccccccgacgagccaccgccacgcgacgccccctcactcactcactccgccgcccggcccgccgcgcgaggccggtcctggaacacggcgcgccgcgctcgtacccatgccgtaacgcccgaacccgccaaccgagccgcagccgcctcgccgcgcacacatgcacttcccctcgccgcgcgcgctcgccatggccgcgccggcggtcgcccgccctcgcctcgcccccgtggctcaccccgcctcgacctcttgcctgctggccctctgggaccggaggcgcgggcacggccgcgcggttgcggcggtgagggcgcgcgagcaaggcgcggcgccgcccgacccggcggccttcctgcgccggccggaggtagcgacggtgacgtcgacggaggaggagagggaggccgatgcggggtcctcgtttgatggccccggggaggacgaggcgcccgaggaggaaggggtccgggggaggaggaaggcgccggagagggagtgggtggattgggaggaccttatcctcgaggacaccgtgccgctcgttggcttcgtacggatgatcctccactccggcaagtatgaaagtggcgatcggctgtgtcctgaacatgagaaggcgattctggaacgtttgcttccataccatccacaatataatgagaaaattgggtgtggtattgactacatcacggtagggttacatccagaattcgaaaactcaaggtgtttattcatagttaggaaggatggcgagcagatcgatttttcgttctggaagtgcgtcaaaggtctcattcggcaaaagtaccccatgtacgcggacagtttcattctcaggcatttccgcaggagacaagactactgaagtagttgctcgtacggctgtttcagtgttatatttttctgtgtaattgattttgtcctgtccctttcatatcatgcgattctagcatttgttacgtggagtttttcattaagcatattattccatgcaacataaatagatataggtttgtcgcttgcagatgaaattgtagcgcgccatttagttactacatttctaattgtgagtcgttctttttaaaaaaattatactttttgctgcataattagatatatattatgtatagatgtaaaaggtatatataaaataacctaaatgacttataatttgaag

SEQ ID NO: 120156 - DNA, 2204 bp, Zea Mays
gcctctgtcaacgcgatacagcagtaaacatgagtacaacgtgagctcagagccgtccatggcgtacgagggcacgtcggtaaaatctcaacgtcccgtcccgtgcctgcctgccatttcgattagttagaggagctgcgcctgcgtctgcctgcccccttgaactccccaagagccaagaaccagcgcagcagcgcgccccctccccgccccacaataaaacagccacacgctcgccacccatggccaccaccaccaccaccaccacagcacaggcccactgccaccgctaccgctaaccatggcctcctcagcgtccctgcagcggttcctcctgccctcctcgcacgcggcggcgacggcggcctcgccgtcctcccggctgcgccgcacagggcgcgcccgcgcggccgtctccgtgccgccgccggcggcggcgggggagcaggtcccgacggagcggctggagccgagggtcgaggagcgggcgggcgggtactgggtcctcaaggagaagtaccgggcggggctgaacccgcaggagaaggtgaagctggagaaggagcccatggcgctgttcatggagggcggcatccaggacctggccagggtccccatggagcagatcgacgccgccaagctcaccaaggacgacgtcgacgtccgcctcaagtggctcggcctcttccaccgccgcaagcaccagtacgggcggttcatgatgcggctgaagctgcccaacggcgtgacgacgagcgagcagacgcggtacctggcgagcgtcatcgaggcgtacggcgccgacgggtgcgcggacgtgaccacccggcagaactggcagatccgcggggtgacgctcccggacgtcccggccatcctggacggcctccgcgccgtcggcctcaccagcctgcagagcggcatggacaacgtgcgcaaccccgtcggcaacccgctcgccggcgtcgacccccacgagatcgtcgacacgcgcccctacaccaaccttctctcctcctacgtcaccaacaactcccaggggaaccccacaatcaccaacctgccgaggaaatggaacgtctgcgtcatcggctcgcatgacctgtacgagcacccgcacatcaacgacctcgcgtacatgccggccgtcaaggacggcgagttcggcttcaaccttctggtgggcgggttcatcagccccaagaggtgggccgaggcgttgccgctcgacgcctgggtcgccggggacgacgtcgtccccgtgtgcaaggccatcctcgaggcgtaccgggacctcggctccaggggcaaccggcagaagacgcgcatgatgtggctcatcgacgagctcgggatggaggtgttccggtcggaggtggagaagaggatgccgaacggggtgctggagcgcgccgcgccggaggacctcgtcgacaagcgctgggagcggcgggactacctcggcgtgcacccgcagaagcaggaaggcctgtcgtacgtgggcctccacgtgccggtgggccggctgcaggccgcggacatgttcgagctggcgcggctcgccgacgagtacggcaccggcgagctccggctcacggtggagcagaacatcgtgctccccaacgtcagcaacgagaggctcgacgcgctgctggcggagccgctgctgcaggagcagcggctctcgccgcggccgtcgatgctgctcagggggctggtggcgtgcacgggcaaccagttctgcgggcaggccatcatcgagaccaaggcgcgggcgctgcaggtggcgcgggaggtggagaagcgcgtggccgtgccgcggccggtccgcatgcactggaccggatgccccaacagctgcggccaggtgcaggtggcggacatcggcttcatgggctgcctcaccaaggacagcgacggcaagatcgtcgaggccgcggacatcttcgtgggcggccgcgtcggcagcgactcgcacctggccgacgtctaccggaagtccgtgccgtgcaaggacctggtgcccatcgtggccgacctcttggtggagcggttcggggccgtgccgagggagagggaggaggatgaggagtaggaccttcgtcaagcgccggctgggactgtcctgacctattttatgaggtcttgattggatgtatatatatattcatcttaatctatatggatttctgaagtttgatcta

SEQ ID NO: 120157 - DNA, 896 bp, Zea Mays
ttgaactccccaagagccaagaaccagcgcagcagcgcgccccctccccgccccacaataaaacagccacacgctcgccacccatggccaccaccaccaccaccaccacagcacaggcccactgccaccgctaccgctaaccatggcctcctcagcgtccctgcagcggttcctcctgccctcctcgcacgcggcggcgacggcggcctcgccgtcctcccggctgcgccgcacagggcgcgcccgcgcggccgtctccgtgccgccgccggcggcggcgggggagcaggtcccgacggagcggctggagccgagggtcgaggagcgggcgggcgggtactgggtcctcaaggagaagtaccgggcggggctgaacccgcaggagaaggtgaagctggagaaggagcccatggcgctgttcatggagggcggcatccaggacctggccagggtccccatggagcagatcgacgccgccaagctcaccaaggacgacgtcgacgtccgcctcaagtggctcggcctcttccaccgccgcaagcaccagtgtacgtccactcccactctgcaacagggctagtttacttgcatgcagctcgtaatgcggccgagccgcttgccactcgttcggtctcgggcgactctgttcttcacttcttgatgcgctgtgacgtgctgtgtctgcggcagatgattgaacaggacagttgttctctctgagacataatgtctgccaatcgttgcttacggccggcttagagctcgcgtctgaatgttcgacgcttccgtctgatcgttttcgcgcgctcatgtttaccttttgggctggttctggaatctgcatcttggttttgtttccctttcagatctgattcacgctgcgtcaacgtgcttgc

SEQ ID NO: 120158 - DNA, 899 bp, Zea Mays
ttgaactccccaagagccaagaaccagcgcagcagcgcgccccctccccgccccacaataaaacagccacacgctcgccacccatggccaccaccaccaccaccaccacagcacaggcccactgccaccgctaccgctaaccatggcctcctcagcgtccctgcagcggttcctcctgccctcctcgcacgcggcggcgacggcggcctcgccgtcctcccggctgcgccgcacagggcgcgcccgcgcggccgtctccgtgccgccgccggcggcggcgggggagcaggtcccgacggagcggctggagccgagggtcgaggagcgggcgggcgggtactgggtcctcaaggagaagtaccgggcggggctgaacccgcaggagaaggtgaagctggagaaggagcccatggcgctgttcatggagggcggcatccaggacctggccagggtccccatggagcagatcgacgccgccaagctcaccaaggacgacgtcgacgtccgcctcaagtggctcggcctcttccaccgccgcaagcaccagtatctgattcacgctgcgtcaacgtgcttgcaaagtggtgaatatgctgcgtgggagggagccttgtaaagtagtcggacgcatgggatttcagtcccctaaaatcacaacctgtgctaatctcacccgcataacgacacaagatcccctgccgactgttaaaaacaacagtttaggacgtcatttcaaaaacaaaaacaaacgcgtagctgaacccaaaaaaagtctcagcttgaactcttggtaggcaatagaaaatttcctgttggcatcatggggttggcagcactagctagtactaaatagaagcatcccagctgccaaagttctgtgctgaatagaacgtctgttc

SEQ ID NO: 120159 - DNA, 1315 bp, Zea Mays
gcacaggcccactgccaccgctaccgctaaccatggcctcctcagcgtccctgcagcggttcctcctgccctcctcgcacgcggcgtcgacccccacgagatcgtcgacacgcgcccctacaccaaccttctctcctcctacgtcaccaacaactcccaggggaaccccacaatcaccaacctgccgaggaaatggaacgtctgcgtcatcggctcgcatgacctgtacgagcacccgcacatcaacgacctcgcgtacatgccggccgtcaaggacggcgagttcggcttcaaccttctggtgggcgggttcatcagccccaagaggtgggccgaggcgttgccgctcgacgcctgggtcgccggggacgacgtcgtccccgtgtgcaaggccatcctcgaggcgtaccgggacctcggctccaggggcaaccggcagaagacgcgcatgatgtggctcatcgacgagctcgggatggaggtgttccggtcggaggtggagaagaggatgccgaacggggtgctggagcgcgccgcgccggaggacctcgtcgacaagcgctgggagcggcgggactacctcggcgtgcacccgcagaagcaggaaggcctgtcgtacgtgggcctccacgtgccggtgggccggctgcaggccgcggacatgttcgagctggcgcggctcgccgacgagtacggcaccggcgagctccggctcacggtggagcagaacatcgtgctccccaacgtcagcaacgagaggctcgacgcgctgctggcggagccgctgctgcaggagcagcggctctcgccgcggccgtcgatgctgctcagggggctggtggcgtgcacgggcaaccagttctgcgggcaggccatcatcgagaccaaggcgcgggcgctgcaggtggcgcgggaggtggagaagcgcgtggccgtgccgcggccggtccgcatgcactggaccggatgccccaacagctgcggccaggtgcaggtggcggacatcggcttcatgggctgcctcaccaaggacagcgacggcaagatcgtcgaggccgcggacatcttcgtgggcggccgcgtcggcagcgactcgcacctggccgacgtctaccggaagtccgtgccgtgcaaggacctggtgcccatcgtggccgacctcttggtggagcggttcggggccgtgccgagggagagggaggaggatgaggagtaggaccttcgtcaagcgccggctgggactgtcctgacctattttatgaggtcttgattggatgtatatatatattcatcttaatctatatggatttctgaa

SEQ ID NO: 120160 - DNA, 1778 bp, Zea Mays
tatagtagctttttatagacaacgaatatattatataccttacctttgtcacaaatacgatctttcctgcctttctgtgttatctcgaaccagcggcttcagtttcgttctttcttggaccacccgttggttggtcctacagaggagaggacaagacgtcccggattgggttcactccgagctgagcctgagaccgtgagacgaactggtcaagcaaggtgacaacactgttgttaactaacgagcaacgactaacgacacctccatccccatggctgtgctgcactgcagacgggcggttcatgatgcggctgaagctgcccaacggcgtgacgacgagcgagcagacgcggtacctggcgagcgtcatcgaggcgtacggcgccgacgggtgcgcggacgtgaccacccggcagaactggcagatccgcggggtgacgctcccggacgtcccggccatcctggacggcctccgcgccgtcggcctcaccagcctgcagagcggcatggacaacgtgcgcaaccccgtcggcaacccgctcgccggcgtcgacccccacgagatcgtcgacacgcgcccctacaccaaccttctctcctcctacgtcaccaacaactcccaggggaaccccacaatcaccaacctgccgaggaaatggaacgtctgcgtcatcggctcgcatgacctgtacgagcacccgcacatcaacgacctcgcgtacatgccggccgtcaaggacggcgagttcggcttcaaccttctggtgggcgggttcatcagccccaagaggtgggccgaggcgttgccgctcgacgcctgggtcgccggggacgacgtcgtccccgtgtgcaaggccatcctcgaggcgtaccgggacctcggctccaggggcaaccggcagaagacgcgcatgatgtggctcatcgacgagctcgggatggaggtgttccggtcggaggtggagaagaggatgccgaacggggtgctggagcgcgccgcgccggaggacctcgtcgacaagcgctgggagcggcgggactacctcggcgtgcacccgcagaagcaggaaggcctgtcgtacgtgggcctccacgtgccggtgggccggctgcaggccgcggacatgttcgagctggcgcggctcgccgacgagtacggcaccggcgagctccggctcacggtggagcagaacatcgtgctccccaacgtcagcaacgagaggctcgacgcgctgctggcggagccgctgctgcaggagcagcggctctcgccgcggccgtcgatgctgctcagggggctggtggcgtgcacgggcaaccagttctgcgggcaggccatcatcgagaccaaggcgcgggcgctgcaggtggcgcgggaggtggagaagcgcgtggccgtgccgcggccggtccgcatgcactggaccggatgccccaacagctgcggccaggtgcaggtggcggacatcggcttcatgggctgcctcaccaaggacagcgacggcaagatcgtcgaggccgcggacatcttcgtgggcggccgcgtcggcagcgactcgcacctggccgacgtctaccggaagtccgtgccgtgcaaggacctggtgcccatcgtggccgacctcttggtggagcggttcggggccgtgccgagggagagggaggaggatgaggagtaggaccttcgtcaagcgccggctgggactgtcctgacctattttatgaggtcttgattggatgtatatatatattcatcttaatctatatggatttctgaa

SEQ ID NO: 120161 - DNA, 1053 bp, Zea Mays
cctgagacatcatcgccgcgacctcggagtacacgaccgccatctattctccgccactttttggcgacaccgacgccacgtcgtcgcactcgaatcggcagagccaccaccaccccccgcaatgacgtcgaggctggagagcggcgggttccagctcccgaacaccgagcaggagaacgcactcttgctccgcgcgctcatctccgtcgtgtccggtgacaccgccgccgcgtcgttggtcccggaggcggccgccgcagaggcccctgccgccgcggcgtcagcgtgcgggtgccccggcggctgcgacctcgccgccgcgtcgagcagcgacagcgatggcgcggagtgctccgcgagcggcggaggcgcgggcaagcggaggcggaggcggagcagggcgagcagttacatgggcgtgcggcggcggccgtggggcaagtgggcggcggagatccgcgacccgcgccgcgccgcgcgcaagtggctcggcacgttcgacaccgccgaggacgccgcccgcgcctacgacgccgccgcggtcgagctccggggccgccgcgccaagctcaacttcccggacgccgccgccgccgcggcggcgcgggatgtgcagccgcgccgcccgttgcccggtcagagcctccgcgagaactgcgggtccaacgccgcgtcgccgctgcacgtggcggtggcgcgggcgccgaccacgctgcagggaacagggccggcgccgcccaaggaccaggacatctgggacggcttgaacgagatcatgacgatggatgacggcagcttctggtccatgccgtgatcctgctacttcggccgtccatctccggatcttcctcttgttgttgtgcgtttatttttatgatgaccagattctacggttgttttttaggggaagagaatcataaattgaattttggagccatgtggccaccagctcactggctgtgctgtaaatctgtaactcgtcagtcagccatggctttcgtacgagttttacaccaccgtcatccctcaatcccctttaatacgaatggaaaa

SEQ ID NO: 120162 - DNA, 234 bp, Zea Mays
atggagagtctagtcacattttatatttctatagaataccctaggaaatcaataaatatgttccctggagaatatgatattcttgatatgcagatgacaggcaattactccggcctccgtgtatcagtgaccagcaaccttcccctatggtttgaagcagcgaaagatatagagaatgctgatgaagagaagctggaagaaattcaagaatgggaggtcggcaatgctagttga

SEQ ID NO: 120163 - DNA, 1781 bp, Zea Mays
atcgacaagtttcagtccccagctcacatcctcgcagttcctgacgtgcggcagcattttccctgtgtcggctccacgcttgagcttgcagtcgtagacgtgcggcgcatggaagcacggctccatggacacatcccggaagcacggcgggtccggcggcgacgtggcattcgtgggcttgtgcaacacccacggcgtcatgccgccgagcccctgcgccacgtacccgaacgtggaccagccgctggtcaccagcacgtcgcacaggctcagcaggtacatctccgcccaggcccggtcgtcgtgcgacttcttgccgtactgctgctgcccctcgtggctgggctggtgcacgctcacgtcctcgccggtcgccgtcgcttgatcccagtacagccccttgatgcgctcgtagtaccacgaccggagagaggtgaccagaacggccgtggttctggcgccgcccggcgccggcacggcgtgctcttccgtgtcaagaacctccgggagcagtttctccctccacaggcacgacgtgatctgccggagaacgaccggcgactgctgcgcccagggatcgaagttgcgcacctggacgcccagacggagctccgcccgcgcgaggtacgcgcggtagtaccgcgtgacgaggccccagacgcggttggtcggatggaacaggtaccgcgccaggtggtggaacacggcgtcgcgctccgggaacagcacgtcgagctcctcctggaacgccgcgaccaggaacagccccggcacggtgtacatgtcggtcctcatgaccagccactgcacgctcgacagcagccgctggtcgtcgtcgcagaagaacatcttgtcctcgtcgccgtagtcgtggtcgaggtggaggtacacgaacgccggcaactgcgtctccgtcggcggcggcggcacgtcggccctgagcaccctgttcttcagcatgttgccgtagctctcggcggtgtcgatgctgaagttagtgtagctcgcgagggggaactcccgcggcagcagccacgtcgtgccggggaaaggctcacagaagagctcgcccatgtcgttgctggggtccacgaggaggacgcggtcggtgagcaccgcgtagaggaacgccgacgcggcggccaggatgcggttgccgaggccacggtacgagatggagacgacgtacttgcactcgggcgagcccacgcttttgccggccctcagctgctggacggcgcggctgtacgcgtcggtgttcggcccgcaccgtctctggagctcttcgtgtctccgcagctttgctatgaggtgcggtgaaggtcgccgtgccggcctccggctgtacagggaggactcgtacctgctgcggcacgttctctcatcgagtccatcggccaggaggccgccgagaagtctgtctggtaccacgagaaataaacaacgacatgaaatggaagtgtgtaactcacctcggcgtagctgggccttggcggccgcgatccagaccgcgggcgcaatgccgcccccagcgaaaacgacgacgaccggcggcacggccatgacgaaggcgacaagcatgacgttgaccaccgtgttccatcgcttctcgtccagggaaagcctcttcttccgcggcactggtgagtgctccggagccccttcgccctcaggccagctgctgttgtgtgccatcgccagctgcgacgacgccgggatctcctgcgccgccgcgctctcggcgccaccccagacaaccttggccttgcgttgctgcattt

SEQ ID NO: 120164 - DNA, 2283 bp, Zea Mays
cgagtcttgccgacctggggcctgctgcgcctggatgaagagctgtgctgagagaatcattaaagcagcaccgggtccttgctttgcgcgttgctgttcgcataaacaagagatcctagttctactcccaagcaatgtatccgtcagcccctccggacgcgtataacaagttcagcgccggggctccgccaacggcgccgccgccgccggcagcgtaccagcagcagcagcacggggcgaacatggacacttcacgccccggcggcgggctgaggaaatggtccaccggcctcttccactgcatggacgacccggggaactgtctcatcacatgcctgtgcccctgtgtcacgttcgggcaggtcgctgacatcgtggacaagggcacctgcccatgtatcgcgagcggactggtgtacgggctcatctgcgcgtcgacggggatggggtgcctgtactcgtgcctctaccggtccaagctgagggccgagtacgacctggacgaaggggagtgcccggacatcctggtgcactgctgctgcgagcacctggctctgtgccaggagtaccgcgagctcaagaaccgcggcttcgacctggggatcggctgggaggctaacatggaccggcagagacgaggagttgccggcggcggcgcggtgatgggggcgccgccggccataccgctgggcatgattaggtagatgattgattgatgcgaaatggcagaacttgctttcgtggttcttttgtttgactatgtaatgtatcttcgtttccatcgattctatgtaatttaactgtccttttttttgctctctattgtggaggacgctgggtgtgaatagcactgttttggatgggtttgtgattggtctagatgacttatataaggtgcttgtatacattgtttgtagaggggagttctaaatacgacgtgacatagagaatataataggagagctgcaggagtgcgtggggagcgtggttgcatggtgtcacctttccatgtgaccaacgatggtgacagtctggactggaccacttgattagcatatgcaacaacacaccagcaccagaagaagcaatgcgatgcgacggtggattggagtgtattgggtcagatagattggaggtgagcacttacctgactgaagctccaggttttgtggtgtggccggcgaatggcgatcacagagaaggtttcagagattggtccggcaggcaggcagtcatcataccaaaaggacgtggttcgtccatcacccaccttaaccgacgtaatggcctgataaagcgggaggagggtttgcagtttgtcccaatgatctccagctggcttagctagcgtcctggtccgattgaatccagcgtgtccaagaggatgacgcgggtttgtgcagtttgtgaactagcttcaggagcaagcagcagttctgaacatgcatatcagtcacacctaaacctccaaggagctttcttttgacagactttatcccaggagaccagacaacgcgcaccagtggtgttatcacgaccattccagaggaaagcacggcggcgggagtcaacctttctgacgatgccacaggggggatgagcaatgctgacatgacgtaaaccagctgtgaggtaagcaatgcacggagctgacaaggaccgttcgaccggccgggttcaggagaagagagctccaaccggagaggaatcggtcggatttcggcagtaaggtattgtggatagacaatttgattttcgtggttgacaatgggagacctagatatagctcaaggggagactttcaagtttgcactgcaacaccgagatgcaaggcgcgatgcattttcggagctggcatggataggggctaggctagggtactcttgtcgaagttgatattcaggccagtgaagttttggcaatggtgcacagaattgtcttgagcttggagttggagatccctacatggtcagcacgggtgatgattatggagtacatcggcgacaagaaggaagagatagggtgataggggatcaccctgtcggagtcctttttttgcagtgaaaccaggggccgagcgggaggtggggaggacctgatggacccatgcacacaccattgcggtgggaagcccctaacattcataatctgaaggagagctgcccaattgactgtgtcgaatgcctttgctaagtccagtttgagaaccacagctggtggcattttccttttatgacaggtctgaaccgtttccattgcatagacgaaatcccttgcttgtag

SEQ ID NO: 120165 - DNA, 847 bp, Zea Mays
agcaccgggtccttgctttgcgcgttgctgttcgcataaacaagagatcctagttctactcccaagcaatgtatccgtcagcccctccggacgcgtataacaagttcagcgccggggctccgccaacggcgccgccgccgccggcagcgtaccagcagcagcagcacggggcgaacatggacacttcacgccccggcggcgggctgaggaaatggtccaccggcctcttccactgcatggacgacccggggaactgtctcatcacatgcctgtgcccctgtgtcacgttcgggcaggtcgctgacatcgtggacaagggcacctgcccatgtatcgcgagcggactggtgtacgggctcatctgcgcgtcgacggggatggggtgcctgtactcgtgcctctaccggtccaagctgagggccgagtacgacctggacgaaggggagtgcccggacatcctggtgcactgctgctgcgagcacctggctctgtgccaggagtaccgcgagctcaagaaccgcggcttcgacctggggatcggctgggaggctaacatggaccggcagagacgaggagttgccggcggcggcgcggtgatgggggcgccgccggccataccgctgggcatgattaggtagatgattgattgatgcgaaatggcagaacttgctttcgtggttcttttgtttgactatgtaatgtatcttcgtttccatcgattctatgtaatttaactgtccttttttttgctctctattgtggaggacgctgggtgtgaatagcactgttttggatgggtttgtgattggtctagatgacttatataaggtgcttgtatacattgttt

SEQ ID NO: 120166 - DNA, 2241 bp, Zea Mays
catttcaagccccccgccccgcccgtagcttcttccaccaggttgacctgctccaagcggaggagagagagagagaagccggcacaagcaagccgtcgccacacggatcaaaaatcgaaacgagagctagcttttaattgacaccagagaggcagcagtccgagcggatcgagctagcagctagcaggccgcgcgcggcggagttgcgggagggagatggacgtgaagcggtcgcggagccctcgggctccgcccgacgacgacaggaagcgtgccggcggcggcggcgggtggcgcggctccggcggcgtccgcccggagatggtgctcgtcggcttcctcctcacgctacccctcctcttcctcgtcttcggcggccgctggggcagcggctccttcccttcgtcgtcgtcgtcgtccgctacctcctctccgcccgtcgtccccaagcctaccgcccgccgcgtggacggcggcggcggcgaccgcggcgcgacgcctcgtcagggccaaaaacctgttggtctgaacaacgtctctgtatcgacggcaacatcagtgtcccaggataagcttctaggcggattgctgtccgcggcattcgacgaatcctcctgccagagccgctacaaatcgaacctgtaccggaagccatccccgttcccgctgtccccctacctggtgcagaagctgaggaagtacgaggcgaggcacaagaagtgcggcccgaggacgaagcggtaccggcgggccgtcaagcttctcaaggccgggcgcaacacggacgactcggagtgcaagtacgtggtgtggttcccctgcaacggcctcggcaaccgcatgctcaccatcgcctccaccttcctctacgcgctgctcaccgaccgggtgctcctcgtgcacgtcccggcggagcaggagggcctcttctgcgagccgttcccggtcagctcgtgggtgctcccgggcagcttcccgcagaacaatccccacaagctccacatcggcgcgccggagagctacgcgaacatgctcaagaacaacatcgtccgcaacgacgacggccccggcgcgccggcgtcgtcgtcgctgcctccgtacgtctacctccacctggagcagttccagctgaagctgtccgacaacgtcttctgcgacgaggaccaggtcacgctcagcaagttcaactggatgctgctcaagtccgacagctacttcgccccggcgctgttcctgacgcccatgttcgaggccgagctggccaagatgttcccgcggagggaggccgtgttccaccacctgggacggtacctcttccacccgaccaaccgagtctgggggatcgtcaggaggtactacgaggcgtaccttgccagggtcgacgagaagatcgggttccagatccggatcttcccggagaagccgatcaagttcgagaacatgtacgagcagctgatgcggtgcgtcagggagcagcggctgctgccggagctcggccccgccgagccgccgacgaacgcgacggccgacgctggcgacgggaaggtgaaggcggtgctgatcgcgtcgctctactcggggtactacgagaagatccgcggcatgtactacgagagccccaccaagagtggggagatcgtggcggtgttccagcccagccacgaggagcagcagcagtacacgtccaacgaccacaaccagaaggcgctggccgagatctacctgctcagctactgcgacaagatcacgatgagcgcctggtccaccttcggctacgtcgcgtacagcttcgccggcgtgaagccgtggatcctgatccggccggactggaacagggagacctccgacgtcgcgtgcgtccggtccacgtccgtggagccgtgcctgcactcgccgccgatcctcgggtgcagggccaagacggacgtcgacgtcgccgctgtcaagccgtacgtccggcactgcgaggacgtcggcttcggcctcaagttgttcgatagctaactctctcagtggacgtacagctcgacgatccaactcttttctgaactgcgtgtctggcctgtggtctgtggagttaggcatttcgagattcgttgtattcgtttaagcggtaccttgtagtcgtgtacaggtgcgaattaagttaagttacaaaaatgttttgagtactgtttcaaattcgttcttcagaaaacaaatcgcatatatacagtatatagactgctataaatgtttcct

SEQ ID NO: 120167 - DNA, 1775 bp, Zea Mays
aagagcaagtgacgactagaccgactaatccgactccctagctcccacactaccaccatcccaccatctttaaaaagcccccaccactacatcctgcgctgcaaacgcctcgcctctcctcgcctctgttcagctcacggtggaagaggaggcgacaggccgacagcacacgagagggagctagcactagcagaagcgcgcgaaggagctcaagcagccacacgccgaccagcaccaccgcgcgatggcgtgcatcaacatgtacaacccagacggcgcggcggggttcggcggcggcccgcagcagccggccgcgctgggcccgcgcatctccttctccagcgacttcgccgtggagccgacgccggtgcagaaccgggcgacgagcctgcggtgccaggaggaggacctcaacttcgagttctccgtgggcagccaccccatgatggccgccgaccagctcttctccaagggcaggatccttcccctcaaggacaacggcggcggcagtgtctgcttcgctgccgcgcggccgcccaccacgctgcgcgacgagctccgtggcggcggcgacgacgacgacgagagggcggccttctccgccgccggcaccaaggggtccaactccaaccggtggaaggagatgctcggcctgcggaaggcgctctgcgtcggcgtcggcggcggcggcaacggcagtccggccaagaaggctagcagcagcgacaagcagggcgtcgttgccgccgctgcccccggccccgacgaccacatggccgcgtccaatcagcaggagcagctatcatgatgaggcgaccgtaccgacgggagactgggactgggagagagagacgacgagacagccatgggatgggagcactccacatgcgtgaacaagctttaaaattttgtcatccctccttccgatcatccttcctgatgctgttgatcgatcaaccacttgaatcatgcttgtcatcatcggtccatgcctccatggtctagtaggttctgtaaattgttgtgagtttgcttgtgtgctagctagctaggtggcccggcccggccgttgaaaagtgccaaaaaaaaaatacatgtgtattttccctgcatgcatactcgatctaagtgctctgatgatcttctctctagcaagctgtccagtccactcactagcagcagatccatggccagtcgtctttgcttcttttctttgtttcgttcgcctgttagttcttggctttctcctccgctcctccaccctgtacaaagtggctgctgcgtacgtactcgtagatgggaaattcatggtgcaatgattagatttgccaggtggccagatctgtcatctgtgaggtgaggaggctctcgtttaccagcgatggagcctctctgaccgcccctgtggtgggatcaacagtgctcttgtttgtctcattgctccgctggatgactataaattttataatttcataatagagagagagacaacagtcatcagagcgagcatgtgtgaggcgacagcgagagccaatggaggaaggaaggcatggctccccgcgtcccccaaccgttatagatgcgcaagtaggccgtgctaagtaggtcggtattaagggcctgtttggcatggctccagagcaaaactccaaggaggagctggccagagcatgtcaaacaccctaactccagagttgtaaactctatggagtttttggagctgcagtacaattttttggagtacctcttttgctgctctgaaaactccaaaaaag

SEQ ID NO: 120168 - DNA, 1482 bp, Zea Mays
cagaccagaaactcccaccactgcggcgaacgtgcgtagcctgcgcattggtctggtcgtcggcgtcggtcgaatcgcggggtgcggggtcctgcgagatcgaatcggggagcttccgtatcgaagtcggaggccgcggggcacaatgccgggatggcggaggcggcgccatggcgaggggcatagcgcgggcgtcgtcgttcgggggccgcgccaccaccccgtggtgctcctgcaggcacgtcaccgtggatgtctgcctcggcaaactcgtcgccgctctgctcgtgctccgctccctcaccgcccccgccccccgcttccttcgcgcccacctttcccaaccgtgagtggaatccctcgccatgtttacaccttcggctcactttctttggcggtacagccactatacaactcttttttttttgttctttattttgatagattagttcctagctagtccactgaaataattcaaaggtaaaagaagctgcggaagaaattcgcacggcagaagcgacgggaggaactgcggttggtgccgcagcagaaggtttcttatgatattgtacggaagttgctggacttgggagataacagcagcctcgcgtagcagagaggaccgcaggagtggtggaactatggcgtgttgagaagttaaaaggcatcaaagttgcatctacttggaatcaatcaaatttggacctatctagtgaggaaatcagaattttcaaacgagccaaggcatatgcttctggaggccattggcctttggataccaggggaagtcacacgtactgtactgtctgtacatgatgataaacgtgaaaatgaaccagaagaagaagagatagtagcaggtccacccttgtcccgacaatgtaatgctgagctccatacagattatgatggtgccgctgttagatgggattaacgcaccacaaagaatatgttgctgattgttgtcaagcttgtcttgatcaagctacgaacgccaagccaggggaattgaagtgcaatatatgggtttattgcccatcggaatttggatgcttctgacaagacaaatatgagcataaacatcaggagtgctggttgaaacaggctgaccaccccaaactgaacttcaaagacaagttaagtattcagagccttacaagatgctcgtcccaatgcacctgttgtcgtgccgtggatgtctggtgtcacctgtgcttgcactacctcttaccaaacgaacagcatcgagactcaggaattaattagactagtgctgtgctgatccaaccagttccaccgtacatattttttcttttcattttgggaatatactcttttctttttcttcgtttggccccggtatatacgatgtaaaagtaaaacttagcttagtcaacctggcaattggatttggtgggtggtggttgattgaatccagtgattcacctattggcgaccttaattttcctctgattaatactg

SEQ ID NO: 120169 - DNA, 835 bp, Zea Mays
gtgtagtgtgtactggtagtgtagtcggtttccattctttctcgcttggccatccacttacgccagtccatccaagatccaacctctctctctctctctctctctctctctctcggtagtccgatccaccaaaccatgtcgggcagccaggtcggcggcggcgggctgcgagggtggagccctttcgacgtgatccgcagcttcccgtcgacgcccgagtcgctaatgtcgcagatcgacgcggccatcgtctccaccgagtacgcccgcgcctgcgccctcctcgacccctcccaagtctcagcctcgtcgccgcccgagatcgatcccgagggccagggggaccggggagcctcccctctgcctccggcctgctacgacgcgagggtcgcggacgaggcgtaccgcgcggcgtgcgcggcgctgggagcgggacggcccgacgccgccgtgcggtcgctgcgggcggcgctggcgagctgcccgccggacaaggccgcggctgtggccaaggtgaggtccatgctggccatcgcgtcagcgcagctgcacaagcagcagcaccaggcccagcagcagcagagcaggaactgaggccgtcctacttcgccatagctgctgcaatctattgatgcaattattactgcgatgttttattaggccatgatcagacgcaataaacgttcagattaatgcatcctgttccatttgcagccatgtatgtggcccaaatcatggaaagggaatcttgtgagcgttcgtttcttactccatcccacaaagacagccgtgatcagagcggaatggcttaggccatggccatctgccggtctaa

SEQ ID NO: 120170 - DNA, 104 bp, Zea Mays
gtggctgagcatagcccctgcactcgcccttcctctgctgcaacagcagtagcccgttccacggtgtcgtcgacctttgctagttgtcaacaccacgcctcgcg

SEQ ID NO: 120171 - DNA, 447 bp, Zea Mays
aaagaatcagaaattgaacctttccaccaagagccagcctatagtgaaattggtaagttgagggcactaagccttttgtttaagatgagtaagggctcctttttttcagggtgcctctattttaaataggggtacggcatacttgcctgaatcctgaatcgcatagttgtcttttagcttgaaccgcctcctgtgatctaaaactactgatacctttagcagaaagaaaaaagagaaaatagcatttagcttgggtttttttaggtctcttttcgtactagttctatccagctatgagcgaaagtagtcactttcttcaatccaatcgccgctttcattctgaactgtttctgaaggaaagaaagaaaattcccatgtgaaatttcactttcactttaacaataacaatgcctgcttttttaatgttataaacttagaccaaaaaaa

SEQ ID NO: 120172 - DNA, 776 bp, Zea Mays
gcgtactctagaccgaggaaatcctaaccagcttctaccccatccctctctctccgagtttccgttccttggcggccatgcgctttgctgccaccggaaccgagcaagaagatggagatcggacgaggtagagcggcgcggctcgaggaggccgtggcgagaggtggggcgagccgctcatagagcccgtacttgtgagggcgggcgggggtctcgcgccgctcgggaagggtcagaaccggcctccctcgatccggcatcacctcgccggaccaggggccacctcacctcgtctacctcgcggtcaaggctgcgggatggttgagcgttgcaacctggggacggcaagccgcaagcggcgtcgccattttcgtgagattacgacctcgccggagcgccgcttccagccttccactaggctccctccgatgaccggatctgttgttatgaaactcttgcgtgcgtgcgttctcgagcgaccggaaaatttggattttgtcaaagagttaatgaactagtactattaatctggattttgtcaaagagttcatataaatttctcaacgagttttgaactagtactagactttctctttaatgcaattatgcaaacgcaccctgcatcgatttcactagcctacgttaacgcagtgatgataataacggaaaaagccttgccccggctacacactccacgcaaaacacgatccagtgtcgtgcgcgcagaggatccgcgctccgaaaactcacctaggaaaatgccaaaaacaaaacaa

SEQ ID NO: 120173 - DNA, 1898 bp, Zea Mays
ccgcactgcagtggcctagccggcgtcgtcctccccctctctcgctcctctgtcctcccctctccacttgagaagaacacaattaggaaaaaaaggcaaaaaacatttaccttttttctatctgtatattatctgaataaatcaagaggaggaagaggggagggagcgagggagggggaggagtagcaaatccagactccatagcaaccagctcgcgagaaggggaaaagggggaggaagagcttcgcttgtgtattgattgctcgctgctccagtccctgcattcgtgccgtttttggcaagtaggtggcgtggcaagcatggtgccgggctatgactgcgccgcctccgtgctgctgtgcgcggaggacaacgctgctattctcggcctggacgacgatggggaggagtcctcctgggcggccgccgctacgccgccacgtgacaccgtcgccgccgccgccgccgccgccaccggggtcgccgtcgatgggattttgacggagttccccttgctctcggatgactgcgttgcgacgctcgtggagaaggaggtggagcacatgcccgcggaggggtacctccagaagctgcagcgacggcatggggacctggatttggccgccgtcaggaaggacgccatcgattggatttggaaggtcattgagcattacaatttcgcaccgttgactgccgttttgtctgtgaactacctcgatagattcctctccacgtatgagttccctgaaggcagagcttggatgactcagctcttggcagtggcttgcttgtctttggcttcgaaaatcgaagagacttttgtgccactccccttggatttgcaggtagcggaggcaaagtttgtttttgagggaaggaccataaaaaggatggagcttctggtgctaagcaccttaaagtggaggatgcatgctgttactgcttgctcatttgttgaatactttcttcataaattgagtgatcatggtgcaccctccttgcttgcacgctctcgctcttcggaccttgtcttgagcaccgctaaaggtgctgaattcgtggtattcagaccctccgagattgctgccagtgttgcacttgctgctatcggcgaatgcaggagttctgtaattgagagagctgctagtagctgcaaatatttggacaaggagagggttttaagatgccatgaaatgattcaagagaagattactgcgggaagcattgtcctaaagtctgctggatcatcaatctcctctgtgccacaaagcccaataggtgtcctggacgctgcagcctgtctgagtcaacaaagcgatgacgctactgtcgggtctcctgcagtatgttaccatagttcttccacaagcaagaggagaaggatcactagacgtctactctaattgtggtacgcttcaggtgtgctcctcaccgctctaggagtttttgattggttcaaacatcttaaatttagtttggccgctggaggattatggtttagtcaagtagttgctgaatggaacaacaaaacacgcacactacttggtccataaagacaagaaaataactggcagcgtcccgcgagccagcgctgcaatccagttcatgcaagaccctagagtccagggggggtgctggtgtaggtagagagggaacaaggcattcacatacgccgtagagatgagagagcctctcgtatgttttgtacttttgctccttcagtttgcaatgaactatataaacaaggattgccttggggcagtgaacatttgtcggatgaaaagaatcaaaaaggatgggggtcggcagaggaatagaacaatttgatatatttccataaactacagatatgtttcctttttcataatgatgagctatcatttttgttgatggtaaca

SEQ ID NO: 120174 - DNA, 1884 bp, Zea Mays
ccgcactgcagtggcctagccggcgtcgtcctccccctctctcgctcctctgtcctcccctctccacttgagaagaacacaattaggaaaaaaaggcaaaaaacatttaccttttttctatctgtatattatctgaataaatcaagaggaggaagaggggagggagcgagggagggggaggagtagcaaatccagactccatagcaaccagctcgcgagaaggggaaaagggggaggaagagcttcgcttgtgtattgattgctcgctgctccagtccctgcattcgtgccgtttttggcaagtaggtggcgtggcaagcatggtgccgggctatgactgcgccgcctccgtgctgctgtgcgcggaggacaacgctgctattctcggcctggacgacgatggggaggagtcctcctgggcggccgccgctacgccgccacgtgacaccgtcgccgccgccgccgccgccgccaccggggtcgccgtcgatgggattttgacggagttccccttgctctcggatgactgcgttgcgacgctcgtggagaaggaggtggagcacatgcccgcggaggggtacctccagaagctgcagcgacggcatggggacctggatttggccgccgtcaggaaggacgccatcgattggatttggaaggaaggcagagcttggatgactcagctcttggcagtggcttgcttgtctttggcttcgaaaatcgaagagacttttgtgccactccccttggatttgcaggtagcggaggcaaagtttgtttttgagggaaggaccataaaaaggatggagcttctggtgctaagcaccttaaagtggaggatgcatgctgttactgcttgctcatttgttgaatactttcttcataaattgagtgatcatggtgcaccctccttgcttgcacgctctcgctcttcggaccttgtcttgagcaccgctaaaggtgctgaattcgtggtattcagaccctccgagattgctgccagtgttgcacttgctgctatcggcgaatgcaggagttctgtaattgagagagctgctagtagctgcaaatatttggacaaggagagggttttaagatgccatgaaatgattcaagagaagattactgcgggaagcattgtcctaaagtctgctggatcatcaatctcctctgtgccacaaagcccaataggtgtcctggacgctgcagcctgtctgagtcaacaaagcgatgacgctactgtcgggtctcctgcagtatgttaccatagttcttccacaagcaagaggagaaggatcactagacgtctactctaattgtggtacgcttcaggtgtgctcctcaccgctctaggagtttttgattggttcaaacatcttaaatttagtttggccgctggaggattatggtttagtcaagtagttgctgaatggaacaacaaaacacgcacactacttggtccataaagacaagaaaataactggcagcgtcccgcgagccagcgctgcaatccagttcatgcaagaccctagagtccagggggggtgctggtgtaggtagagagggaacaaggcattcacatacgccgtagagatgagagagcctctcgtatgttttgtacttttgctccttcagtttgcaatgaactatataaacaaggattgccttggggcagtgaacatttgtcggatgaaaagaatcaaaaaggatgggggtcggcagaggaatagaacaatttgatatatttccataaactacagatatgtttcctttttcataatgatgagctatcatttttgttgatggtaacatggtatttggcgtcccgttttgtttgcatcaggccattggttgattgcttccaatgtaccttcattgattatc

SEQ ID NO: 120175 - DNA, 117 bp, Zea Mays
ttcttgttcctcccttttacacgtgggagccaatgggaaaggcccagatcggtctgtattatagtcccttttcttctgttgcttgctttcccgagagtaagtggaaagctacaaatc

SEQ ID NO: 120176 - DNA, 2407 bp, Zea Mays
gcccactccagcccagcccagccagtagccgccttctcagtcacaccctttatcactttccccaaattagaatcaaaccctagcttgtcctcctcgtcgatttcccctgaccccccaccagggcaccaggcgactcgccggaaccctaggtagccgcagatcctacgcgccgtgcacgcggccgcctccatggcgacgctcaaggatctcctaccggcgcccaagacgtcagcgtccaccttctacgaccacagcagcgacccctggttcaaggagcggtacggtggggagtcggcgcaggcggccgcggcgacgaggcccgcggccgccgcccggcccgtgccaccttacggaaagcggacggggttcgtgccgcgacggccggaggacttcggggatggcggcgcctttccggagatccacgtcgcgcagtatccgctcggcatgggacgccgtgatgataagggcggatccaagatccttgcgctcaccgtcgacgcacacggcagcgtcgccttcgacgccgtcgtcaagcagggggagaacgcaggcaagatcgtctactctaagcatagcgacctcgtgccgaagatagccactgccgattcccaggcgacgtcggacgacgacgaggagcagaagcagatcgaggagacaactgaacggaccaaggccgccttggagaaggttgtcaacgtccgcctctctgcagctcagcccaagaatgtgccgactcatgattctgagtccaagttcatcaagtataagccgtcacagcaatccgcggccttcaattcaggtgcaaaggagaggatcattaggatgtcagagatggcggtggatcctcttgagccaccaaagttcaagcacaagcgtgtgccccgggcgtctgggtcaccacctgtaccagtgatgcactcgccgccacggccagttacagtgaaggaccagcaggattggaagatcccaccttgtatttcaaattggaaaaatccaaagggttacacgattccgcttgataagaggttggcggctgatgggaggggtctgcaggaggtgcagatcaatgataactttgcaaagctttctgaagcattgtacgtggcagagcagaaggcgagggaggcagtgcagatgcgctccaaggttcagagggaacttatgctgaaggagaaggagagaaaggagcaagagctaagggcacttgcacagagggcacgtatggagaggactggtgccccacctgcaccatcaggtgtgcctgctggtggtggcaggggagcaattcaggatgttgatgaagttatggatatggagcaaccgcgtgaaccacgggaatcacgtgagcagcgcagggagtctagagaagagagggaaggaaggattgagcgtgatagaatccgtgaggagcgcagacgcgagagggagagggagaggaggcttgaagccaaggatgctgcaatgggcaagaagagtaagatcacaagggacagggatcgtgatatcagtgagaagattgctcttggtatggcaagcactggtggtgcaaaaggtggtgaggttatgtatgaccagcgtctgttcaaccaggacaagggaatggactctggttttgccacagatgatcagtacaatatctactctaagggtctcttcacagcgcagtccacgatgtccacgctatacaggcctaagaaggatggggattctgatgtatatggtgatgcagatgaacagttggagaaggttatgaagactgagaggttcaagcctgacaagggatttactggtgcttcagagaggactggcaagcgagacaggcctgtggagttcgataagcaggaagaaaatgatccatttggtctggatcagttcttgactgaggtgaagaagggtaagaaagctgtggagaagattggaggtggaggaaccatgaaggcgagtggtgggtcctcaatgagggatgattatgatggtggatctgggaggtcccgcatcaactttgaaagggggcgctgaggtatttgctctgcttctgcaggtttggaatgctttctcaaatatcttctagcagaatgtcataagaagctgaactctgataagaaagagcatggctcctgtgctgttatagctcatgtgcctactttcagtggttgtgcttaagagtgtactatatggatcctatgatgtctatgtactatgcgtgtatctgttcattataggagctatgagcttcgtttatccatgttccatcaattgttacgaacttacgatacatgttattgggctctattatttcatcagttatcattttgggatatggatggactcaacgtggctatttgttgccatggttgctgcacatgtgctcattctgtttatgaatttcttggtggtgcctattaga

SEQ ID NO: 120177 - DNA, 1173 bp, Zea Mays
agcttgtcctcctcgtcgatttcccctgaccccccaccagggcaccaggcgactcgccggaaccctaggtagccgcagatcctacgcgccgtgaaccacgggaatcacgtgagcagcgcagggagtctagagaagagagggaaggaaggattgagcgtgatagaatccgtgaggagcgcagacgcgagagggagagggagaggaggcttgaagccaaggatgctgcaatgggcaagaagagtaagatcacaagggacagggatcgtgatatcagtgagaagattgctcttggtatggcaagcactggtggtgcaaaaggtggtgaggttatgtatgaccagcgtctgttcaaccaggacaagggaatggactctggttttgccacagatgatcagtacaatatctactctaagggtctcttcacagcgcagtccacgatgtccacgctatacaggcctaagaaggatggggattctgatgtatatggtgatgcagatgaacagttggagaaggttatgaagactgagaggttcaagcctgacaagggatttactggtgcttcagagaggactggcaagcgagacaggcctgtggagttcgataagcaggaagaaaatgatccatttggtctggatcagttcttgactgaggtgaagaagggtaagaaagctgtggagaagattggaggtggaggaaccatgaaggcgagtggtgggtcctcaatgagggatgattatgatggtggatctgggaggtcccgcatcaactttgaaagggggcgctgaggtatttgctctgcttctgcaggtttggaatgctttctcaaatatcttctagcagaatgtcataagaagctgaactctgataagaaagagcatggctcctgtgctgttatagctcatgtgcctactttcagtggttgtgcttaagagtgtactatatggatcctatgatgtctatgtactatgcgtgtatctgttcattataggagctatgagcttcgtttatccatgttccatcaattgttacgaacttacgatacatgttattgggctctattatttcatcagttatcattttgggatatggatggactcaacgtggctatttgttgccatggttgctgcacatgtgctcattctgtttatgaatttcttggtggtgcctattaga

SEQ ID NO: 120178 - DNA, 1113 bp, Zea Mays
atgaacgagttcaagagcaagcgcgacgacgtcaagcgcatggtcgacgccgccgagcgccagggcatggaggtcaccagccaggtcaggtgcgccctgctcgaggacgccgccgcgcggatcgtcgacgagtaccaggtgaaggcagacttccacaaggtcgctgacgagattgtccagatccgcttcgaggagatgccgagcgcgccggtccgcagcaagggcgcgctgctcagcgagctccacacctgcgtctgtgatgacgacttgggcgccgtcggcatctacggcattgcgagggtcggcaaaatcgcgtccctcaaggtcgcagccgagggaggcaatgcgttcgagtccggcctgatcgtcaagaccaacaggggcatactgtacgtcgacgaggtcaacctgctggacgaccacctcgtcgatgtgctgctggattccgctgcgccggcatggaacacagtggagaggaaggatggagataggatcagtggtacggctctaaacttctgctcagataacttgtcatatgatgttggtgccgtctctgaacaaacacaacgtggtttcttgtcagtaaggtctaatgttcagagcgttgtgcaggataaaggtttgttgtcttttttctgggatagcctcatttattatggcaagaagtttttggatatcagattgtttgcttctgtgtcacggactccttttgaggatatggcaaatgagtcgacaacatggaaggaaatcaagatcgtctcttctcctacaagcaggaagcaaccggtacacgagatcaacatgagcagcacgaagaaacaaggacctggttcgggtgaaagaagcagagaagggatgagtgcttcaaaagcaagagctgaaccagtgtccattcatggcagtagagcaaaagcatcatcaattcttatgcaatgggcacaagtttgtgtcaggtcaattctgttgctaaagcttcccactaccgacgctaacaagcacgagctgctcaaggaggcgctcgacggcctcgccgccctgtgcgcggcgttcctagcggacgctgtcgcctgtgggagcaggccagactgggtcatcggcgatagccgccggtga

SEQ ID NO: 120179 - DNA, 279 bp, Zea Mays
acacgagcaggcgtgcagttgctgagcgtcgtcctcgctttccttctggctctatgtactggccgagcagccccaggcacccacgcgcgtgctctgcgatgccgacccagcgaagcctcgcgacaatcgtctctggaagtcctctggcgtccgttcctgatgtccacgcgatcgccaaggcggccatctccctctcgtccagcatacccgagcggccatatcccatgtgcggcgtaccaggcctgctcgaagccctccaaaatcctttcatgtaatctc

SEQ ID NO: 120180 - DNA, 279 bp, Zea Mays
acacgagcaggcgtgcagttgctgagcgtcgtcctcgctttccttctggctctatgtactggccgagcagccccaggcacccacgcgcgtcctctgcgatgccgacccagcgaagcctcgcgacaatcgtctctggaagtcctccggcgtccgttcttgatgtccacgcgatcgccaaggcggccatctccctctcgtccaacatacccgagcggccatatcccatgtgcggcgtaccaggcctgctcgaagccctccaaaatcctttcatgtaatctc

SEQ ID NO: 120181 - DNA, 832 bp, Zea Mays
cctttcctcaccaaacccacacctgcctcaactaatcgggtcagatcaggtcatcgggaaggccgccatggacgacgaggagcacgaggtttacggccaggagatccctgaggacggcgatatggacggcgctgacgttgatatggccgccgccggggacgacgcggcgaagcttcaggagcttgacgagatgaagcgcaagctgaaggagatggagggaggtgaccctagtatatctacagctgaggcgaaggagcaggtggatgcccggtctgtgtatgttggaaatgttgattatgcttgcaccccagaagaagtgcagcagcatttccaagcttgtggaactgtcaacagggtgacaatcttgactgacaagtttgggcagccaaaaggttttgcttatgttgaatttctggaacaagaagctgtccaggaagctctgaacttgaatgaatcggaattgcatggtcgacagattaaggttgcgccgaagaggactaatgtccctgggatgaagcagcgtccaccacgcgggtataatccctaccatggctacccttatagatcatatggagcaccgtacttccccccatacggttatgggagggctcctagattccgccgccctatgcgctacagaccttacttctgaagtacgtgcggggtaataatgttcaatgcaaaaccagccatggttagtggtcagtctcgggaataattaaacctactgctgtatcgtttgcgctgttcaatagttgacatcgttgcggttcaatgctcctttaccagctgccttttctgacctctgttctcgcataagcgacatgtagac

SEQ ID NO: 120182 - DNA, 971 bp, Zea Mays
cctttcctcaccaaacccacacctgcctcaactaatcgggtcagatcaggtcatcgggaaggccgccatggacgacgaggagcacgaggtttacggccaggagatccctgaggacggcgatatggacggcgctgacgttgatatggccgccgccggggacgacgcggcgaaggtaccacctctgtattcgtgtgtttcacgctataccctagcaatgggtccttgcggattgttgacccccctcggggtgcgtacagcttcaggagcttgacgagatgaagcgcaagctgaaggagatggaggaggaggccgccgccctccgcgatatgcaggccaaggtcgccaaggagatgcaaggaggtgaccctagtatatctacagctgaggcgaaggagcaggtggatgcccggtctgtgtatgttggaaatgttgattatgcttgcaccccagaagaagtgcagcagcatttccaagcttgtggaactgtcaacagggtgacaatcttgactgacaagtttgggcagccaaaaggttttgcttatgttgaatttctggaacaagaagctgtccaggaagctctgaacttgaatgaatcggaattgcatggtcgacagattaaggttgcgccgaagaggactaatgtccctgggatgaagcagcgtccaccacgcgggtataatccctaccatggctacccttatagatcatatggagcaccgtacttccccccatacggttatgggagggctcctagattccgccgccctatgcgctacagaccttacttctgaagtacgtgcggggtaataatgttcaatgcaaaaccagccatggttagtggtcagtctcgggaataattaaacctactgctgtatcgtttgcgctgttcaatagttgacatcgttgcggttcaatgctcctttaccagctgccttttctgacctctgttctcgcataagcgacatgtagac

SEQ ID NO: 120183 - DNA, 1302 bp, Zea Mays
cctttcctcaccaaacccacacctgcctcaactaatcgggtcagatcaggtcatcgggaaggccgccatggacgacgaggagcacgaggtttacggccaggagatccctgaggacggcgatatggacggcgctgacgttgatatggccgccgccggggacgacgcggcgaagcttcaggagcttgacgagatgaagcgcaagctgaaggagatggaggaggaggccgccgccctccgcgatatgcaggccaaggtcgccaaggagatgcaaggaggtgaccctagtatatctacagctgaggcgaaggagcaggtggatgcccggtctgtgtatgttggaaatggctactgtgcttgagcaagcctttcaaattgactaatgggcactgggtcatgttttagagttaatgtagagtgaaaagaaagaagaaaagatagaaaaatatctgaaaaagtataaaaaagtgcatggaagaaacagagagaaaaacagaaagagtaaaaaggtataatatagatatcataggttagatgacctccctggcgaagcaaaagaagtcaacacagagctgctgtgtacattccggatggcactttttgacaggaactggcatggagacatctgatgtggttggtagctgctggtccactgatatcacctgagtggtgcataagtatgacatgttgattatgcttgcaccccagaagaagtgcagcagcatttccaagcttgtggaactgtcaacagggtgacaatcttgactgacaagtttgggcagccaaaaggttttgcttatgttgaatttctggaacaagaagctgtccaggaagctctgaacttgaatgaatcggaattgcatggtcgacagattaaggttgcgccgaagaggactaatgtccctgggatgaagcagcgtccaccacgcgggtataatccctaccatggctacccttatagatcatatggagcaccgtacttccccccatacggttatgggagggctcctagattccgccgccctatgcgctacagaccttacttctgaagtacgtgcggggtaataatgttcaatgcaaaaccagccatggttagtggtcagtctcgggaataattaaacctactgctgtatcgtttgcgctgttcaatagttgacatcgttgcggttcaatgctcctttaccagctgccttttctgacctctgttctcgcataagcgacatgtagacacaggacgtagggttacaattgtttgcattttctgtcattcttgattctgatgaccctatacagcactcaccgaat

SEQ ID NO: 120184 - DNA, 1290 bp, Zea Mays
cctttcctcaccaaacccacacctgcctcaactaatcgggtcagatcaggtcatcgggaaggccgccatggacgacgaggagcacgaggtttacggccaggagatccctgaggacggcgatatggacggcgctgacgttgatatggccgccgccggggacgacgcggcgaagcttcaggagcttgacgagatgaagcgcaagctgaaggagatggaggaggaggccgccgccctccgcgatatgcaggccaaggtcgccaaggagatgcaaggaggtgaccctagtatatctacagctgaggcgaaggagcaggtggatgcccggtctgtgtatgttggaaatgttgattatgcttgcaccccagaagaagtgcagcagcatttccaagcttgtggaactgtcaacagggtgacaatcttgactgacaagtttgggcagccaaaaggttttgcttatgttgaatttctggaacaagaagctgtccaggaagctctgaacttgaatgaatcggaattgcatggtcgacagattaaggttgcgccgaagaggactaatgtccctgggatgaagcagcgtccaccacgcgggtataatccctaccatggctacccttatagatcatatggagcaccgtacttccccccatacggttatgggagggctcctagattccgccgccctatgcgctacagaccttacttctgaagtacgtgcggggtaataatgttcaatgcaaaaccagccatggttagtggtcagtctcgggaataattaaacctactgctgtatcgtttgcgctgttcaatagttgacatcgttgcggttcaatgctcctttaccagctgccttttctgacctctgttctcgcataagcgacatgtagacacaggacgtagggttacaattgtttgcattttctgtcattcttgattctgatgaccctatacagcactcaccgaataagatgcagtgtcaagctctgggtaggtcggttaggacatgggagtggaccgttccttgcttatttgcgatagattagttatatgaagagaaatcatcgtgcactctcagattgctacctcagccctatggtagagctctcctaaatccagcgggagctctgctaaacaggtcacagaagtgatttaagaggccggaaggtgaaaaaggtagactcctttgattctgtgaaatgattctccacaatcaattgtatctattagagaatgaggttttatagagaattagaatcagctctacctgttacgtacactgttaagtcagcagcg

SEQ ID NO: 120185 - DNA, 773 bp, Zea Mays
accaaacccacacctgcctcaactaatcgggtcagatcaggtcatcgggaaggccgccatggacgacgaggagcacgaggtttacggccaggagatccctgaggacggcgatatggacggcgctgacgttgatatggccgccgccggggacgacgcggcgaagcttcaggagcttgacgagatgaagcgcaagctgaaggagatggaggaggaggccgccgccctccgcgatatgcaggccaaggtcgccaaggagatgcaaggaggtgaccctagtatatctacagctgaggcgaaggagcaggtggatgcccggtctgtgtatgttggaaatgtaagaatttataatctctctttattgtgagtttattatgttgcttttcaacttctatataatatattacttgtcattctacgtttctgaagcacgaagtatgaaatgtggatatatatattatgtgataggcacatacatattgcctagtagctaatagatatttcattggcactcgtttagttatgaatggtttctctcaaaaaatgccaagtacccaactgccctgccgacttctatggttggtgcttactgaagaatgttgtagtgctggatatctgtattggaagacttatcaaaacctcttcctacttttgatgttgcctccttacccaaattcttgacgctttcctcggaacacatcatattgctattatgaaatgctttatgtgtgcttatcataatcctttgctatcagtacacctttgatatgtcttta

SEQ ID NO: 120186 - DNA, 954 bp, Zea Mays
ctgaacatgtgccttggctatcttcctacctttttccttttattctgcgtttcacctaacggctgtacctttgtttttatcagatcatatagtgaagatttctttttctttattaacatgagaataaacgctgcccagtattttagtgcttatgagtgaatgcatattcactaaataaattaacaatggtcatgaaaacggatttgcatctccttgaaggttttaataaatgctgcctgacatttttgttgcatgctagtgacatgcaggtttactgttgaaattagctgaaatattaacagttctggatgctacaaggaaaaagataataatgactatggtggatccttatttcctttgcattattagtttgtatttgaaaaaaatctagtgcaaagtttcagactcctggttgattatgcttgcaccccagaagaagtgcagcagcatttccaagcttgtggaactgtcaacagggtgacaatcttgactgacaagtttgggcagccaaaaggttttgcttatgttgaatttctggaacaagaagctgtccaggaagctctgaacttgaatgaatcggaattgcatggtcgacagattaaggttgcgccgaagaggactaatgtccctgggatgaagcagcgtccaccacgcgggtataatccctaccatggctacccttatagatcatatggagcaccgtacttccccccatacggttatgggagggctcctagattccgccgccctatgcgctacagaccttacttctgaagtacgtgcggggtaataatgttcaatgcaaaaccagccatggttagtggtcagtctcgggaataattaaacctactgctgtatcgtttgcgctgttcaatagttgacatcgttgcggttcaatgctcctttaccagctgccttttctgacctctgttctcgcataagcgacatgtagac

SEQ ID NO: 120187 - DNA, 1854 bp, Zea Mays
tttttattttacaaaaaaacatatatacctatatataatttatattcaatattaaaaacatctaagcatgatgttctactgattagacaacttcacccagtgtttcccgcccttcttccatcagggcatgagttcgaatcccacctcctgcaccgttttttaacattttacaatgatttaatcaaaggggtcgacaggctaacgggctagcccgacacagtcagcagtccagcatgacgtgtctgggccagagttgtggcctgcgggtgtctggcccgtgccgggccgccgtttgaccatctataggcgtgcaacggattaatttaaaataactgtgaggggttatttgtaaaaagatgacgtgggacgaccgttgaaactggtgctttaagtatagtatagattataacttagcatttcaaagtaaagcatcaattaatttgcccctataatgtgctcactgcttataagtgatggttttcttcatacacacaatattatggcatcaactctcaattactccacccagttgcattttatgttgtcgacctttttcacctgtttgctgcttagtttacctaggcgtgttgcttaatgacataacgcatggtttgtggccttacatttctgttatccatttgtcagtcagcattttaactgatgcaatcatatactgcaggttgattatgcttgcaccccagaagaagtgcagcagcatttccaagcttgtggaactgtcaacagggtgacaatcttgactgacaagtttgggcagccaaaaggttttgcttatgttgaatttctggaacaagaagctgtccaggaagctctgaacttgaatgaatcggaattgcatggtcgacagattaaggttgcgccgaagaggactaatgtccctgggatgaagcagcgtccaccacgcgggtataatccctaccatggctacccttatagatcatatggagcaccgtacttccccccatacggttatgggagggctcctagattccgccgccctatgcgctacagaccttacttctgaagtacgtgcggggtaataatgttcaatgcaaaaccagccatggttagtggtcagtctcgggaataattaaacctactgctgtatcgtttgcgctgttcaatagttgacatcgttgcggttcaatgctcctttaccagctgccttttctgacctctgttctcgcataagcgacatgtagacacaggacgtagggttacaattgtttgcattttctgtcattcttgattctgatgaccctatacagcactcaccgaataagatgcagtgtcaagctctgggtaggtcggttaggacatgggagtggaccgttccttgcttatttgcgatagattagttatatgaagagaaatcatcgtgcactctcagattgctacctcagccctatggtagagctctcctaaatccagcgggagctctgctaaacaggtcacagaagtgatttaagaggccggaaggtgaaaaaggtagactcctttgattctgtgaaatgattctccacaatcaattgtatctattagagaatgaggttttatagagaattagaatcagctctacctgttacgtacactgttaagtcagcagcgtccacaatcctcaaacgtctctgctgagcatcagttccggtgtcggattctgaggtaatcaaaagctgaactaatagacagtctctctctaccagactattttaccgcgggcaaatctggtccgtcgttagactatcttaacgactatctccagcagactctcactctctatttcaatcttcaccatacaaataatgtcatctaactctctatttcaatcttcaccat

SEQ ID NO: 120188 - DNA, 492 bp, Zea Mays
atggcggcgactcgcttggggggcgcggtcgtggatggagcggagggggcacagggggcgcagatctcgtacgagggcgtgtcagcgtctagagcgggggcagcgagcgcagtcgtggatggatcggagggagggggcacaggggcgtggcggcagctcgagcaagaaaggggcgggccggcgggggacgacgagcgcggtcagatggagagggagcaagggagtccgccggtggtgggtgacaaaggaaatcaggatgtggagaagagacaaatgaaggaagtagggaaggcgagtggaagggattcggggagcagacgcttctatacagtgagccacttcccggagctgcgcggccatggaccacaaccgcgtcgcggaggtgctacagtgctgcccgacattcctagtgctgacgccgtcagggccgctgcagacctgcttgttcggttgtcaagtttgtcaacgcttccagcaaatagtttgtcataa

SEQ ID NO: 120189 - DNA, 1400 bp, Zea Mays
gaaagtgccccctcgtcatacgtcacgcgccgcgccgcagccctcacacttcactcacacacttcgccggctataaataaagtacccccgctcatcctcatccatagcaaatcctcgacaccgagcaagaagccaggaaccagctcaaagttattcgtccaagaaccccaccccactccccgaatagaaatttcgtcttggagagccaccaatggcttgttccactgcatctttagcggcgacgctgctggcgttcgcgctgatgttccaggcctgcgtcgcggggaggcggaggctcaccgcgctcgtgcaggagccggccatcaccatgaagtaccacaaggccgcgctcctgtcgggccccatcgccgtcaacttcatctggtacggcgacttcacggcgccacagcgggcggtgatcaccgacttcgtctcgtcgctgtccgcggccccgcgggcggcggcgcagtcgcagccggagccgtccgtgtccacgtggttcaagacggcgcgcaagtactacgacacctccaaggcgcgtttcccggcgctgcgcctcggctcccacgccgtcgaccggaactgctccctcggcaggcggctcacggagcgggacctcctcaggctcgccgccaggggggcaccgagccgcgccatcaacctggtgctcacggccgccgacgtggccgtggacgggttctgcgcgtcccgttgcggcacgcacggcgcgtccccgcggtcccgcgccggccggttcgcgtacgtgtgggtgggcaacccggcgtcgcagtgccccggacagtgcgcgtggccgttccaccagcccgtctacggcccgcaggcgccgccgctcacgccccccaacgccgacgtcggggtcgacggcatggtgatctcgctggcgtccatgatcgtcggcaccgtcaccaacccgttcggcaacgggttctaccaggagggctcggccgacgcgccgctcgaggccgccacggcgtgcgccggcgtgtacggcaagggcgcgtaccccggctacgcgggggcgctgctggtggacccggccagcggcgccagcttcaatgccaacggggcccacgggagaaagtacctggtcccggcgctcgtggatccggacacgtcgtcgtgtgccaccttggggtagatttcgcggatcgtaaattagtgtttgcgatgtggcggtggtagtgctgtggagagtgttccacgcggctaaaagtttgtgctaaagtagtactgaccaggttgcattatttcatttgttcaatgaaaatgaagtattttcacgcacatactactcttatgcatgtcgattctgcctgcaatttactcggtttcccaaaagtttttgccagcttggtatgaatcatgactatgacgtgaat

SEQ ID NO: 120190 - DNA, 997 bp, Zea Mays
ctacctggggttcctcttctctctcacgctagatcaggcggagcactattcatcccccaacctttccttccggaggatggcagcgagcgcgccttggcgaagaaacctcccgctccgttgcggtgggtttggactccagcgcggaggcctggacacgacaatgtgcaaggcggaggaaggccgactcggatccgctcgatctcgccgacgacgaggcccaacaacaggacgttgcggcgctgaggaagcattcccatcgatgtactccgagcaggcgccttgtttccaaaaccatatttactttcttgttttcttttgatctctctgtctcgtgatctcaaattctcaattcccatctgtcttctccttcctggtgaacgaggaacgactcctccggtcctccctccagtcctccctgagctgatccctggctcctcctcctcctccccgagaccccgaccaactactgcgttgaattgctgatcaagaacaagagccaactctggttatcaactccagcgactcaggcagacaagaagatgagtacttcatctgaagatatcagtgttcaagtcattttccctggatcacaatatcaaacaaatgagcaggagcagccaaagcatgtctcctctgctgtggatagtaccaatccagttggtttggcatcctcggctgctcctctctctgtgtgtgttcattatttatttttcggattcctgttgcttttcagtagattccattcacaaatgctcctgcacttttttaccgactgcgattgtgattgcttatcaatttcagttctaagagattttcagtaatcaagtgttccattgtatacttaattatgggtttttaaaatttagaaattaaatagtacataattatacacattatgtgcccctcaatattttatggagattatatgtctaaattgaaaaaaattaaatcaattattcaatggatttgtacgttaagaaaataaaaattgaaaaaa

SEQ ID NO: 120191 - DNA, 976 bp, Zea Mays
atgtcatcgtctcgttcctctgctcccttttgcaacctcccttcatataggccactgtgacctgcttccctttcgcagttgcgcatctccatagccacctcggaagctcgaggccgaggatccacatatatagcatctgtcttttatactaggttttagtttttgggagaatctacacggcgcagaagctaggtagctttcttcaataatcttggtccagtccagcaagcttccctgcttccccttgccctcgatcgacctgctgcgggcccagagacatccatccatccatccttccttcctggctgtaagaagaggagatggtctcatggccgtgatctcacctcgccgagcgctcgtcgcggccgtgtccctctgcctcctcctcggcgccgccaccagcatccgcaccgcgacgttttccccttctcaggcgcaggagaacctggcggaggacaagtcgcggctggggtcgacgccgccgatctgccgcaaccggtgcagcgcctgcaacccctgcatgcccgtgcaggtgacgaccgcgcccgcggggctcgggcgcgcggcccgcgtcaccgacgccgacgccgacgcggtggccggcttctcccgctactccgactacaagccgctggggtggaaatgcggctgcgacggccgcctgtacgacccctagccgagcgtgcaacgccagtgcactctgctccggtccggtagggtgggggagactggaggccatccaggttcttggtgtcatctgttcttggtttttgcatgcccatgggccatggcggcttgcttcacaagcttattatttctctctctattctctactagttcgagcttgcagcttgtaccgcccgtagccgtagccattttttttttgctctctgctgaaacaatttactcgcgtgtaaagagtaaccgtgaccgtgagcagtaaaagttgtagtggttaccgaccgctgattggcca

SEQ ID NO: 120192 - DNA, 970 bp, Zea Mays
atgtcatcgtctcgttcctctgctcccttttgcaacctcccttcatataggccactgtgacctgcttccctttcgcagttgcgcatctccatagccacctcggaagctcgaggccgaggatccacatatatagcatctgtcttttatactaggttttagtttttgggagaatctacacggcgcagaagctaggtagctttcttcaataatcttggtccagtccagcaagcttccctgcttccccttgccctcgatcgacctgctgcgggcccagagacatccatccatccatccttccttcctggctgtaagaagaggagatggtctcatggccgtgatctcacctcgccgagcgctcgtcgcggccgtgtccctctgcctcctcctcggcgccgccaccagcatccgcaccgcgacgttttccccttctcaggagaacctggcggaggacaagtcgcggctggggtcgacgccgccgatctgccgcaaccggtgcagcgcctgcaacccctgcatgcccgtgcaggtgacgaccgcgcccgcggggctcgggcgcgcggcccgcgtcaccgacgccgacgccgacgcggtggccggcttctcccgctactccgactacaagccgctggggtggaaatgcggctgcgacggccgcctgtacgacccctagccgagcgtgcaacgccagtgcactctgctccggtccggtagggtgggggagactggaggccatccaggttcttggtgtcatctgttcttggtttttgcatgcccatgggccatggcggcttgcttcacaagcttattatttctctctctattctctactagttcgagcttgcagcttgtaccgcccgtagccgtagccattttttttttgctctctgctgaaacaatttactcgcgtgtaaagagtaaccgtgaccgtgagcagtaaaagttgtagtggttaccgaccgctgattggcca

SEQ ID NO: 120193 - DNA, 1692 bp, Zea Mays
atgtatttttattgtttacacaacgacactgacctgtccatctccctccaaaacaaaggaacaaaatcacacggcactggcagaagcaccgtgcaaactgcaaatatagagctaagttgcctagttctttggcaggagcacattgcgaaccaggtcatcgaaattccggtgagacgtgcctccgggcttggccacctcgatggccttgtccctccattccagtgcccttctcctcatctccttcccctgctccccctccatgagctcagcgatgaggctcgccacggcgtcgcgccggacgttgctgtcgatctccatcccgacgccccactcgttgcactggtagcggcagttggtctgctggtcggcgaagaagggccagctgatgaccgggacgccgccgcacatggcctccagcgtggagttccatccgctgtgcgtgaggaacgcggccacggccgggtggtccagcaccgcctgctgcgggcaccaggtggccatgagcccgcggccggccgtctcggacaggaactccggcggcagcacggcggtgtcgcccctgacgaggtcgcgccggatgatccacaggaacggcctgccgctgttggccagcccccacgcgaactccaccagctgctcgctggtcatcacggtgatgctgccgaagttgacgtagacgacggagccggggtccctgccgtcgagccaccgcaggcactcctcctcctccttccacaggctgaggctgatggcggagcgcggggtgggcgggtcctcgcgcgccagcagcgggagcgggcccagcgtgtacaccttgcgcgccaggccgagcgagcgcatggccgccaccgcctcgccctccagctcgtcgaaggtgttgaggatcacggccgacgcgcccgccgtgcgccccgtctcctggaggacgtagcccaccatgtactcgtccgggtccgtggagcggatgaagctcgggaagtcccggaacctcatgttccgcagccccggcacgtcctccaccgccgtgtcaaggaatccgttcgtcagctgctccacacttttgagcggagcgaggccacggctcttgaggaggtggtagtggcggtagccgaggaagctgatggtgctggcagtccagagctggacgtagggaaggccgagctccttggtggcgtcgatggagaagcccatgacgacgtcggagacgacgcaggtgacgggcgggtcgctgaggtccgcgagcaggcggcggaagggcccgaggcaggtctccgtggtggacttgcacagcgaggggatgtcctgcgtgacgtcgtcgtcctccgacggcggcaggccgtcggggatggtggcgaagcggaagcccgggaggccggccacggccgccgccccgcgggtccggacgaggcgcgcctggttgtactcggtgttgacgaaggtgacgtggaagccccgggcgtgcagcagcttcgccacgttgagcatcggggtgatgtggccctgcgctgggtacggcaggcacacggcgtgcggttgctgcggctgctgctgcgcggcgctgccgagagaacccatggtggtgatcgaagatctgcgtgtgctgtgtgtgtggcctgccgcctctgggtgctgctgcctgctgcgttacacggcgagcagctctgtgttcgcttcagctggtcgtctctgtga

SEQ ID NO: 120194 - DNA, 1611 bp, Zea Mays
aaccacggtccacggccgctttcggagctctcagtggctcagtcacgcacacctacctcgtgcagtcctgctgtccaggaacaagaacatcaagtccggatcacctgcgattgcgagcactcgatccagccttcgccacctccaggcgcagcagcgatgagctccggaaaggcgcagcggcggccgcacgccgtgctcatcccgcagccggcgcagggccacgtcacgccgatgctgcacctcgccaaggcgttgcacgctagggggttccgcgtcacctacgtcaactccgagtacaaccaccggcgcctgctccggtcccgcggccaggactccctcgccggcaccgacggcttccacttcgaggccgtccccgacggcctgccgcagtccgacaacgatgacgtcacgcaggacatcgccgcgctctgcctgtccaccaccgcgcacagcgccgcgccgttcagggacctgctggcgaggctgaacgccatgccgggcagcccgccggtgagctgcgtcatagctgacggcgtgatgagcttcgcgcaaagggtcgccgaggagatgggaatcctggccttggttttctggaccaccagtgcgtgcggcttcatgggctacctccacttcgccgagctcatcagacgaggctacgtgccactgaaagacgaaagtgacctgacgaacgggtatctggacacggcaatcgactggatccccggcatgccggacatccgtctgaaggacatccccagcttcatcaggacgacagaccgagacgacgtgatgctcaacttcgacggcggcgaggcgcagaacgcgcgcagggcccgcggggtcatcctcaacacgtacgacgcgctggagcaggacgtggtggacgcgttgcgccgcgagttcccgcgcgtgtacactgtcggcccactcgcagcgttcgcgaacgccgcggcaggaggcgagctggacgcgatcggcggaaacctctggaaggaggacacgagctacctccggtggttggacacgcagcggccgggctcggtggtgtacgtcaacttcggcagcatcacggtgatgaccgccgcgcagctcgccgagttcgcctggggcctggcgggctgcggccggccgttcctgtgggtcatcaggccggacctcgtgtccggcgagaccgccatgctcccggaggggttcgtcacggacaccaaaggaaggggaatcctggcgagctggtgcccgcaagagctggtgctctcgcacccgtccgtcggcctctttctgacgcactgcgggtggaactccacgctggagagcgtatgcgccggcgtgccgatgctctgctggcccttcttcgctgagcaaccgacgaactgccggtacgtgtgcgacaaatgggggatcgggatggagatcgacaatgatgtgaggagggaggaggtggcgcggctcgtgcgcgcggcaatcgacggagagaggggaaaggcgatgagagtgaagtcggtagtgtggaaggagaaagctcgacaagcggtggaggatggtggatcctccaggaaaaacttggatcgactggtcgatttcctgctcgcagggagtgatctcccttgctga

SEQ ID NO: 120195 - DNA, 1474 bp, Zea Mays
caacatgcaagggaaaacctcgatgatgggctcgaacgcgcgcccccacgcggtgctcatcccgtacccggcgcagggccacgtcacgccgctgctgcagctggccaaggtgctgcactcgaggggcttcttcgtcacctacgtcaactccgagtacaaccaccgccgcctgctccggtcccgcggcgcggactcgctggcgggcctcgacgacttccggttcgagaccatccccgacggcctgcctccgtccggcagcgacgacgacgtcacgcaggacatccccgcgctctgcgagtcgctctcccggagcggcgccgcgccgttccgtgacctcctggcgaggctcaacggcatgccgggccgtcctcctgtcacctgcgtcgtactggacaacttcatgagcttcgcgcagagggtggccagcgagatgggcatcctggcagtcgtgttctgcaccatgagcgcgtgtggcttcatggggtacctccacttcaaggagctcatggacagaggctacgtgccactgaaagatgagagctacctgaccaacgggtacctggacacggtgctcgactgggtgcccgggatgcggggcatccgtctgcgagacatgcccagcttcatccgcacgacggacccggacgagttcatggtccacttcgacagcggggaggcccagaacgcgcgccgcgcgcaggggatcatcgtcaacacgttcgacgcgctggagcaggacgtcgtgggcgcgctgcgcggcgtcttccctcgcgtctacaccatcggcccgcttctcacgttcgccagagacatggtccgtcccgacgcgtccgcgatctgcgggaacctctggaaggaggacccgagctgcctcgggtggctggatgcccaggggcccggctcggtcgtgtacgtcaacttcggcagcatcacggtcatgacgccggctcagctcgccgagttcgcgtgggggctggcgaactgcggcaggccgttcctgtgggtcatcaggccggacctcgtcacgggcgagaaggctatgctgccggaggagttctacgcggagacgagagagagagggctcttcctcagctggtgcccgcaggaacaggtcctgtcgcatccgtccaccgggctgttcctgacgcactctgggtggaactctacgctggagagcatacgcgccggcgtgccgatgatctgctggccgttcttcgcagagcagacgaccaactgccgatatgcctgcgcgaactggggcattggactggagatcgacaacaatgtcacgagggacgaggtggcacggctcatagaagaagccatggacggcgagaaaggcaaagacatgaaggcgaaggcaacagtgtggaaggagaaggccgtggcagcaacagaaagcggcgggacctcgagcgtcagcattgatcgtttggtcgagttcctgcttgaaggaaacgttcctacagctgca

SEQ ID NO: 120196 - DNA, 1057 bp, Zea Mays
gggggggggagcattgatttggtttggttcctcgggtcgctcacctctcggctgcgcggtccgcggcgggccgaacgccgcaatgttgcagttggcgcgacggccggcgatcaccgggttcgggttctgcaccgccagcgccgccgcaccggggtcccggaaaatcacctacggagacatacaacaacacatatctgctactgctgagcatcgatctgatatataaggcggcgcgcggccgatcggccggagcaaaggccagaggagctgaggggctacaagtcaagggtcgacttacgaagccgtagccctttgagcggccggtctcgcgatcggtgatgacgacggcctcgagtatgtcgccgtaggcctcgaagtggtggcgcagcccctcggacggcgtctcccacgccagcccgcccacgaacaccttggtcagcgtcgtgtcgccgaaccgcgaccggtggtggtggtacggcccgccggggccagaggacgacgacgaggtcgccatccgccgcaacgcaagcaccgtaccgtatttgctctctctagtctcccgtctctcccctccgctttggtgcgcagggcagggctctgggctagggcctagggctaggctagttgttccgatcgatctttgcgggcgggacgagaaaagcggacccggactcctggatccttgctggcggttccggcctagccgtctgcttgtgtcgtagaaagtccggacctcctgcggttcctcctagctccctccccttggcgttcctagtatacttgtcaccaccacttccatgtccctctacctcacaactccctccccttgggtttcctagtatgcggcttctccacttccatgttcctccacctcaggtctcaggagtcaggaaggactccactcgggagaggtggagcaggatatggtaggagggactagggagggaggagacggcaggcaagcaaaagagatggggggccgacgacggccgtggccgcgcgctgcgctggaagagagggttccgggtgtgggaatgggatgacagctgctgcatga

SEQ ID NO: 120197 - DNA, 2265 bp, Zea Mays
atgtcgcgcgcgttgtacaggggcgtgtcggggatcggcggcaagctggcggcggcggacgaggcgtacgcgtactacgaccccaaggagcccagcgagaacagcattggcggcggcttcggccggggcggcgcgcggaagcggcacctcgcggacgcggcggtgaaggtcggggtcctgctgctggtggcggccgcgctcgtgggctcggtcgcgtgggcggggacgctctacgcggggcgcggcgcggcggcgcgcgcggccgccgccgccgcgcaccgcgggtaccggcggctgcaggagcagctggtcgcggacctgctcgacatcggcgagctcgcgggcggcggcgcccgcgccaaggaggcggaggtgtgcccgcccgagtacgaggactacgtgccctgctactacaacgtcacggacgccgtcgacgtctcggatctgggcgccggcgtcgccataagctacgaccgccagtgcacgcgcgacggcagggtcacttgcctcgtcgcgccaccgcggagctaccggattccggtccgatggcccagcggcaagggcttcatctggaaggacaacgtgcggattagcgggcacgagttctcgtccgggagcctgttcaagaggatgatggtggaggaggaccagatctcgttcccgtccgacgcgcacatggccgacggtgtggaggattatgcccatcaaattgccgagatgattgggttgcgtaatgagttcaatttcaatgaggctggaaaatattgcatgttgagtagacttgctggaagtgccggtctatttctacttaatttgacaaatatacatgcccaatgtgctggaaagtgtatgtcagagtttactactgtacctgcaaaagtcaggacagtccttgacatagaatgtggatttggtacctttggggcacatctttttgagagagatctcttgaccatgtgcattgctaactatgaagcatcaggcagccaagtgcaaattacactagagagaggcattcctgcaatgattggttcatttgcaacgaagcagcttccatatccctatctttcctttgatatggtgcattgtgcgaaatgcaatatcgaatggtacaaaaatgatggcattttcttagttgaagtgaacaggcttttgaggcctgatgggtattttgtatggacatcaaatttgaatacacatagagccttgcgtgacaaagaaaatcaaaagaaatggacagccattcgtgactttgctgagggtctttgttgggagatgctgtcacaacaagatgagacaattgtatggaaaaagacaaataaaagggactgttacaattcgagaaaatctgggcctgagctatgtggccatgatccagaatcaccatactaccaaccactaaacccctgcatatcaggcacaagaagtcagcgttggatccccattgaatatcgtaccacctggccatctcaggctagacaaaactcaacagaattggacatacatggtgtgcatcctgaagtctttgctgatgatacctcaagctgggactccatggtgcgaaactactggtctttgctatctccacttatattttcagaccatccaaagagacccggtgatgaggacccacagccaccatttaacatgctaaggaatgttttagatatgaatgctcactttggtggatttaatgctgctttactgaaggcaggaaagtctgtatgggtgatgaatgttgttcctacagatgccccaaactatctaccgctgatatttgaccggggttttatcggggttcaacatgactggtgtgatgcatttccaacttacccaagaacatatgatatggtgcacgctgatggttttctatcacttcagaagaaccacaagcatagatgttctactcttgacatattcttggaagttgaccgcatcctacgaccagagggctgggtcataatccgtgacgctgcccctcttattgaagcggcaagatctgttgttactcaactcagatgggacgcccgcgttttggatcttgacatagccagtgatgaaaaactactggtctgtcagaagccgtttctcagaaaataatgagcatagtagacactgacacaagatatgaacttattctttcaccctacacactgttacaattgctgtctgagcacaactgagtacaaagtttgggtaaaaaacacgggaagcatgattcagcaaacttgtcatgcatcaccatggaaccgcaaggtgccatta

SEQ ID NO: 120198 - DNA, 1533 bp, Zea Mays
accatccgatccggtagtatccgaacccgataaagcgaccccccaacaacgctggcctcacctcacacaaacacacataccgaatccagccccgcacccaccgttgcgcccgccgcccgagtcgccgtggccgccgcggcagcgccctcccggccgtgagcgcggcccagcgcgcgcgccgcggccaccgccgccctcgaggcgcccagatctgggccctagcgcccccctccctcctataggcctttccccgctgcatcgccatggcgcggctactgctgtggtggacagcgctgctcctcccatccctcctcgccggcgttggtcccgccgccgccgccgccgcgtccccgccccacgatgcgtgcctggtgcctaccatcgcgcaatccgtccttaggactcccgacacgtgctcgacgctggatcgccgccttggcgacccggtcggcgtcatcgagggagatgaggtgacgttggcaagggcagttaatcttcttcacgcaaacaaggatgactacattgccgtactattctatgcctcgtggtgcccattctcacaggaatgcaaaccgaattttgagacactggcttacttattcccagctatccggcattttgcatttgaggaatctgcaattaggccaaggttcgtcctatatagtgcaaacaaaaattatttcttattgcaacacatctatttttggtggaatgccaacctgatgctggaactgcagcataatttcgagatacggcatccatggtttcccaacactctttctcttgaactcgaccatgagagtacgatatcatggaccaaggactgttaaatcacttgcagctttctacactgatgtctcaggtatcaatgcatcggtgaagtcaactgcaggggaggccatggtacatcccttggatgatattgagcataaaaaggacgctgaacaggaaaattgcccattctggtgggctcggtcaccagagaatatacttcagcaggatacttatctagcattggcgaccgtatttgtaattttgaggttgctgtatcgtatttttccaaagatagattcctttaccagatgggcatggaggaggcacaatatgtttgcaaaattgatgggagcacatgaatatttcctcacctaccttgagcaagcaagacagaagtttcataggctatacccttcaagttcaaagcgaggaaatctgcaggagggcgcaatgaacgctaccgcttgggcttccaaatcattagcatcagtttcaattggagaaccaagtgcaattggaaggacaaactctacaagtgagctaagatgaaatctgatcttttttgtccccagggattatatgtacagtacagtagagcgatcaggatatgaacacccagaaactgttgtaacggctatattactctttgtatcctccttagaataaatacgtccatgatttggctccttattttctgttgttgttacagcccaattctttggaggaataaagtttctggtgtattgagaggtgtctttc

SEQ ID NO: 120199 - DNA, 1581 bp, Zea Mays
accatccgatccggtagtatccgaacccgataaagcgaccccccaacaacgctggcctcacctcacacaaacacacataccgaatccagccccgcacccaccgttgcgcccgccgcccgagtcgccgtggccgccgcggcagcgccctcccggccgtgagcgcggcccagcgcgcgcgccgcggccaccgccgccctcgaggcgcccagatctgggccctagcgcccccctccctcctataggcctttccccgctgcatcgccatggcgcggctactgctgtggtggacagcgctgctcctcccatccctcctcgccggcgttggtcccgccgccgccgccgccgcgtccccgccccacgatgcgtgcctggtgcctaccatcgcgcaatccgtccttaggactcccgacacgtgctcgacgctggatcgccgccttggcgacccggtcggcgtcatcgagggagatgaggtgacgttggcaagggcagttaatcttcttcacgcaaacaaggatgactacattgccgtactattctatgcctcgtggtgcccattctcacaggaatgcaaaccgaattttgagacactggcttacttattcccagctatccggcattttgcatttgaggaatctgcaattaggccaagcataatttcgagatacggcatccatggtttcccaacactctttctcttgaactcgaccatgagagtacgatatcatggaccaaggactgttaaatcacttgcagctttctacactgatgtctcaggtatcaatgcatcggtgaagtcaactgcaggggaggccatggtacatcccttggatgatattgagcataaaaaggacgctgaacaggaaaattgcccattctggtgggctcggtcaccagagaatatacttcagcaggatacttatctagcattggcgaccgtatttgtaattttgaggttgctgtatcgtatttttccaaagatagattcctttaccagatgggcatggaggaggcacaatatgtttgcaaaattgatgggagcacatgaatatttcctcacctaccttgagcaagcaagacagaagtttcataggctatacccttcaagttcaaagcgaggaaatctgcaggagggcgcaatgaacgctaccgcttgggcttccaaatcattagcatcagtttcaattggagaaccaagtgcaattggaaggacaaactctacaagtgagctaagatgaaatctgatcttttttgtccccagggattatatgtacagtacagtagagcgatcaggatatgaacacccagaaactgttgtaacggctatattactctttgtatcctccttagaataaatacgtccatgatttggctccttattttctgttgttgttacagcccaattctttggaggaataaagtttctggtgtattgagaggtgtctttctgaaatagggagcatatcagatgcacacgtgtctttcgtgtacatggtgctggtgcatatattgaatcaagcaacttaatatggtattaaaatcagggtctcaaatttgaatcctagttagcacaattcaatataa

SEQ ID NO: 120200 - DNA, 100 bp, Zea Mays
gattatattgtgacatttatctctatacactctgtgattatatatgttgtcttctttggcgcatgtatgagatgcacccggctttgttccttaaaaccgg

SEQ ID NO: 120201 - DNA, 3138 bp, Zea Mays
atgagggccaccggggagcacacaactgcggtgcccatgcccgccccgccgccgcctcctgctgcggcctctgcgagtgaggaagacgacaaggagaggaggaagaaccgccgccgctcctcgcggcgctccaggcaggcggccgttgccgcgccgcagggcctgcacgcggacgctgcggggccgaggacggtcagatcgatgccgcccatgcacgtgggcagcagcgccggcgtcgacgccgaggcagagccgtccgcggcgggaacgagccaatcctgccccctgccccccacgccgagacccacggaggcgcctgtgtcgaggctgggcaggggagctccggggacgcgttacttccagcctcactggcctgagcgggccgtggaggaggccgtcaaggcgtactgtacgattgatggcgtctcggtggatgttctcattacaggattggcacaaaaccgagcggttgaaggtgatcttgttgctatcacactggaccctgttgctcactggactagaatgaaaggaccaaacgttgcgtgcaaccctctgataggagattctgtggtgtgtgaggttagtgaaacaaataggaatcatagttggaagaaaggacaggcagacgacggctgcaagtttgaaaattgcagtaacggagtacctgttttggataggacacatccccctcacaagaacagtggttttagtcaagctgttaagtgtggaaatgggaatgctactatccctgaaaggaatgagatagacttgaatgatggaaagagtgaggttgcaagagcattacaaaggatcagtgccacgatatactctcatccaagcagacgtcctactgggaaagtattatcaataattaagaagtctccgcgccgtgatgccattgtaggtttccttgcttctttctcagagttccctgacggagagcagcagaaaaaccagatgggtctaaacaggatgaacaacagaacacaatcagttacaggcttgttttatctcttgcctactgaccccaaattccctcagatggttgtgagttttagcactttgccagatagtgtcaggcagagcctaagaggtaacgtagctgttaagaaggaattggttgctgcacgaattgatgaatggaatgaggaaaacctctatccctatgcccatgttatacggttcttggggaaggttggacatgtcaaaacacacatggatgctatattatttgagaatgtgatctgtgatgctgagttttcccctgagtccttggcatgccttcctgacaattgttggaagattcctcaaaaagaacttgaagctagaaaagatttgaggaaggtcttgacttttacaatagaccctcctactgcatcggatctggatgatgctatatcaattgaaatactttcaggaggaactgtccgtattggggttcacattgctgatgtttcttactttttacatccagagactgctttagatgctgaagctcaaagtcgatctacaagtgtttacaccctgaaacataaaatctcaatgttgccttcaggattttcggaagtggtttcacttaatccaggtgtagataggcttgccttttcaattatttgggatattgatcctcatggtaacctaattagtcgttggattggtcgaagcatcatcttttcgtgctgcaagctgtcatatgagcttgtgcaggatctgatttgtaatgaaaccagtcagactaggcctgaagtttcttctcttgaagtacatggtatatttgggagagatgatgttatcaagtcacttagaggcctctatgaagtctcaaaaaatctgaaggaaattaggttcaagggtggagctctttctcttgatactgcaaagattatgatcctgtttgatgaagatggggatccatgtgatagctatcgttacgtgaggaagaatgcgtgcttcattgttgaggagctaatgttgttggcgaatatgtcagctgcagaagtcatatctaatgcatttcctgattgtgccttacttcgtaggcaccctgaacctaatttgcggaagtccagagagttcgaggcattttgtgctaagaatggttttgaattggatgtttcatcatctggtcaactccacctttcactttctagaataaaggaaaagctgcaggaggatcctgttatgtttgatattatcatgttttatgcttcaaagcaaatgcagtcagcagaatacttttgcacaggggacctgataagcaagaaagatgattgggcacattatgcgctgtctgtccctttgtatacacacttcacttcaccacttcgaagatatcctgatataattgttcacaggactctgaatgcggtgattgaagctgaacaagtgtatatgaaacagaagaaatcttccgcaggccagaatggagtcaaagcatcttgtgaattgatggatatgtgttttactggccttcagttgtgcaaggatgctgctgaatctgaagaagggaaaaaggcactttctgctgcagctaagaaatttaaggttccttcctctgaaaatcttggggagattgctgaacactgtaatgaaagaaagtgggctggtcgccgtgcagaagaagctggacagaagctctacatgtgggctctgataaagaacaaagagactgtggtatgcaatgctagagttctgggacttggtcccaggttcatgtcagtttatgtgcccaagcttgcgatggaacgaaggatatattatgatgaagttgagggattatcagttgaatggttagaagtcactggaacgttagtgcttgatacatgcaggaacaagcctgctcaaaggagaggaactcagatgaagcgcaggccgattgaggaagtcgcggtggtggtgaacccttcagagttgtctgaagaagacgaggaatcaggagcaacagaagctggcggctgcactgccaagtctgttttgttgagtggcgacgcagtgaaagctcagaccgccccagccgttctccccttggtgatacattaccttagtgacatccctgtggttcttcatgcaattggtggtgaggattgtgcggtggacattggcgtaagactgtacatggcgtcatacttcaagttatag

SEQ ID NO: 120202 - DNA, 707 bp, Zea Mays
gagggattatcagttgaatggttagaagtcactggaacgttagtgcttgatacatgcaggaacaagcctgctcaaaggagaggaactcagatgaagcgcaggccgattgaggaagtcgcggtggtggtgaacccttcagagttgtctgaagaagacgaggaatcaggagcaacagaagctggcggctgcactgccaagtctgttttgttgagtggcgacgcagtgaaagctcagaccgccccagccgttctccccttggtgatacattaccttagtgacatccctgtggttcttcatgcaattggtggtgaggattgtgcggtggacattggcgtaagactgtacatggcgtcatacttcaagttataggaaacctcctgtcatgacaggaaatagttggtcgatttcaacagtttttcagtcgaacgaaagtaataaaatgatggtgggcaaattccaacttagtgctgtagatatttcattcatgtatagcaaattaggtacccttccagcacagaaaaagaaaacccctaccccaatccgttctttcccatcctgtgacatgaggttttgatggcagagtcaagtggcttccgtttttaatcccagactgcctgttgaggtaccaaaatggtggaagtgggagtctacattaatgccacactattttagtggttccatcaatgatcttctgctagtttgtgaaa

SEQ ID NO: 120203 - DNA, 2128 bp, Zea Mays
atgacggagccgcgtgacccgccgaccggctgcgccatgttcggcatctacagcggactgttccgccgtcgccgctccgcatccatgacctccctccaccggatcgacgaggccccggccgtggcgccgttggcgaacccggcgcatcatcagaagcccgccgtgcaccacgacgcatcctccctcgcgcgccgccccaacgccgtgcccgtgccggcggcgcagaacggcgccgtcgcccgcgccgcgccaccggcggcgaacggcaggggcaggacagtcaccaaggcggtgaacggcgccggcggcccgaggcccgccgtggagcccgcggcggagtacacgggcatggccgcggagctggacaggatgatcctcgaccaccagagggtcaagggcaccacgcagctggtgcgcgccacctcgggcaacatgatgctgcaccgcaacctcggcaacctgaacgcgggcgccaccggcacggcagtgcgcagccccgtagtagagcgcggcggcaccgcggcggcgaacgagcggaaggcgccgcccaacgggtacgcgtcctccggtatgggcaacatcgtcagggagcccaggacgccggcagcggcgggcgagctgtgccgggcgctgtcgcaccgcacggaccccgagaagctcaaggagatgggcaacgaggagtaccggcagggccattacgaggaggctgtggcgctctacgaccaggccatcatgatggacgcgaggcgaccggcgtactggagcaacaaggcggccgcgctcgccgcgctcgggcggctcatcgaggccgtcgccgactgcaaggaggccgtccggatcgacccttcgtacgatcgcgctcaccaccggcttggcggcttgtacctcagattaggagaagctgacaaagccatctaccacttgaagcaatcttccaacgaatccgcgagcgcagacgtttcccgtgcgcagtcggtgaagagccgcatcgctaagagcaacgacgcgcgaaggctcaagaactggttcacggtgctccaagaagcgcaggccgccgcgtccgacggcgccgactgtgctccacaggtgatggcgttgcaagccgaggcgttgctgaggctgcagcggcacgacgaagcggactcgcttctcagcagcgccggcgcgccgaggttcggtgtcgacgagtcgaccaagttcttcggcaccttcggccacgcctacttcctcatcgtgcgagcccaggtcgacatggctgctggcaggttcgaggacgcggtggcgacggcgcagacggcgtttcagctggacccgagcaaccgggaggtggcggtcgtgcagaggagggccaaggcggcggccgcggcgcggctgcgtggcaacgacctcttcaaggccgccaagttcgtggaggcgtgcgccgcgtacggcgagggcctcgacagggagcccggcaacgccgtgctgctctgcaaccgcgcggcgtgccacgcgaagctcgggcggcacgagaaggccgtcgaggactgcagtggcgcgctcgtcgtgcgcccgtcgtacagcaaggcgaggctcaggagggccgactgcaacgtcaagctggagagatgggaagcgtccttgagagactaccaggtgctgatccaagaactgccggagaacgaggacgtgaagaaggctctctctgaagtcgaagccaagctcaaggaccaaaggaacggggctgcagcagccagatctcagcactgacgtcctgtaataagccaggtttctttatactgtcggctacccgagaaatcaaccgcaacttcttaagaagacaaaggctttcgacaaaacaattctgcacgcgcagctgcacagtttgttgtaccagatctcttgtttgttttttgttcaccttacaccaatttgcaaacagaaccaagaaatggaactgtacataatacttgctccaatggtgatgtgtagttagctgaatgtgcttggtccttccgaaaagaaaactgatgtatatagttatgggtgataccgcctaacggtgacggttcccagagatttgtgaagattcatctgaaactgaacaacagcattctgaaggctctgctctaaaacctaatttttttta

SEQ ID NO: 120204 - DNA, 255 bp, Zea Mays
atgaggtcgagggatacgacgctgaaacagcaggacgacgacgaggtggagcttggacggctggagaacggtgctgaagtacgcaggaccggacaggctgagagcgaagaactacagagaagctcgctggaacacagcttggaaacgagcaagtacagggtggctgccggggctagaaaacatggaatagagggcataaaacctcacccgatatggttggccacggaagggggagctctggcgtacggcaactga

SEQ ID NO: 120205 - DNA, 318 bp, Zea Mays
atgggttcccatgctaatggcagcacctgtgcaggtgacggtcctccaccaatggagaagcggaaagaaccggcttttcctcttaaaacaatgccactgcatgctaacggctggttgaacaacatgaagctgtcctcgcctactgctgtccctgtgaacattggtaacagtgttgcttttgatcccatctaccgagcttggactcagaagtatccttcagctctgaacgcgtttgaaagaattgctgcctgcggcaaaggcaagaagattgtgatgttcttggttcctccaaagaaaaagatggcccaagagttttaa

SEQ ID NO: 120206 - DNA, 1430 bp, Zea Mays
gcgttctggttcgagaaaaacgacacgggatcccagtaatcgacgccaggcaaaagcgagaggcacctccgctccgctcggcttgccgtgggttccgtcggcccggcccctcgccactgctgtagagtacgccctttcctctccggtcgagtcagccgcgctcctttacgcctcgccgctgcccccgccaccgcaacgcctggtgcccgggggccgggccgggtcgcgtggtggatcgacgctgtaccagtaccaccctgcctgccggccggccggcctttggtgcgtcgcgtggcatgtgctgcttgcgcgcacgtcgcgtttcgccgtcgagtcttgtgaagggacgccggacgcgcgctgatgggacgggacgggaccggactcggaccgggacaagacgcgtcagagtactctcgcctgctgaatgcctgctcagtgctcactgctcagccggtgcgcccgcgccgctgtcggcgtgcacgcctgacgggcggggggcggctagctccgggctcccacctcggttggcgcgcggccaatccccaccggccgcaagtacgcccatcgccgggccccacggcgtggcgcggcgctactgcctagtagcctagctaccttgcccgagaacccgaagtagaaaatggccaaggcttccccagccaaccaggccgtgcatgcattgcatgggcatatatgcgtccgacccgtatgctgtcgagtcggctagcttgcgttgcgtggagtgtagctatagttgatcagatgcatggtgcagtgaagagcgcgcagcacacggtttacccgtcgagctagcgagtacacagccggagtagccaataattatcagctggacttctttttgtagatcctgccgctgctgctatatatatatatatatatatatttatttattataaatgtaaaaaaaggagaataactttgttctacgtctggtgctacttattattattatactatattttgtagaatcccggcaggccaggcatcgcacaccgtgatggacggacagcgcctttttcggtcttcacgtggtgtggcccaagagcaagaggttcccgtgcatctttccgtcgagtcattttatacaaaagacgggcctgccattggccaccagcgttttgccaccaatgatctgtgatctccgctgtgggatggcaacgggcacattttacccgcgtgcccgcgggtaaaaaccctatagggtgcgggtttgggtgtgagtttgtacccgcgggtacgggtgcgggtttgattctcaatccgacgagtttttttctcgcgggtatgaaaatgttatacccgtgcccgcaaacccgcgtacccgcaatggatatatatatatatatatatatatgtatgtatgtatatatatatatgtgtgtatatatgtaattttatatgtgtgt

SEQ ID NO: 120207 - DNA, 113 bp, Zea Mays
ttctacccctcacaacttatctcccgacaacgacgggctctcaaccacacgacttggctcaacagagacttgaaacgggagaggagctatggccctacggctggcttttatgg

SEQ ID NO: 120208 - DNA, 1585 bp, Zea Mays
gcgctcccggtctcggactctaggctcgctccagtttccgcctggctccaccaacaaaaaccaacgctccccctgcccccctctttcctccccagacccgcgctcccctccgtggcgtgcaacgcgttcctcggctcctgcaggcggcgacctcggaaaggcgggggcgtctcgtcgcgaggcatttgaggccaggattttttggtgctctcattgttagctgactggtgagggtctggatctagcaatggcggaaaacacccacggtagtggtcgccacgtgcttggggacttgacaaatgttatttgcaagcgagcagccacatcagatctggagaagagtacaggtgggataaagatcagacggattgaaaagactgggactaggaaagagtacgatgcaaatgcaaaagctagcagtattgggaaaggaattgtatttggccatttgtttgatgatgttgccagagagaaatttcaaagccattctatctttcagaatagtagggttcaacacatagctgccgaagcagctggactcttatccaaggaagccaatgactcgaagaaccactatgcatcaatcggtccattagatctcagtgataaggagcaggattcttcacttgaatctgaagacgactatgatgatgaagataatgatgagacgaatggtgaattgctgcaccattttttcagctcagagctagctaataaaatgtcaacaaatgatggtgagtgcttgactcaggaggagatagttgggtcatctggaaatcagaaacctctgtcttcattggatgctacgacaggtggtgacttgccaatttctagtgctcagcatgcttctgtgagaactggtggtttggaagaagctgttgccccaaaatcttgtgcttgttctttctgtctcaaggctgcttttatgtggatggatctccattatcaggatgcaagaagccggctttctgtattgaagaaaagcatcaagtttgccaggtcattggaggaaaaatgtagaggaaatgaatatgcggccaatgtagctggatatgaatcaaagcgagctgtgggagtggagtttgaactatctcaacaacagagatcactctttctttatacagaaaatgcccttgtccgtgagtcaacgcagcttcattctgcttttgtgaaactgaaagaattgagagagaactgcaagacagatcttgagacgctcagcaattcttcaatgagaaaatgagtgctgcatgttgcgttgctgaactgttagtttcctgagacttagtatgatcagctggcttgtcttgaagcaagatgtgctgagattgaaccacaacttaggaattatggtgcttaccatcaatttgggacttcaatttggctgtagtgattattcctatcataaagcgttggtctagtatgcttgtagctgatgtaaaaataaccatggtaaggtaggaactgtatgtttgtctcgttgaggcatcgtcatcttcacttgtaccttgcagtgagcttccttcatatgaacattctttccacgttctccaaacaaaagggaaaaccatatcgtttcgtgctt

SEQ ID NO: 120209 - DNA, 1651 bp, Zea Mays
cccccttccacccgcgttcgcttcttccccagcatccagcaaggaaggaggaagaagaagagggaggagaggggacggtccgcgaatcctgcctagccttcgccgccttcctccgctcgagcggctcgccgaggaaatagcgaaagggcgctatgagttcagcgaatggtacaaccaatgtccatgggaaagaagcagcaccgtatgaggagcagctgttcaagattggtaaagttagaactgacctaggacaactatctggaaaatcagctctatattgctcagatgcttcaattgcaaggtacctgatagcaaggaactgggacataaggaaggctactaaaatgctgaagaaaaccttaaaatggcgttcagaatataagccagatgaaatccgttgggatgacatatctgatgaagcggtaactggaaaaacttaccgaactgattactttgacaagatcgggcggagtatccttgtcatgagacctggatgccagaataccaagaatgccaatgggcaagtcaagtacttggtgtactgtatggagaatgcaattctaaatctgccacatggtcaggatcagatggtttggctcattgattttgctggtttcaatttaggcaacttgtcaattcaggtgacaaagatgacggcagatgtcctacaaggccattatcctgaaaggttgggtgtggcaattctttttaacgctccaaagttttttgagcctttctggaagatggcaagcccccttcttgagaagaagaccagaaacaaggtcaaatttgtatactcagatagacctgacaccatgaagatcatggaagaccttttcaacatggatgagttagaatgtgcgtttggtggcaagaacccagctactttcaatataaatgattatgctgcgaggatgagagaagatgacaagaagatgccatcattttggagccctgagaattcagctcttgcttctgagccatatcagatgagcagccaaaaagccctaggaagcgtttcaggtgcgaagactgaagatgctggatctggaaagatggacgacatggagactgctcctgaaaagagtgaagaatcgggtactgaatctggagaggaggtacaaacacggactgaatcaagcacagttgagcagaaaaacttgcctggagaagataatgccccagcagataaaagtggcctttaatctgatctccgggtatcaccatgaaacataaatgtgaaacattgataggagctctaccacatttcactaaggtttgaacatgaaaggcgacgagaaactcttttaacacggcaaatcggcatgcctgacttgttttgtagtcggcacctatttctctgtcctcaagatcttatttggggaaccttttcatgacagaatgagatctaccagatggtaaagaactaataccatactgttaccctcagttttcatgacagaatatggtctggtgttcagtttctgatatgcccttgtattttcgctggaaaagaaaaatactattgtatctggagctgttgggttaataatatatcattgttcagtttgtattctgttcagtaaccaccattgactttcagttagtatagccccacttggtacaaagacaagtgttaggcttcaaaaac

SEQ ID NO: 120210 - DNA, 1368 bp, Zea Mays
aggtttatgtcagcacaaagcttttcagcatgctttgtgaaacatctggtgcattatgacatctgatttgacgggttataatctggtagaaaatcttattttgcatttcttcatgtaggatgacatatctgatgaagcggtaactggaaaaacttaccgaactgattactttgacaagatcgggcggagtatccttgtcatgagacctggatgccagaataccaagaatgccaatgggcaagtcaagtacttggtgtactgtatggagaatgcaattctaaatctgccacatggtcaggatcagatggtttggctcattgattttgctggtttcaatttaggcaacttgtcaattcaggtgacaaagatgacggcagatgtcctacaaggccattatcctgaaaggttgggtgtggcaattctttttaacgctccaaagttttttgagcctttctggaagatggcaagcccccttcttgagaagaagaccagaaacaaggtcaaatttgtatactcagatagacctgacaccatgaagatcatggaagaccttttcaacatggatgagttagaatgtgcgtttggtggcaagaacccagctactttcaatataaatgattatgctgcgaggatgagagaagatgacaagaagatgccatcattttggagccctgagaattcagctcttgcttctgagccatatcagatgagcagccaaaaagccctaggaagcgtttcaggtgcgaagactgaagatgctggatctggaaagatggacgacatggagactgctcctgaaaagagtgaagaatcgggtactgaatctggagaggaggtacaaacacggactgaatcaagcacagttgagcagaaaaacttgcctggagaagataatgccccagcagataaaagtggcctttaatctgatctccgggtatcaccatgaaacataaatgtgaaacattgataggagctctaccacatttcactaaggtttgaacatgaaaggcgacgagaaactcttttaacacggcaaatcggcatgcctgacttgttttgtagtcggcacctatttctctgtcctcaagatcttatttggggaaccttttcatgacagaatgagatctaccagatggtaaagaactaataccatactgttaccctcagttttcatgacagaatatggtctggtgttcagtttctgatatgcccttgtattttcgctggaaaagaaaaatactattgtatctggagctgttgggttaataatatatcattgttcagtttgtattctgttcagtaaccaccattgactttcagttagtatagccccacttggtacaaagacaagtgttaggcttcaaaaac

SEQ ID NO: 120211 - DNA, 762 bp, Zea Mays
atgcaccatcctcaggctgggcatctggtggagcgagctgctgcaacgaagcatcccacggacccgcgtcggaggcaccgccggctgcgcctccgccgcgggcgttgccaccacgtcctctacgtcgcgcacgccctctcctgcggccggcgtggtggccgtgtcgccgtcgtccgcccgtgcagcattaatcctgatgccatcctcccgagcggcggccatcaaatcccgaagcggcggcggcggcggcggcatcaccggagaactgcccacgttctcgacgcggcggtcgcggcgggcgcggatacactccggccgcacgacgggcactatccggatgacgagcctcccgtcgtcggtgcgcgtccgcctgagcgcgccgcgggcgacaagcgacgggatgggcgggggcagccggcgcctggggcggcgccgcccgtacgatacccagaatccatccaactcgtcttcctcttccgcacacgcctcgtccctcacctttgcttccatgttgtcattctccccttcctcctcctttgctgtcccgacgtcctcgtcgtggccaaggtagatcccgtcgtcgcgtctctctttgacgtcctcacgatggccgcacccgcagccgtgcgcggcgacggccgcccgcgtcacgacgcaccctgcgcgggtgccgccagcggcgtcgggcagggcgagaagggagcggaggccggagatcggggcgctgaatttctcggcggggtggggcgcgaacagcagcat

SEQ ID NO: 120212 - DNA, 1916 bp, Zea Mays
ataggatgccaaaaagccatgactacggtctacggcagcagtacagaacagggaagaaggcgacgagacccagggcggtcaaaacgccagagatagaagccatcgccgacgtcgaatcccggccggcggtctgtttcctcctcctcctgctgctgctgactgcccgcctcgcgccgcgcatagaatccctcgctctgcctcgccctcggcctcggcatcgccactcgctttcacgctccatcatcaccaatggctcgatgccaaaaccgcaattaaaaatttcggcttgggcgtatccgtcaatacaccgagaggaggaagcctgcccactaccgcgtatctctctcctccctggctctcatccccccaccgagtcgtcgccccctcgctttcaccccacgcggaagcaagaattcgtcgtcaaattcccagcttgcgcgtgtttctgtggatttcttcccgcttccctgctcctgcctcctatgggcctttgatccggggcttcgtggatcttgggaagaggaggtgcggtgggcgcctcggcggcgatctggcggggaggatatggccagcgggaaggagccgatcgaggtcaggtttcgtctcttcgacggcacggatatcgggcctacgaagtacgatccctccaccacggtctcctcgctcaaggagttcatcctcgctcggtggccgcaagataaggatatagctccaaaaactgttaatgacttgaagcttatcaatggtggaaggatattggagaataaccggacacttgcagagtcccgtgttccagtaggagagatcccaggtggtgtaattacaatgcatgtggtagtgcggcctccacaagctgacaaaaacagtggtattgccgacaatttcagccttttattcatatcattttcttggctcccatgagaaataacttgaattctacttccatatattgaattgaagtgtttgtgattatcaacccttgtgctggaaacatactgctgcgattcttatcttagtgaacacatctaggcatgaatctctgttatcgaaatactacaacctgagatatttcgagtacttcatgggaatttaattttttatttttagtattgcttcctagtacattgcaggtcaaatacctgtattcgagtcgaactatgagctgagctgcttatatacggtagtcacgttctcatgtgggtcactaccactaacactaacgatgcctagagacaaactttcaaacacacaaaacactacacgaccttctaataattttcagtgcagaaaatcttgaggtgcttaggtttcttaagatatgacttgcacctacatgagtattaagttaatgtggtggaatgtttgggtgatagggcggcgctacaagcatactaagtgatttctattcattgattaatatgatgactgatgccaaaagctattatgattttcttatgacacttgtgaacatacttctaacatgttcacctgtactttcccagagaagcagcttgccaattcccccaagcagaacagatgtggatgcaccattctctgataaggcgtctgcttggtgctgtacaatctgtgtgtacacataagattttgtatgtgctttgctgtgttcacacaagcatggattcgttttgatatccaattcttgaagccatacaaattccagaagtaagaacccacggaatacgaagatttctggatcgttttgttctagagtgtaggattggatgcttcctgctgtataaattgtgttgtcaaaactgaaaaaaaagtctctttcttttctgctatattgacttattatcgattctttctagctcggttgcttttgattcgtgtaacagaaatattgtactcatgtatatgtaacttgcaaaaggagtaatgtatggtgttatggt

SEQ ID NO: 120213 - DNA, 1321 bp, Zea Mays
ataggatgccaaaaagccatgactacggtctacggcagcagtacagaacagggaagaaggcgacgagacccagggcggtcaaaacgccagagatagaagccatcgccgacgtcgaatcccggccggcggtctgtttcctcctcctcctgctgctgctgactgcccgcctcgcgccgcgcatagaatccctcgctctgcctcgccctcggcctcggcatcgccactcgctttcacgctccatcatcaccaatggctcgatgccaaaaccgcaattaaaaatttcggcttgggcgtatccgtcaatacaccgagaggaggaagcctgcccactaccgcgtatctctctcctccctggctctcatccccccaccgagtcgtcgccccctcgctttcaccccacgcggaagcaagaattcgtcgtcaaattcccagcttgcgcgtgtttctgtggatttcttcccgcttccctgctcctgcctcctatgggcctttgatccggggcttcgtggatcttgggaagaggaggtgcggtgggcgcctcggcggcgatctggcggggaggatatggccagcgggaaggagccgatcgaggtcaggtttcgtctcttcgacggcacggatatcgggcctacgaagtacgatccctccaccacggtctcctcgctcaaggagttcatcctcgctcggtggccgcaagataaggatatagctccaaaaactgttaatgacttgaagcttatcaatggtggaaggatattggagaataaccggacacttgcagagtcccgtgttccagtaggagagatcccaggtggtgtaattacaatgcatgtggtagtgcggcctccacaagctgacaaaaacagtgagaagcagcttgccaattcccccaagcagaacagatgtggatgcaccattctctgataaggcgtctgcttggtgctgtacaatctgtgtgtacacataagattttgtatgtgctttgctgtgttcacacaagcatggattcgttttgatatccaattcttgaagccatacaaattccagaagtaagaacccacggaatacgaagatttctggatcgttttgttctagagtgtaggattggatgcttcctgctgtataaattgtgttgtcaaaactgaaaaaaaagtctctttcttttctgctatattgacttattatcgattctttctagctcggttgcttttgattcgtgtaacagaaatattgtactcatgtatatgtaacttgcaaaaggagtaatgtatggtgttatggtaattggtaaaggggaaacaaagaggtgaaaagagcgcat

SEQ ID NO: 120214 - DNA, 1318 bp, Zea Mays
ataggatgccaaaaagccatgactacggtctacggcagcagtacagaacagggaagaaggcgacgagacccagggcggtcaaaacgccagagatagaagccatcgccgacgtcgaatcccggccggcggtctgtttcctcctcctcctgctgctgctgactgcccgcctcgcgccgcgcatagaatccctcgctctgcctcgccctcggcctcggcatcgccactcgctttcacgctccatcatcaccaatggctcgatgccaaaaccgcaattaaaaatttcggcttgggcgtatccgtcaatacaccgagaggaggaagcctgcccactaccgcgtatctctctcctccctggctctcatccccccaccgagtcgtcgccccctcgctttcaccccacgcggaagcaagaattcgtcgtcaaattcccagcttgcgcgtgtttctgtggatttcttcccgcttccctgctcctgcctcctatgggcctttgatccggggcttcgtggatcttgggaagaggaggtgcggtgggcgcctcggcggcgatctggcggggaggatatggccagcgggaaggagccgatcgaggtcaggtttcgtctcttcgacggcacggatatcgggcctacgaagtacgatccctccaccacggtctcctcgctcaaggagttcatcctcgctcggtggccgcaagataaggatatagctccaaaaactgttaatgacttgaagcttatcaatggtggaaggatattggagaataaccggacacttgcagagtcccgtgttccagtaggagagatcccaggtggtgtaattacaatgcatgtggtagtgcggcctccacaagctgacaaaaacaagaagcagcttgccaattcccccaagcagaacagatgtggatgcaccattctctgataaggcgtctgcttggtgctgtacaatctgtgtgtacacataagattttgtatgtgctttgctgtgttcacacaagcatggattcgttttgatatccaattcttgaagccatacaaattccagaagtaagaacccacggaatacgaagatttctggatcgttttgttctagagtgtaggattggatgcttcctgctgtataaattgtgttgtcaaaactgaaaaaaaagtctctttcttttctgctatattgacttattatcgattctttctagctcggttgcttttgattcgtgtaacagaaatattgtactcatgtatatgtaacttgcaaaaggagtaatgtatggtgttatggtaattggtaaaggggaaacaaagaggtgaaaagagcgcat

SEQ ID NO: 120215 - DNA, 2420 bp, Zea Mays
accgactggtggcggcatgacgaacgaaacatgcatatgcattcgtcccctcgtcgtcgttggcagctctcgctcctctataaataccagcgccatccgcttcagatgagcatcgatcccagcaacgcacggagcgtacgtacattgcagtagctagctatagctggccggccatcccctctcgctcgctgctaaacacgttccagcttgtttgctcagagaaacagcgcgcgcgcacacacacacacatcatcatcatcgattcatcgtacacaggatcagagagcttaattagttctagctctgctgcatgccccttcgacaacgtccgacgatgggcggcggcggcggcggtgtagctaagatgccggcaggccagctctggttattactgctaggcgtgttgttgttagcatttggagtcccagcccaggcctccaggaatactcactacgacttcgttataactgagacgaaggtcacccgactatgccatgagaagaccatcctggccgtgaacgggcagttcccggggccgaccatctacgcgcgcaaggacgacgtggtcatcgtcaacgtgtacaaccagggctacaagaacatcaccctccactggcacggcgtggaccagccgcggaacccgtggtccgatggcccggagtacatcacgcagtgccccatccagcccggcgccaacttcacctacaagatcatcttcaccgaggaggaaggcacgctgtggtggcacgcgcacagcgaattcgaccgcgccaccgtgcacggcgccatcgtcatccaccccaagcgcggcaccgtctacccctaccccaagccgcacaaggagatgcccatcatcctcggcgagtggtggaacgcggacgtggagcagatcctcctcgagtcccagcggaccggcggcgacgtcaacatttcggacgccaacaccatcaacggccagcccggcgacttcgccccgtgctccaaggaggacaccttcaagatgtccgtggagcacggcaagacgtacctgctccgggtcatcaacgcggggctcaccaacgagatgttcttcgccgtcgccgggcaccgcctcacggtggtcggcaccgacggccgctacctcaggccgttcaccgtcgactacatcctcatctcccccggacagaccatgaacatgctcctcgaggccaactgcgccaccgacggctcagccaacagccgctactacatggctgcgaggccgttcttcaccaacacggcagtcaatgtcgacgacaaaaacaccacggccattctggagtacacggacgcgccaccctccgcggggccaccggactcccccgacctgccggccatggacgacatcgccgcggcgacggcgtacacggcgcagctccggtccctggtcaccaaggagcatccgatcgacgtgccgatggaggtggacgagcacatgctcgtgacgatctccgtcaacacgatcccctgcgagcccaacaagacgtgcgccggccccggaaacaaccgcctcgccgcgagcctgaacaacgtcagcttcatgaacccgaccatcgacatcctcgacgcctactacgactccatcagcggcgtgtacgagccggacttccccaacaagccgcccttcttcttcaacttcaccgctcccaacccgccacaggacctctggttcacgaagcggggcaccaaggtgaaggtggtggagtacggcaccgtcctggaggtggtgttccaggacacggccatcctcggcgccgagagccaccccatgcacctgcacggcttcagcttctacgtggtgggccgaggcttcggtaacttcgacaaggacaaggaccccgccacgtacaacctggtcgacccgccgtaccagaacaccgtctccgtgcccacgggcggttgggctgcaatgcgcttccgagcggcaaatcctggtgtgtggtttatgcattgccactttgatcgtcacacggtgtggggcatggacactgtgttcattgtgaaaaatggcaagggcccggacgctcagatgatgccacgtccccctaacatgcccaagtgctgagaaaacaagggcacgagctacgactgctcgggttgcatgcaaggcgctcgatcaaaccagctaatcttagttgattggttgatttaattatttgtggtacatattttaagtagaacggttcttcaaataaaacggccagttgagatgtaattagtgtcatttgtgttcttttctctttttattcatttgattgtaagagaaaaacaaattcattatatttattatttgtgtcggtctactgctagttcaatctccaagtgtaattaaacaatgtatgtcaaatcatgtatctagtgaaaattcaatataaatgcgtgcttcatatgtgtatttattt

SEQ ID NO: 120216 - DNA, 1056 bp, Zea Mays
actagcaatttctccgtgttgaattttcaattgagaccgagtctacggactacgtctaccccggttccagtttccgcgttcctcgaactcgaagaaatgtgagcctggctgtgatttttcctccctcgctagtcatcttcaagcatcaggaccgaagccacacgacaccagccgtcctcgcgatctctcctccgtctcccattccccaccgcgcccttctccccgcgcctcctcactggaatcggaagcgactcgcggggccggtgcgcaggctgctggcagcgccatccgcggtggccggctaccatggaggatctaggcatcgaggcgaaggaggctgcggttcgcgaggtggcgaagctgctcccgttcccggagctcctctcctctatcgcctctatcaaatacgactaccttacgcggcagcaggtgacttatccttatccaccccgaaacctcacgattctactcgcagtggtgccgccaatagcaacgaatctcaagtagtagacgaatgggttgggataacccggattgagtcgcacgggacctctccatgtagtttttctccgtttcgagctcaaataccgctctgttctgctcccttctccccgcgcctcctcataccacggatatgttcggtcctagcttattttgttgctcatacccttgtaatttcggttcagtacttgttgcccttgtaattgtcaggaatcgttttagacttttagtgggtatgtacgagaggaagaaagcctgaaaagaaaatgagaagaaaaaccatagagggaggaacgacatatgctgacaaggggtgtcaatcgcatcctctttgatctgaattttgctgatggtgtatgggcgagggtaaaatagtctattcacatggtagaaaagggataagaaaaagaaatatgtttaaatcggtccataattctatttcacggtgtgacacagtagagaccgccgttatgtcgaaggctaaattgtagatactattatgttgaaagcacatgtaatgaggtctataatagcaaaaaaactctttggcttggt

SEQ ID NO: 120217 - DNA, 606 bp, Zea Mays
atggccttggccatctggaggggtgcaacaagagtggactgggccacaacgtcagatggggggcagctgacggagcaacgaagtagcgagtccgacaagagtagaggtgaattcgacagtcggccaacgagggaaagatcgccggctcctgtggcctgcaaggggagcaccgctgctggccacgccggtgggagcgagtgtgcccatgtctatagaaggctaggcatctgcgcctgtggtggggcaagccttgtgcatgaggtcgcgccaacggtggagcaggcccatgctggcatcaatgctctagcattatctcagataacaataaacaaactacgtgagaacttcattgatatagacaagttgtgtcaggagtgtcaaactttaattgagaaccatgacaagatcaagcttcttagcaatacaagaaacaatttgaacacaactctaaagtttttgaaaaagaagggcacacttggtgtaatggtgagagctatctcactgagttaccaggtcgcgggttcaaaacagcctctcctcatttgtgggaggaagacttgccttggtttatcctttcccagactccactcacataggagccagtga

SEQ ID NO: 120218 - DNA, 115 bp, Zea Mays
gtttagccaaagcaatagactagttttaagaggggtaaaatctcagcatttgcgtcgccaagaagaaaaagaaggagccttattcctaaagatgaagtcattcctatgcttccaa

SEQ ID NO: 120219 - DNA, 677 bp, Zea Mays
gtagaagtcatccactaggctggccttctccccatggtcagtacaaatgttactgccagaaagcagcctgggaataaaattctttctttttctatatctagcatgcatatggaagagtttagtattggcatccccatcctttaaccaattaattcttgacctcaaacgagcaattgtgcgtttgaggaaagaaggagagaatgccttttaatctcctgcagcagccacttttctgctgggatcaatggtctgatatcctgagcaatctcaagttggtgtaaaatttcgcgtgcaagctcaagctgggaagccacatgtccaattcttttattgctccacctctgaagggcacgtgcagtggctttcaacttcatctcaagagtcaggaaggggcaggagctaccactactcgatgcccacgcttcctgggctacttcctggaatccctccaattttggccaaaaagactcaaaatgaaaccttcgtttaccatagcagttgcttgtaagaccaagaattaaggggcaatgatccgagtcttgtgaagcagcactctggagaagggagttgggaaaaagggcttcccaatcaacagagcaaagagctctgtccagtttaaccaaagtaggcgaagattgatgattagaccaagtatactttctgccacatagagggag

SEQ ID NO: 120220 - DNA, 133 bp, Zea Mays
ctgttacaggttaattttgaagacacctgcaaaggatttctcgaggttgccaaggaggctgtcctccaaactgttacggttatttttgaagacccaggtgtgcatgatctactcgtgaagctttaccagagag

SEQ ID NO: 120221 - DNA, 462 bp, Zea Mays
gtttgggggaaaattgtgtttgtgagacatgcacggtgttcagcctcctacaccctaagtcgcatcgagggaaacaaccatgtcagacagtcaccacgatcgacgctgacgtgccactttgcttccctggacccttctcagatgctgctgcttcccacacccggacagcgagccgtatgcggaggacaacgagggcccatgcccattcttggtccttgcttctcttctgcctccatcccatactactccagctccaccggcaacgcttcaacctcctccgagctcgacaatgttgcaaagaagcgcggacccgaactgcagcgagagggacatggtcctccgcaactagcgaaagagtcactcaatggcgagttgctgactatcgtgacaatggtgcacccaatccaccccgacccacgatgtaggaaaacccatctccacccatccatacagaccccatga

SEQ ID NO: 120222 - DNA, 412 bp, Zea Mays
gttattcctttgcatctgcctgctggtgatacttcaactgaaagaactgtgcatattgatggtacttaagaacaaattgtagctgcaaagcaaatgatcagtgaggttaccagtgaggtccgccttcttttctcgatgtgtatattcttgttctgtaattgctttgtcgttttgcgctttatctatcttatttaggttgcttctggttcattctgtttattgtctcattttatgattttccccgattctttttgaaaattttgtttcttttgcttattgctgccctacattgattacactgcgtcttcgctaatcaatgtttgaaacatattgttcgtgggtacatcctcagcatgcaaggggattgttatatgtgttcttccctgtttccgaacataacttattaatggtt

SEQ ID NO: 120223 - DNA, 2339 bp, Zea Mays
tatttgttgcagcaaggttaaaatgccaagttacccgaggatcggacagggtagatgcaccggaaacgggaaacgtctccactagatagggtaaaataggggatgtaatatggttcggaaaatatatgtccggatctgaatttgaagatggtgaacatcggttcgaatgtaaacaccatggaaatcaaggcccgccctggaaatcggaaatgtaaacaccatgggcgctcagccactgcatcgcactcgcacatgatgccgaattgacaggtcgggcatttttagcagcgtacggtcgccgggctgatcttgactcctgcgctcggaggattgtggcccgaagttctgacacagccgctggactcctcgatccgatgctgtcacagctatctatcacagccaccgggatccgggagtcgcttcccggcgtgcaatgattccacccacctggccggggactccgccaacacacgagcacgggcacgaggccacgactcccaaccgaaacgcgcgagttattacgctttacgcgcggacacggctgccagccccagccgcccgtgaggccgcgtgacgcgaaacgttccttcctcgcgcggcttaaagcgtttcctctctttcccctcgcagatctcacccaccgtctacctctcagtttcgatcgccgtcgagctccaccacgcttaattgtccccatcagggcgggagcgggggcgggggcgacgggcccagctacctaccggttccttcctctgaatcggccaatcggccgcagctgttcttggcccagctgctctgctcttgtcgagggatggtccagtactcctccaacaaggctccccgccgacattaagctactgtgccttagttagcgctgccgattcggggttgcttgctctctgggccgtgcccgctgtcctcccatgggctgcacggggtccaggcacgcgctgcgcggcggcgtccggtcgccgcacgcgtggggccggagccgctctggccgcgctcaccacaccgtcgcgctcaagtcctccacgctgggctcgctcagcctcgaacgggacgaggagatgatgaagtggcgcgacgacggcggtgccggcgccgcgaagacgccgcagctgatgcggcggcagaaacaggtgccaggctcgccggcccgcgagcccgaggtgatcaacgtgtgggagctcatggacggcctcgacgacagggacgaggaaggcgacgacgccaacgccggcggagagaagccggccccagggtcgcccgcgttcgatccggacgtcgtcgccgcgttccggaaggcgctggacgagataccccctccgccggccccggacggccccggcaacgacgaggagcgtatcaagaagcctgacggcccgggcgcggggggcggcggcgacgaggtgtgcgttaggaagcgcgagatacagaggttcccgggcatcgtccgtgcgcgggtcagcgcgttccagcagaggatcgacgcgaagctcgccaagctggcgccgccgccgccggccgtgccgcccccgccggacagcgcccggaaggtggtggtgtacctgaccagcctccgcggcgtccgcaagacgtacgaggactgctggtccaccaggtccgtcctccagagctacggcgtgcgcgtcgacgagcgagacctgtcgatgcacgcggggttcaaggacgagctccacgccgcgctgggctccagcgcgggcaggctcccgcaggtgttcgcggacggcaggcacctgggcggcgccgaggagatccgccggatgcacgaggccggcgagctgtcggaggcgctcgaggcctgcgagatggcgcccccgccgagctgcccgggcggcaagggcgttgccctggaggcgtgctccggctgcggcggcgtgcggttcgtgccctgcgaggagtgctccggcagctgcaaggtgttcgtcgaggaggcgggcacattcaggcggtgccccgagtgcaacgagaacgggctggtgcggtgtcctctctgctccttgtgaaaaatctcagagctgctctgctattgctatgggttatgagatttgtagtgtgccgtgtgggttactgggtttgtaagattttgctgaggagtaattttcgttctagctgcgagggtctgtacagaagttacacgcatgtgtaactttattgggtaggactgatgaagcgacagatgaccgtatttatgtttttgtttgatgactggatttgaatgtgtataagcacaagacatgacagcagtctgatgaacagatatgcattacaactgcacaagacatgacagcagtctgattgcgcgtgaaccggat

SEQ ID NO: 120224 - DNA, 536 bp, Zea Mays
ggccgcaagcaccatagcacaagcagcagccgacctcctcgaacgagccgagccctcgcccagtcgccgccgcccgcgcccctcccactccccaccgcgcttcagcttcagactgcacacacgagtatagggcaaaagagccgagtcgaggcgccaccgaaggtgcgagaatcaacgagccgccggcgagcgagaatcaacgagccgccgggccgaaggtgcgcctcgcctcgcccgtccgcctgcccgccccagtgcgctcctgggccgccgcggggcggagatcaacagcgtacctcccacggcttccgtcggttcctggtaacgaagcaatccctagcctctgcgtgtggattgatgatgttgttgttgttgttgctgttctacaaccgtgtcctatcctatctcgcgggatctcccctctccccttcgcttgttgtgcatgtcgagggtgggcagcttgccgctgtcccagcaatctgggggcccagcggaaacgaacctcaatcatcctgccatgctctgcttgtttggtc

SEQ ID NO: 120225 - DNA, 2109 bp, Zea Mays
ggccgcaagcaccatagcacaagcagcagccgacctcctcgaacgagccgagccctcgcccagtcgccgccgcccgcgcccctcccactccccaccgcgcttcagcttcagactgcacacacgagtatagggcaaaagagccgagtcgaggcgccaccgaaggtgcgagaatcaacgagccgccggcgagcgagaatcaacgagccgccgggccgaaggtgcgcctcgcctcgcccgtccgcctgcccgccccagtgcgctcctgggccgccgcggggcggagatcaacagcgtacctcccacggcttccgtcggttcctgatttaggatgtgtacagaggggctgtattcttgtgtataggttctctttctatcggtcaactgttgctgattcggacggaatgttggaggatcaatcttgcctgatatcaaggtcgctgccgggttcctgtgagcaggaatccagactagcttacatgacttaccacctacttgagatcacgaggagtaagcgcccgcctgggaccctgtcgattgagcacgacgtcgtggcagcattgactaaaaggacaaagtcctctgagcaccaaaacagcgaggcgctggattgtcaaggaagtaatggtcagggcgactcagattcaagcaccctgataagttccattggccgggacaactcgatcaactgtcttgctcgttgttctcgttctgactatggttctatcgcatcactgaaccggagcttccgatcgcttgtgcgcagtggcgaactgtacaaggagcgtcggcagcaggggatttcagaacactgggtctacttctcttgcaacgtgcaggagtgggaggcgtatgacccctaccgttcacggtggatgacgctcccaaggatgccccgcaacgaatgtttcatgcactctgacaaggagtcgcttgccgtgggcaccgagcttctggtgtttggaaaggagatcctctcgcatattatcctgagctatagcatcctgacacattcatggtcgcggggcgttgaaatgaacgcccctagatgtttgtttggatcagctagttttggagagaaagcaattatagccggaggcatggatgctgatggaagggtgcttcgctccgtcgagctgtataactcggaaaccaagaggtggacaacacttccaagcatgaataaggctaggcggaagtgctctggtgtcttcatggatggcaagttctatgtgatcggtggaatggccagtaacacagaagtgcttacttgtggagaagagtacgacctagatagaggtacctggcgggtgatagagaacatgtccgaggggctcaatggtgcaagcggcgctcctccactcgtcgccgttgtcgaaaacgagctatatgcagcgcagtacgccggaaagctagtgaggaagtacaataaaagggacaactcgtggacgacgctgggggagttaccggagcggccagaagccgtggatggctggggcattgcgttccggggctgcggagagcggctgttggtcatcggtggaccgagagtgctgggcggcgggatgatcgagctccattcctggattccaagcgaggggccactgcagtggaacatgatcggaagcaagccctcgggtaactttgtctataactgtgctgtcatggggtgctgatacgtgcgcccctcaaaacataccgtcgacgacacacgaaagattgtgatattgggtttttttttattatcaaatggcataaagcactgattaattccgcctgacgggtaatctctgcattcttttttttgacatttcagattttactcaaggttcgtccaatagagctagtcggttccgtgtactcgttaatagctagctacccattggttcctgtgctcagcacattctatttgcagtccatctgtacctttggtccatatgatatactctgttgaaatgagtttttttctgagatggacgcgtacaggtgataaattgtaattggggggtgggtaaccgtgcatctatatgatttgtttgtatcatgttctgaaccgtgtctcaacgctgtaattctattgtgcaaatgtctcttttccaagaactgcatgaa

SEQ ID NO: 120226 - DNA, 2574 bp, Zea Mays
accccgttccctcatgtgcttttgtctttgccgtccccgttcccgttcccccataaactccacaccccccgcattactgcgctcccatctccgcatccgcttgctgctgccgcccctgctccggctgggacgagcgagcctcctctccctccttgtcgcgtcccacataactgtgcctcctcgccgctgcgccccacctctgctcaggcccacactgccctgatcccgccggagtgcccgcacgcgcgcccttgcctgggccggccgccggcgaggggtctgggcggtcggtcgacgtgaccccccccgcaggcgcgctgtctcttcgtcgccctgctcttttcgaccggcctcgcctcgctgtccgcgagtggcgccgtgtcggcggcacacgccggcggcggtgcgggaacaaggcgagggcggcgcgccttgtcgccgtgcggactgagcatgacttgagccttgaggtgcgtgcgatttctggctaacctgctggaaatagcatgggcggtagagggattgggaacgggggcaaattcaggagatgataccaccataatccaccaaccgaatcaagaagctaaggtccggttctggctttgtgaaactgtcatgtgtcaaatctggctcagtaactgttcactcgtcgccctcttcatcgccggtgtacgccggcgccgaatcggcgtccagtatccgtgccaccgaagcacgccaaccacctcgagcactctaccctcgctgtggttgctgatgctaccggcgcctcccctcccttatctgatttaggatgtgtacagaggggctgtattcttgtgtataggttctctttctatcggtcaactgttgctgattcggacggaatgttggaggatcaatcttgcctgatatcaaggtcgctgccgggttcctgtgagcaggaatccagactagcttacatgacttaccacctacttgagatcacgaggagtaagcgcccgcctgggaccctgtcgattgagcacgacgtcgtggcagcattgactaaaaggacaaagtcctctgagcaccaaaacagcgaggcgctggattgtcaaggaagtaatggtcagggcgactcagattcaagcaccctgataagttccattggccgggacaactcgatcaactgtcttgctcgttgttctcgttctgactatggttctatcgcatcactgaaccggagcttccgatcgcttgtgcgcagtggcgaactgtacaaggagcgtcggcagcaggggatttcagaacactgggtctacttctcttgcaacgtgcaggagtgggaggcgtatgacccctaccgttcacggtggatgacgctcccaaggatgccccgcaacgaatgtttcatgcactctgacaaggagtcgcttgccgtgggcaccgagcttctggtgtttggaaaggagatcctctcgcatattatcctgagctatagcatcctgacacattcatggtcgcggggcgttgaaatgaacgcccctagatgtttgtttggatcagctagttttggagagaaagcaattatagccggaggcatggatgctgatggaagggtgcttcgctccgtcgagctgtataactcggaaaccaagaggtggacaacacttccaagcatgaataaggctaggcggaagtgctctggtgtcttcatggatggcaagttctatgtgatcggtggaatggccagtaacacagaagtgcttacttgtggagaagagtacgacctagatagaggtacctggcgggtgatagagaacatgtccgaggggctcaatggtgcaagcggcgctcctccactcgtcgccgttgtcgaaaacgagctatatgcagcgcagtacgccggaaagctagtgaggaagtacaataaaagggacaactcgtggacgacgctgggggagttaccggagcggccagaagccgtggatggctggggcattgcgttccggggctgcggagagcggctgttggtcatcggtggaccgagagtgctgggcggcgggatgatcgagctccattcctggattccaagcgaggggccactgcagtggaacatgatcggaagcaagccctcgggtaactttgtctataactgtgctgtcatggggtgctgatacgtgcgcccctcaaaacataccgtcgacgacacacgaaagattgtgatattgggtttttttttattatcaaatggcataaagcactgattaattccgcctgacgggtaatctctgcattcttttttttgacatttcagattttactcaaggttcgtccaatagagctagtcggttccgtgtactcgttaatagctagctacccattggttcctgtgctcagcacattctatttgcagtccatctgtacctttggtccatatgatatactctgttgaaatgagtttttttctgagatggacgcgtacaggtgataaattgtaattggggggtgggtaaccgtgcatctatatgatttgtttgtatcatgttctgaaccgtgtctcaacgctgtaattctattgtgcaaatgtctcttttccaagaactgcatgaa

SEQ ID NO: 120227 - DNA, 2356 bp, Zea Mays
tttgtctttgccgtccccgttcccgttcccccataaactccacaccccccgcattactgcgctcccatctccgcatccgcttgctgctgccgcccctgctccggctgggacgagcgagcctcctctccctccttgtcgcgtcccacataactgtgcctcctcgccgctgcgccccacctctgctcaggcccacactgccctgatcccgccggagtgcccgcacgcgcgcccttgcctgggccggccgccggcgaggggtctgggcggtcggtcgacgtgaccccccccgcaggcgcgctgtctcttcgtcgccctgctcttttcgaccggcctcgcctcgctgtccgcgagtggcgccgtgtcggcggcacacgccggcggcggtgcgggaacaaggcgagggcggcgcgccttgtcgccgtgcggactgagcatgacttgagccttgaggtgcgtgcgatttctggctaacctgctggaaatagcatgggcggtagagggattgggaacgggggcaaattcaggagatgataccaccataatccaccaaccgaatcaagaagctaagatttaggatgtgtacagaggggctgtattcttgtgtataggttctctttctatcggtcaactgttgctgattcggacggaatgttggaggatcaatcttgcctgatatcaaggtcgctgccgggttcctgtgagcaggaatccagactagcttacatgacttaccacctacttgagatcacgaggagtaagcgcccgcctgggaccctgtcgattgagcacgacgtcgtggcagcattgactaaaaggacaaagtcctctgagcaccaaaacagcgaggcgctggattgtcaaggaagtaatggtcagggcgactcagattcaagcaccctgataagttccattggccgggacaactcgatcaactgtcttgctcgttgttctcgttctgactatggttctatcgcatcactgaaccggagcttccgatcgcttgtgcgcagtggcgaactgtacaaggagcgtcggcagcaggggatttcagaacactgggtctacttctcttgcaacgtgcaggagtgggaggcgtatgacccctaccgttcacggtggatgacgctcccaaggatgccccgcaacgaatgtttcatgcactctgacaaggagtcgcttgccgtgggcaccgagcttctggtgtttggaaaggagatcctctcgcatattatcctgagctatagcatcctgacacattcatggtcgcggggcgttgaaatgaacgcccctagatgtttgtttggatcagctagttttggagagaaagcaattatagccggaggcatggatgctgatggaagggtgcttcgctccgtcgagctgtataactcggaaaccaagaggtggacaacacttccaagcatgaataaggctaggcggaagtgctctggtgtcttcatggatggcaagttctatgtgatcggtggaatggccagtaacacagaagtgcttacttgtggagaagagtacgacctagatagaggtacctggcgggtgatagagaacatgtccgaggggctcaatggtgcaagcggcgctcctccactcgtcgccgttgtcgaaaacgagctatatgcagcgcagtacgccggaaagctagtgaggaagtacaataaaagggacaactcgtggacgacgctgggggagttaccggagcggccagaagccgtggatggctggggcattgcgttccggggctgcggagagcggctgttggtcatcggtggaccgagagtgctgggcggcgggatgatcgagctccattcctggattccaagcgaggggccactgcagtggaacatgatcggaagcaagccctcgggtaactttgtctataactgtgctgtcatggggtgctgatacgtgcgcccctcaaaacataccgtcgacgacacacgaaagattgtgatattgggtttttttttattatcaaatggcataaagcactgattaattccgcctgacgggtaatctctgcattcttttttttgacatttcagattttactcaaggttcgtccaatagagctagtcggttccgtgtactcgttaatagctagctacccattggttcctgtgctcagcacattctatttgcagtccatctgtacctttggtccatatgatatactctgttgaaatgagtttttttctgagatggacgcgtacaggtgataaattgtaattggggggtgggtaaccgtgcatctatatgatttgtttgtatcatgttctgaaccgtgtctcaacgctgtaattctattgtgcaaatgtctcttttccaagaactgcatgaa

SEQ ID NO: 120228 - DNA, 2255 bp, Zea Mays
tttgtctttgccgtccccgttcccgttcccccataaactccacaccccccgcattactgcgctcccatctccgcatccgcttgctgctgccgcccctgctccggctgggacgagcgagcctcctctccctccttgtcgcgtcccacataactgtgcctcctcgccgctgcgccccacctctgctcaggcccacactgccctgatcccgccggagtgcccgcacgcgcgcccttgcctgggccggccgccggcgaggggtctgggcggtcggtcgacgtgaccccccccgcaggcgcgctgtctcttcgtcgccctgctcttttcgaccggcctcgcctcgctgtccgcgagtggcgccgtgtcggcggcacacgccggcggcggtgcgggaacaaggcgagggcggcgcgccttgtcgccgtgcggactgagcatgacttgagccttgagatttaggatgtgtacagaggggctgtattcttgtgtataggttctctttctatcggtcaactgttgctgattcggacggaatgttggaggatcaatcttgcctgatatcaaggtcgctgccgggttcctgtgagcaggaatccagactagcttacatgacttaccacctacttgagatcacgaggagtaagcgcccgcctgggaccctgtcgattgagcacgacgtcgtggcagcattgactaaaaggacaaagtcctctgagcaccaaaacagcgaggcgctggattgtcaaggaagtaatggtcagggcgactcagattcaagcaccctgataagttccattggccgggacaactcgatcaactgtcttgctcgttgttctcgttctgactatggttctatcgcatcactgaaccggagcttccgatcgcttgtgcgcagtggcgaactgtacaaggagcgtcggcagcaggggatttcagaacactgggtctacttctcttgcaacgtgcaggagtgggaggcgtatgacccctaccgttcacggtggatgacgctcccaaggatgccccgcaacgaatgtttcatgcactctgacaaggagtcgcttgccgtgggcaccgagcttctggtgtttggaaaggagatcctctcgcatattatcctgagctatagcatcctgacacattcatggtcgcggggcgttgaaatgaacgcccctagatgtttgtttggatcagctagttttggagagaaagcaattatagccggaggcatggatgctgatggaagggtgcttcgctccgtcgagctgtataactcggaaaccaagaggtggacaacacttccaagcatgaataaggctaggcggaagtgctctggtgtcttcatggatggcaagttctatgtgatcggtggaatggccagtaacacagaagtgcttacttgtggagaagagtacgacctagatagaggtacctggcgggtgatagagaacatgtccgaggggctcaatggtgcaagcggcgctcctccactcgtcgccgttgtcgaaaacgagctatatgcagcgcagtacgccggaaagctagtgaggaagtacaataaaagggacaactcgtggacgacgctgggggagttaccggagcggccagaagccgtggatggctggggcattgcgttccggggctgcggagagcggctgttggtcatcggtggaccgagagtgctgggcggcgggatgatcgagctccattcctggattccaagcgaggggccactgcagtggaacatgatcggaagcaagccctcgggtaactttgtctataactgtgctgtcatggggtgctgatacgtgcgcccctcaaaacataccgtcgacgacacacgaaagattgtgatattgggtttttttttattatcaaatggcataaagcactgattaattccgcctgacgggtaatctctgcattcttttttttgacatttcagattttactcaaggttcgtccaatagagctagtcggttccgtgtactcgttaatagctagctacccattggttcctgtgctcagcacattctatttgcagtccatctgtacctttggtccatatgatatactctgttgaaatgagtttttttctgagatggacgcgtacaggtgataaattgtaattggggggtgggtaaccgtgcatctatatgatttgtttgtatcatgttctgaaccgtgtctcaacgctgtaattctattgtgcaaatgtctcttttccaagaactgcatgaaaaaaaaaagaaaagaaa

SEQ ID NO: 120229 - DNA, 1203 bp, Zea Mays
gctacacgcacttgcgctccgacccaatctggatccaaccacgagccagctcgctataaaggcaccctctccctttctgtctccctcacaactcagttattctacagctttaattttgcagagcgaccaccagtccaggtccagcgcgggacgcatcacatacacgcggtaccttcgttcgttctcaagcttatagcgcccgatcgaccctgcgcggagctagttcgttcgttccggcaggcggcggcagcgaagcagtgcgacgacgacgacgaggtacgtagagagcgagaggatagatgtcgagccgaaggtcgtcgtcgcacggcaacatctccgaggacgagatgaacgagctcgtctccaagctccaggccctgctccccagctcccgccgccgccgcggctccggccaggcgtcgacggcgaagctgctgaaggagacctgcagctacatcaagagcctccagcgggaggtggacgacctcagcgaccggctgtcggacctcttgtccaccatggaccacaacagccccgcggcggagatcatccgaagcatcctccgctcctgagcgcgcgcaagggcgaggtcaacgaacgccggcctccgatcgatcgccgacagcgcgcgctctccggccggctggtcacgtgcgggagctgagctcaattaggtagctagggtatatatacatataatatatatatctacatgtacgtgtatctaccttttcctttaccagtctccctagatctgagatcatgtggctagctccgtataaaaatgtactagccacacgctgacacgcacacgtatgcatgatggtctctgcgctaagcttcactgggtagtagggtatagcactagagcctaagcaagcttatcctcctcactttagtatagctcgcagcagcagcagtctctcgattcctcggcgatcttcggtggcttaattggatcgagctggctagtgcgctctctctctctctctcatctctagcaggcaggaaaagagacaaccgaccgaccactactagcctagcctagagcaaattgactgtcgttatgatgatgatgatgtactgctaaagcttttattaacgacttcaataacatgtacgtcctgcggttagtgctttgtttttcactcaccgtgccatgcatggcgttaagaaatgcaaccgctgcgtgtctgtactgta

SEQ ID NO: 120230 - DNA, 2299 bp, Zea Mays
gaagggcgagagacggagcgtgagatcgatcgagcttcaaggagggcaagatgatttcggcggcggacttgtaccacgtgatgacggccgtggtgccgttgtacgtggcgatgatcctggcgtacgggtcggtgcggtggtggcgcatcttctcgccggaccagtgctccgggatcaaccgcttcgtggcgctcttcgcggtgccgctgctgtccttccacttcatctccaccaacaacccctacaccatgaacctgcgcttcatcgccgccgacacgctgcagaagctcatggtgctggccatgctcaccgcgtggggccacctcagccgccgggggcggggcagcctcgacctggactggaccatcacgctcttctccctctccacgctgcccaacacgctcgtcatgggcatcccgctgctcaggggcatgtacggcgacttctcgggaagcctcatggtgcagatcgtcgtgctccagtgcatcatctggtacacgctcatgctcttcatgttcgagtaccgcgccgcgcggctgctcatcgccgagcagttcccgggcaacgccgccggggccatcgcctccatcgccgtcgacccggacgtggtctccctcgtcgaccacggccgcggggacgccatcgagacggaggccgaggtcagggaggacggcaggatacacgtcaccgtgcgccgctccagcgcgtcgcgctccgacgtcgtctactcgcgccgctccgtgggcggcttctccggcgccaccccgcgccccagcaacctcaccaacgccgagatctactccctgcagtcgtcgcgcaacccgacgccgcggggatccagcttcaaccacaccgacttctactccatggtcggccgcagctccaacttcggcgcggccgacgcgttcggcgccgtccgcaccggcgccggcaccacgccgcgcccgtccaactacgaggacgacgcgtccaggcccaagtacccgctgcccgtggtgagtgcggcgcccggggtggcaggccactacccggcgccctggagcgccaggaaggcggcgacgaacgggcatgccaagggcgaggacctccacatgttcgtctggagctccagcgcgtcacccgtatcggacttcttcggcggcggcgcgccggactacaacgaccacgccgcggccgccaagtctccccgcaaaatggacggaggagccagggacagggacgactacgtggagcgcgacgagttcagcttcgggaacaggggcgcgatggaggacagggacgcggaggacccggcggcggcgggcggggaccctaacgcggtggccgcggcgacggcgatgccgccgacgagcgtgatgacccggctgatcctgatcatggtgtggcgcaagctgatccgcaacccgaacacctactccagcctcatcggcgtcgtctggtcgctcgtctgcttcaggtggaacttccagatgccggacatcgtcctgcactccatctccatcctgtcggacgcggggctcggaatggccatgttcagcctcgggctgttcatggcgctgcagccgcggatcatcgcgtgcgggaacaaggtggccacgttcgccatggcggtgcgcttcctgaccggcccggccgtcatggcggccgcgtccttcgccgtgggcctccgcggcacgctgctgcacgtcgccatcgtccaggcagctctgccccagggcattgtccccttcgtcttcgcaaaggagtacagcgtgcaccctgacattctcagcaccgcagtcatttttggcatgctcatcgccctgccgatcacgctcgtctactacatcctgctcggcctgtgaccgtctcatccccatggagtcgaggatgccaccccctgcagtgctgcaactgtaaagaccactgctgctgtcacatcccgttcatgggagagggagataaggccaggaaggacgggagatagagctgctacgacattgtttggcgcttgcaaaagagtggcgtgttttctctctctctatctatctagaagtaggtatggggattgggtctgggtggatcctcgcaaaaaaaagggtgggaggtggacaagatgcggtggcaaaacggaccaaaagcaggcaggcgcaagtacaaaggagatccagtttgagcaggtcacgagatcgagatggcttggttttttttcgacgggtttagggaattttggtaggccgcgctgattgatgtgaaatcaacgccattctgagttatgacaggagagatttgatctagcttgagataaagagctcacctc

SEQ ID NO: 120231 - DNA, 98 bp, Zea Mays
tttttttcactcaagaacatatatcaccattggcacatcagtccagaagcctacttcattacccactttacacaagaaattctgccatcacaatcata

SEQ ID NO: 120232 - DNA, 96 bp, Zea Mays
ccggctccgcgtcgccttcgacaatcatgcctaactcgagcgggaaggcacggagcgagaaccagagcaggggcgcgggaacctgagcgggggcga

SEQ ID NO: 120233 - DNA, 1857 bp, Zea Mays
atggacgatccctcctccgcctccaacaagcgcaagcgcgggcgcaagcccaaggtgtcgccgccctcccccgaccgctcatccccctctgcggtggccgcccccgctcccgttccggttgcgcgccgtggccgcaagccgcgacgtcatgaggaccccgccgacgcggacgccgcgcgtccgccgtccccgctccgccgcagggtgcttaatacggtggcaaatggaggcgatgcggtggcggaggcaggccccgcgagctgggacgaggtggtgagggtggtgccgtgcatggacgccgtggtcaaggtgttctgcgtgcacacggagcccaacttctcgctgccgtggcagcggaagcggcagtacagctctagcagtagcgggtttatcatcagcggccgccgtgtcctcaccaatgcccactccgtggagcactatacccaggttaagcttaagaagcgcggctctgacaccaagtaccttgccaccgtcctggccatcggcacagagtgcgatattgcgctcttaactgtcaatgacgatgaattctgggaaggagtttcacctgtcgagttcggaacattaccggcccttcaggacgcagttactgttgttggttatccaattggaggagatactatatccgtgacaagtggagttgtctctaggatagaaatactttcatacgttcatggttctacagaacttctaggattgcagatagatgcagctattaattcaggaaattcaggtggtccagcttttaatgatagaggcaaatgtgtcggtatagcatttcaatctcttaaacatgaagatgccgagaatataggctatgtgataccgactccagttattacacatttcatcgaggactacaaaaattctggaggatacacagggtttcctatactaggagttgaatggcagaaaatggagaatcctgatctccgtaaagcaatgggaatgaaaccagatcaaaagggtgttcgtgttaggagggtggagcccacggctccagaatctggatgcctacaaccgtctgatattattcttagctttgatggtgttgacattgctaatgatggaacagccagacaagctgtcccggttccctacacattgatcctcgatgtcaggatgctgagtggtgggggaggaggtgggaatggcagcagcggcggcgggggagaaggcatggacggcgggcagcgtggagatggcagatgcgatcgcgcgtcgtgcagcagcggagatgacagacatggtcgcatggcagaggaaagatggcagacctggtcgcacggcagcagagggacagcagatgtggtcgcgtggcagcggagatgtcgggcgcagccaggaggaggcagacgtcagcagaaacgaagggtggaggctgatggcgacaatgacagaagggaggaagagagaaagcagagttgggactcgtgtgtgcatctgggagatggtggagggataaggtggggacctcctccaactttggtgtatgaccctaaaacactggttgtggccaactacatgaaggaacatggctacttgttcctccacactgctgtggatactatctctaagcaggtgcttgtatcagatatcaatataggttatgaagaaatagttaatactcaggttcttgctttcaatggccagcctgtaaaaaatttaaagaacttagcgaccatggtggaaaattgcaaggatgaatttttgaagtttgatctggagtatgaccagattgttgtcctcgagacgaaaactgcaaagtctgctacccaggacattctgacgacgcactgtataccgtctgcaatgtcggatgaccttaaggcctag

SEQ ID NO: 120234 - DNA, 2345 bp, Zea Mays
atggacgatccctcctccgcctccaacaagcgcaagcgcgggcgcaagcccaaggtgtcgccgccctcccccgaccgctcatccccctctgcggtggccgcccccgctcccgttccggttgcgcgccgtggccgcaagccgcgacgtcatgaggaccccgccgacgcggacgccgcgcgtccgccgtccccgctccgccgcagggtgcttaatacggtggcaaatggaggcgatgcggtggcggaggcaggccccgcgagctgggacgaggtggtgagggtggtgccgtgcatggacgccgtggtcaaggtgttctgcgtgcacacggagcccaacttctcgctgccgtggcagcggaagcggcagtacagctctagcagtagcgggtttatcatcagcggccgccgtgtcctcaccaatgcccactccgtggagcactatacccaggttaagcttaagaagcgcggctctgacaccaagtaccttgccaccgtcctggccatcggcacagagtgcgatattgcgctcttaactgtcaatgacgatgaattctgggaaggagtttcacctgtcgagttcggaacattaccggcccttcaggacgcagttactgttgttggttatccaattggaggagatactatatccgtgacaagtggagttgtctctaggatagaaatactttcatacgttcatggttctacagaacttctaggattgcagatagatgcagctattaattcaggaaattcaggtggtccagcttttaatgatagaggcaaatgtgtcggtatagcatttcaatctcttaaacatgaagatgccgagaatataggctatgtgataccgactccagttattacacatttcatcgaggactacaaaaattctggaggatacacagggtttcctatactaggagttgaatggcagaaaatggagaatcctgatctccgtaaagcaatgggaatgaaaccagatcaaaagggtgttcgtgttaggagggtggagcccacggctccagaatctggatgcctacaaccgtctgatattattcttagctttgatggtgttgacattgctaatgatggaacagccagacaagctgtcccggttccctacacattgatcctcgatgtcaggatgctgagtggtgggggaggaggtgggaatggcagcagcggcggcgggggagaaggcatggacggcgggcagcgtggagatggcagatgcgatcgcgcgtcgtgcagcagcggagatgacagacatggtcgcatggcagaggaaagatggcagacctggtcgcacggcagcagagggacagcagatgtggtcgcgtggcagcggagatgtcgggcgcagccaggaggaggcagacgtcagcagaaacgaagggtggaggctgatggcgacaatgacagaagggaggaagagagaaagcagagttgggactcgtgtgtgcatctgggagatggtggagggataaggtggggacctcctccaactttggtgtatgaccctaaaacactggttgtggccaactacatgaaggaacatggctacttgttcctccacactgctgtggatactatctctaagcaggtgcttgtatcagatatcaatataggttatgaagaaatagttaatactcaggttcttgctttcaatggccagcctgtaaaaaatttaaagaacttagcgaccatggtggaaaattgcaaggatgaatttttgaagtttgatctggagtatgaccaggtatcttcttggtccttctttatttgacttttccagctaataaaagcatttcgcatggacttaaatacctggaaatagctgatattaggtaggcagttttctctcctcaagttacacttgcactcttataagacgtctcatgatttctcaggtctagcaaatactttttcttgccaaattggtcatggacagctatagcctcttgcctcattatatactataagataggattatttaaatgcacttatcgcatcacatattgaaaactgctccaaagtaactgtcaggattcttttttaattagtttctttattacttgaagttagtaactagcataatatatgatttgatagattgttgtcctcgagacgaaaactgcaaagtctgctacccaggacattctgacgacgcactgtataccgtctgcaatgtcggatgaccttaaggcctagacgcctagtagtgagaggtgggagcatgatgcagccctgggccatcaggtgggccaacagcttgggccacattttcggttgaattgattagcgcagcatactacctggtccgggagcaaaagaaaccccaatgtt

SEQ ID NO: 120235 - DNA, 1358 bp, Zea Mays
tgtaccaatagcacgaagagaccacgcctaaacaagacaccaacgggacagggcgataaaaatgaagagggactgagggagggagggagggcgcttctctaggcagtagtgaggtgagtgagagagactgaggaggcatgtgaccctcttcactcgcttcaccctgttcatcactcgcttgtacaagaagtcacgcaccaaacgggcaagggcaaacaccaccaaagaaggcgagaacgcactccgtccctctcctccaggaccgcccgctcttatcccgtttctcccttctctgggctcggagaatcggagatggcgtccagcgcctctcggttcatcaagtgcgtcacggtcggcgacggtgccgtgggcaagacatgtatgctcatctgctacaccagcaacaagttccccactgattacatacccacggtgttcgacaatttcagtgcaaatgtcgttgtggatggcaccacggtgaatttgggcctgtgggataccgcagggcaggaagattacaaccgactgaggcctctaagctaccgtggtgcagatgttttcgtgcttgcattctcacttgtgagtcgagctagctatgagaatatcatgaagaagtggataccggagcttcagcattatgcacgtggggtgcctgttgtgttggtaggcacaaaatttgatcttcgtgaagacaagcactacttgatggaccatcctgggttggtgcctgttaccacagcacaaggggaggaacttcgtagacaaattggtgctatgtattacatcgaatgcagttcgaagacacagcagaatgtcaaagctgtgttcgatgctgccatcaaggttgtaatccagcctccaactaaactaagagaaaagaagaaaaagaaatcacgcaagggatgttcgatggtgaacatcttatctggaagaaaaatgctatgcttcaagtcctgaatgatcgaagggggtcttacctgaactaataccatgagtgtgaccccaagttcgcgaagcttgaaatcttgatgcgctcgttgcgcatgtatatttgcacctttggttattaatcactagaggtagatgattgaaactaatctgcttaaccaatgtgcactgctgggcgctggcgtggttagctatatcagttaggcagttcgacagaggtcaaagagattgagattttgttctttcttggcaatgtcacagcttttgtgaatctggtctcatcatactgtccgctagtttatccaatgattccatggtggaatcaatccatagcaacattgtgttgaatgatcctttgcttttgcgctaagcatataacattccagttttggtgaaagctggaagtgaaa

SEQ ID NO: 120236 - DNA, 1073 bp, Zea Mays
gtagacccgtccctgtctccaacttcagagcatccaatcgctcaacagcgccactgatgagcctctgtcgtcgtcgtcatcagtgaaccaggcgaggcgacgatcggacccgggtcgtaagcggtaagcccaccggctcaacagcaggctgcagatccccccaccccccacgcaactccatctcctctccgcctccacctgcacccatcgagcaccgaacggcggcggcatggaggctggcggcgaggagttcgcgatcggcgtggtgatctccgcgaagaccaccctgggggaggagttcgagggccagatcgtcgccttcgaccgcccctccaacctcctcgttatccatatccttcgcaaatcgctcatgctcgtcacccgcatctccttgtcatttacctatcggtctggctgtttgtatgcctgcgctgttgttttgtttccttgacgggtagatcacaggagggcgtgggtagggcggagaggggggagcggaggaacgtgagggtcctcaaagcgaactacatccgggagttctcggtggtcagtaagggtgacgaccctctcgatcctgccagctgcatgctggacctcaactccatttatgcccgggaggatgctgcactcagagattgaagctgagagaattggtgttggtgtcaccccagaagctcaaagtatatttgatgcgctgtccaagacgcttccggttcagtgggacaagactgacattgtcgtaatgaaggaggttcgtgtacgcagtccgtacctgcctgaaaatgttaatggaggaacagctgcagcaaatgaacgcgttaagaaagtgattgactttgaaaggaaaagattacattcacgtgtacctggccaattctcttgattaaaaggcttgactattttttacattagcctcgtgttgtatttctaatactgcatccagttttcttattctcatcgatgcggttttctataaaatgtttcagcaaaaatctgtcgtaataatcacatcaactagctagatctgtactgtttggtagttattcagatttttataaaaatattttggatcc

SEQ ID NO: 120237 - DNA, 1081 bp, Zea Mays
gtagacccgtccctgtctccaacttcagagcatccaatcgctcaacagcgccactgatgagcctctgtcgtcgtcgtcatcagtgaaccaggcgaggcgacgatcggacccgggtcgtaagcggtaagcccaccggctcaacagcaggctgcagatccccccaccccccacgcaactccatctcctctccgcctccacctgcacccatcgagcaccgaacggcggcggcatggaggctggcggcgaggagttcgcgatcggcgtggtgatctccgcgaagaccaccctgggggaggagttcgagggccagatcgtcgccttcgaccgcccctccaacctcctcgttatccatatccttcgcaaatcgctcatgctcgtcacccgcatctccttgtcatttacctatcggtctggctgtttgtatgcctgcgctgttgttttgtttccttgacgggtagatcacaggagggcgtgggtagggcggagaggggggagcggaggaacgtgagggtcctcaaagcgaactacatccgggagttctcggtggtcagtaagggtgacgaccctctcgatcctgccagctgcatgctggacctcaactccatttatgcccgggaggatgctgcactcaggcaagcagagattgaagctgagagaattggtgttggtgtcaccccagaagctcaaagtatatttgatgcgctgtccaagacgcttccggttcagtgggacaagactgacattgtcgtaatgaaggaggttcgtgtacgcagtccgtacctgcctgaaaatgttaatggaggaacagctgcagcaaatgaacgcgttaagaaagtgattgactttgaaaggaaaagattacattcacgtgtacctggccaattctcttgattaaaaggcttgactattttttacattagcctcgtgttgtatttctaatactgcatccagttttcttattctcatcgatgcggttttctataaaatgtttcagcaaaaatctgtcgtaataatcacatcaactagctagatctgtactgtttggtagttattcagatttttataaaaatattttggatcc

SEQ ID NO: 120238 - DNA, 966 bp, Zea Mays
agacccgtccctgtctccaacttcagagcatccaatcgctcaacagcgccactgatgagcctctgtcgtcgtcgtcatcagtgaaccaggcgaggcgacgatcggacccgggtcgtaagcggtaagcccaccggctcaacagcaggctgcagatccccccaccccccacgcaactccatctcctctccgcctccacctgcacccatcgagcaccgaacggcggcggcatggaggctggcggcgaggagttcgcgatcggcgtggtgatctccgcgaagaccaccctgggggaggagttcgagggccagatcgtcgccttcgaccgcccctccaacctcctcgttatccaggagggcgtgggtagggcggagaggggggagcggaggaacgtgagggtcctcaaagcgaactacatccgggagttctcggtggtcagtaagggtgacgaccctctcgatcctgccagctgcatgctggacctcaactccatttatgcccgggaggatgctgcactcaggcaagcagagattgaagctgagagaattggtgttggtgtcaccccagaagctcaaagtatatttgatgcgctgtccaagacgcttccggttcagtgggacaagactgacattgtcgtaatgaaggaggttcgtgtacgcagtccgtacctgcctgaaaatgttaatggaggaacagctgcagcaaatgaacgcgttaagaaagtgattgactttgaaaggaaaagattacattcacgtgtacctggccaattctcttgattaaaaggcttgactattttttacattagcctcgtgttgtatttctaatactgcatccagttttcttattctcatcgatgcggttttctataaaatgtttcagcaaaaatctgtcgtaataatcacatcaactagctagatctgtactgtttggtagttattcagatttttataaaaatattttggatcc

SEQ ID NO: 120239 - DNA, 505 bp, Zea Mays
tcgtcgtcgtcatcagtgaaccaggcgaggcgacgatcggacccgggtcgtaagcggcaagcagagattgaagctgagagaattggtgttggtgtcaccccagaagctcaaagtatatttgatgcgctgtccaagacgcttccggttcagtgggacaagactgacattgtcgtaatgaaggaggttcgtgtacgcagtccgtacctgcctgaaaatgttaatggaggaacagctgcagcaaatgaacgcgttaagaaagtgattgactttgaaaggaaaagattacattcacgtgtacctggccaattctcttgattaaaaggcttgactattttttacattagcctcgtgttgtatttctaatactgcatccagttttcttattctcatcgatgcggttttctataaaatgtttcagcaaaaatctgtcgtaataatcacatcaactagctagatctgtactgtttggtagttattcagatttttataaaaatattttggatcc

SEQ ID NO: 120240 - DNA, 146 bp, Zea Mays
agaggactgttttatagttgtttcaagggagatagagatagaaggtggattttatatttgttaccaaatagcttatagttcttttgatagcccacaatccaaattaaacagccttttaacaccctacaacttacagtagatttttg

SEQ ID NO: 120241 - DNA, 1165 bp, Zea Mays
aactctgcatttgagttgctcgtcctctccccactttctatcacgcaattcctatctcgcagtcgtcgccgctccccggccgggacccagcagagcagagcaggcagtgtcggcgcagcatggggaactgccaggcggcggaggcggcgacggtgctgctccagcacccgggcgggcgggtggagcggctctactggtcaaccagcgccgccgaggtcatgcgcgccaacccaggccactacgtcgcgctcgtcacgctccgcgtcgccgaggagcggcaggacgcccccggcggcgagcggcgcaccgtgcgcctcacgcgcgtcaagctgctcaagcccaaggaggcgctgctcctcggccacgtctaccgcctcatcaccacccaggaggtggcgagggcggtgcgggcgaggaaggaggagaagcagaggaaagcgcagcagctgcttgagtcgaggcagggtgtcgcgaggggcgcggccgagggggaggacgacgacgacgaggcagccctggacgccagccttgatcagttggcgcgtcaggacaacagcagccggagctccagtgcagggcaacggcagtggcggccgtcgctgcagagcatcgaagaggccacgacctgatgtcagctcagctcagtacactcataccacgcaaccgtaggggtagggccgtaatcactgaccgctggacctgtatcttctcggtgattcacctggcctcgattagttcatcgcagggggttgctattggcttactcctacatttgcacgctgtgagtttgacaccctgggacgagaggactacttcagatgcagtatgtagcctctggatccgtgtaaattttcaggcccttggtcaggagtttgttagtgagtttgcttttcctttcttttttttttctctcccctccatacagtttgcgcaccgaatcatgacaaattagagtactagcttatactattagatttacaaccagacatgtcatttacttcatactctctctctctttctctcgatactctctctctctctcgcagatggggatcgccctatagcttttaaagatagcgctgcgtttctttagtactcggtgttgagatgccaaatagacaatcataagctcagtgccaatgatgcaggcagcagatggtcggag

SEQ ID NO: 120242 - DNA, 1578 bp, Zea Mays
tttgagttgctcgtcctctccccactttctatcacgcaattcctatctcgcagtcgtcgccgctccccggccgggacccagcagagcagagcaggcagtgtcggcgcagcatggggaactgccaggcggcggaggcggcgacggtgctgctccagcacccgggcgggcgggtggagcggctctactggtcaaccagcgccgccgaggtcatgcgcgccaacccaggccactacgtcgcgctcgtcacgctccgcgtcgccgaggagcggcaggacgcccccggcggcgagcggcgcaccgtgcgcctcacgcgcgtcaagctgctcaagcccaaggaggcgctgctcctcggccacgtctaccgcctcatcaccacccaggaggtggcgagggcggtgcgggcgaggaaggaggagaagcagaggaaagcgcagcagctgcttgagtcgaggcagggtgtcgcgaggggcgcggccgagggggaggacgacgacgacgaggcagccctggacgccagccttgatcaggtgactcaactgctttttgatcgcttcttcaagggcgtatcagttgttcagcttctcgtgactatcctcatcacctgttcttgtcactgaagaaaaaaatctgacacaatggagaatcaacaagtaaacaactaaaattttccaattacatccaattcatgtagcgaacaagctcttaaggggtagtttgagaatcacattattctagagatttccattttctcaaataaaaattagtttatttttcttggaaaaataaaaatcctttaaaagcagagtttccaaactagacttagtaaacaaaatatcacaaattcaatattccaggtgaaatgcaaacaagaagatcgaagtatttttttttcaagaaaaaaaacgtgtaactaactaactaactgatggctgatggtgctatagcctatagtagcaccgagaaggaagtacaccattagattaggggatagattagtaggtgagtttcaactgatgtcagggccgggcgaggaatcttttccttttcctacggattttactaaccatggaacatgcaaaggttccttcttctcatcactcttctgttctccctccatctgactgcagttggcgcgtcaggacaacagcagccggagctccagtgcagggcaacggcagtggcggccgtcgctgcagagcatcgaagaggccacgacctgatgtcagctcagctcagtacactcataccacgcaaccgtaggggtagggccgtaatcactgaccgctggacctgtatcttctcggtgattcacctggcctcgattagttcatcgcagggggttgctattggcttactcctacatttgcacgctgtgagtttgacaccctgggacgagaggactacttcagatgcagtatgtagcctctggatccgtgtaaattttcaggcccttggtcaggagtttgttagtgagtttgcttttcctttcttttttttttctctcccctccatacagtttgcgcaccgaatcatgacaaattagagtactagcttatactattagatttacaaccagac

SEQ ID NO: 120243 - DNA, 5183 bp, Zea Mays
ttccgccaccaccaccacacctcgtccagcggcggtcggcaaaccctagaaccttagacccatccgccatactgcggttactgggcgcgggctagggccgggcctccgtaatcgcagcttgcggcgatgccgcttttcatctccgacgaggagctccgtctcctcggcggcgacacggctgccgttgccgagcgggctgatgctgccatccgtgagctccggcggcaggtggataccgtacgcgccgaggcggatgccgctgcgatcgctgccgagcagacctgcgccctcctcgagcaacggtacgcctccctctccgcggagttcgatcgctccaaggccgaggctgccgagctcaccgcctctgccgagcgccgcgctgccgagcttgcctcctctcaggcggagatacatcagcttcgcatccaggcgattgctaaggatggtgaggtggagaggttgaaaattgaaatctcggagctgcacaagtccaagtgccagtcgctggagttgattgagcagagagatgcagaaattaaagagaaggacggcatcatccagagctactacaataaaattgtaaacctggcagaaacttctgctggtaaagaggccaggatacaagaggtcgaagcaaagtttacccattgtcaagcaatttgcaatcgcatgactcaggagaaggagctgcttgaaaagcacaatgtctggcttgatgaagaactgaaagcaaaagtgaagaacttggctgaactaagaaaaacaaatatggatgaggaggctcggttgtcagcaagtattgctgagcttgaaagagagatatctgaatcctctagctccttgaggcgaagcaaagaacgcatctctgaactggagcaaagggtatcctacatggaaaaggtcaagaaacttgctgagcttcaccaagaaagttctgaggaatggtcgaaaaaggctggggagctcgaaggtgttattaaagcattagagacacatctgacccaagttgaagatgaatacaaggaaaagcttgagaaggagaccttgtccaggagagaccttgaaaaggaagctgtcaacttgaagcagaagcttgaaaagtgtgaatttgatctggagaatacaaggaagtccagtgaattgagcctcgttccattgaccagcattgcagcaggctcttctgatgtagtagacacaacagtacaaggactgcctatttctgatgcagttaatcagaatgatctaatggttattccaaaggtacctagtggtgtttctggtactgctttagctgcttctcttcttcgtgatggttggagtcttgctaagatctatgagaaataccaagaagctactgatgcttttcttcatgagaggcggggaaggagacatgcagaagcagttttggaaagggttttgcatgaaatagaagagaaggccgagcttatcctagatgaacgggctgaacatgagaggatggttgaagcttatgctatgatggatcagaaattgcagcaagcattgctggagcacgacaattttgaaaacaatgttaggaatctaaagtctgagctgaaaagacgggaacgtgatcatagcgtggcacagaaggaaatagatgacctgcaaaaacaagttgctgtccttttaaaagaatgccaagacatacaacttcgttgtggttctagccttcctaatgtaggttatgtcgcttcttcaagcttagtcaatgttctttccaatgtagagcatgatatcaaggacaatatgtcttttaaagacatcaacgggttagttcaacaaaatgttcaactaagaaatcaaattcacatgctctcagccgatcttgacaaaaaggatatggaactacgggagagcttccaaatcgagttgaagaaaattacagatgctgctgcgtccagggttgaaaaagttatgaagaaatctgaagaacaagcaataatgattgaatctctccatcgatctgtggcgatgtatcggaaactttgtgaggagcagcagaaggctcgttcaaatgttgaatcggcacccactactctgcaagatagcagcagaacagacctgatggttctgtttgaaggatcacaggaagtctcgaagaaagcttatgagcaagtctctgaacgagccagaagccttgatgaagagttgacaaaattgaggactgagcttgagtctctgcggtctgagcgtgataaggcggtgcttgaagctgattttgctcgggaccggcttaatgggtttgcagcggagcttgagcatcagaggaaggagtctaactctgcttcacttagaaatgcggagttgactcgtttagtagttgattatgaaagaagacttcgtgaagatttggattctaaacaagctttagaggagaatctaaggaagctatcaatggaggtgtccacattgaagaatgcaaaagagagtttagagaagtcagagagaagagctttggatgaagtccgtgatttaacggagcgagtgcatcgtttgcaggccacaatcgacacaatccataccactgaggaggtccaagagaatgctaggtccatggaaaggagaaatcatgaggaacacattaagcgactggaaagggattgggctgagcttaacaaggagcttcaagagcaacgagatcatgtccgtgttttgtctcttgacaagaaaaatgtcttcgacagctgcatgaagcaggtagaggatatgagaaaagagctaaataactcgtggaaagctgtttctgatgctgaagcaagggctgccattgcggaggccaagtgttctgatctagaggcaaaggtgaaatcgagaaaggccatttcaagggatggttgccatgaaatctcagccgcatctgaggagaatgatgaactattccagttgaaagaggagttagaaaaatacaaggaggaagcacaagcaaataagaactacatggttcagtacaaagaaatcgcacactcaaatgaagttgcgttgaagcaattggaatctgcacatcaggactacaaggctgagaccgaggttggcaggaaagccttggaagatgagattgttaacttgagggataagttatcagaaatggagaagagttatgtcattaagtgtgaagaagctgccaatgcaattgaatctaaagagaagcacatcacttctctcatgaatgaaatttctgttttaagaacagaagtttctcagaaactaccacagttagaaaaattggaaattgaattggctttgtcaaagagttcacttgatgagcagtataagcgctggcgaactgcccaagataattatgaacgccaggttattctgcaatctgagacgatacaggagttgacaaatacttctaagcagctatcttcgttgcagcatgaaatcactgtacttcgccagactgcagatgcactgaaaaatgaaaatgaatgtctaagatcttctgctgaacaagaaaagataggcttattgaaagagaaggacgatgccctgcagaagtataatgagcttaatgatcagaatagaattctacacaatcagttagaagctttacacattcggttagccgagaaagaacggaatattgctgggctttcatcacatcgtactgataattcacatgcagaagatgatctacaaagtgtcatcagttatctgcgcagatcgaaagaaatagccgaaacagagatatcattgcttaaacaggagaagtctcggcttcagatagaactggaaagttctttaaagtctgccaaggaggcacaggacttgttgcgaagtcaagctgatagtgccagggcattgatgttcaaggatgaagagttcaagtcactgcagattcaggtcagagaaattaacttgcttcgtgaaagcaacatacaacttagggaggagaacaggcacaattttgaagaatgccaggtaatatattaaattggtaatgtttaattgctggttcatatctggatgtgcataattttttattttaattttgtgcgttcagaaattccgtgaagaagctcaaaaggctaaaatggaatctgagaggttgcagaaccttctactggagaaggaggtagacgctgaaatgtgcaaaagagaactggaaatgcagaaggcagaaatagctaatctcaaccaaagtatttctgagctgattgaaaatagcaaaggcattgatttgaacacttatgaagccatgaagaatgaacttcaaaatatcaaatcaaccttgagagagaattctatggagcttgaaagtgcaaagatactgctttctgagaaagaagttgccataaaaattttggaggataagctttcattatgtcaatctgaattggattccaaggaaaagaagctgaatgatgtagaggcgtcccttaaatctgagattgacaagcataagaagattaatttaaacttaaagagaaagcatgacaatttgatgaaggagaagggagagattgctaaagaaaatcaaagccttgtaaagcagatggaggatcttaaatcaacagctcagaagacaacatctgaaacaacacttgagcaggctattaaagaaaaggatttcaggatacagacattagaaagaactctggaaaaggaaagagatgataacaagaaagagaaggcaaagagtaggaggaatgagaacacaatctttggtgcacttcagaaggtgcaacaggacaagaaacaagtagaggagtctatagataagcataagcaggctgtgagagagttgattgagaattatcctggattatcatctgaagtgccacctatctctgcactagaagagcaacttctttcatacttccgtgcagctaaagatatggaggaatcttctagtcccttccgtgatggtgcagcaactcaaactccagttgttgaaactgcccctgtggatgcacctacttcagctggaggtgattcagtattaattttgttctgacattgctgccattctattcattttgtaatgattcagtactcataagtcattctgaagcatttgatgttgtttcctatgtgatgacatttgattcattactcttccggtcaatgtgggagctgataagtcgttcagttgcaggacgtccagtagatacttcgtcaaggccagctaaagctaaaatgacggaagaaagagcagttcc

SEQ ID NO: 120244 - DNA, 6391 bp, Zea Mays
ttccgccaccaccaccacacctcgtccagcggcggtcggcaaaccctagaaccttagacccatccgccatactgcggttactgggcgcgggctagggccgggcctccgtaatcgcagcttgcggcgatgccgcttttcatctccgacgaggagctccgtctcctcggcggcgacacggctgccgttgccgagcgggctgatgctgccatccgtgagctccggcggcaggtggataccgtacgcgccgaggcggatgccgctgcgatcgctgccgagcagacctgcgccctcctcgagcaacggtacgcctccctctccgcggagttcgatcgctccaaggccgaggctgccgagctcaccgcctctgccgagcgccgcgctgccgagcttgcctcctctcaggcggagatacatcagcttcgcatccaggcgattgctaaggatggtgaggtggagaggttgaaaattgaaatctcggagctgcacaagtccaagtgccagtcgctggagttgattgagcagagagatgcagaaattaaagagaaggacggcatcatccagagctactacaataaaattgtaaacctggcagaaacttctgctggtaaagaggccaggatacaagaggtcgaagcaaagtttacccattgtcaagcaatttgcaatcgcatgactcaggagaaggagctgcttgaaaagcacaatgtctggcttgatgaagaactgaaagcaaaagtgaagaacttggctgaactaagaaaaacaaatatggatgaggaggctcggttgtcagcaagtattgctgagcttgaaagagagatatctgaatcctctagctccttgaggcgaagcaaagaacgcatctctgaactggagcaaagggtatcctacatggaaaaggtcaagaaacttgctgagcttcaccaagaaagttctgaggaatggtcgaaaaaggctggggagctcgaaggtgttattaaagcattagagacacatctgacccaagttgaagatgaatacaaggaaaagcttgagaaggagaccttgtccaggagagaccttgaaaaggaagctgtcaacttgaagcagaagcttgaaaagtgtgaatttgatctggagaatacaaggaagtccagtgaattgagcctcgttccattgaccagcattgcagcaggctcttctgatgtagtagacacaacagtacaaggactgcctatttctgatgcagttaatcagaatgatctaatggttattccaaaggtacctagtggtgtttctggtactgctttagctgcttctcttcttcgtgatggttggagtcttgctaagatctatgagaaataccaagaagctactgatgcttttcttcatgagaggcggggaaggagacatgcagaagcagttttggaaagggttttgcatgaaatagaagagaaggccgagcttatcctagatgaacgggctgaacatgagaggatggttgaagcttatgctatgatggatcagaaattgcagcaagcattgctggagcacgacaattttgaaaacaatgttaggaatctaaagtctgagctgaaaagacgggaacgtgatcatagcgtggcacagaaggaaatagatgacctgcaaaaacaagttgctgtccttttaaaagaatgccaagacatacaacttcgttgtggttctagccttcctaatgtaggttatgtcgcttcttcaagcttagtcaatgttctttccaatgtagagcatgatatcaaggacaatatgtcttttaaagacatcaacgggttagttcaacaaaatgttcaactaagaaatcaaattcacatgctctcagccgatcttgacaaaaaggatatggaactacgggagagcttccaaatcgagttgaagaaaattacagatgctgctgcgtccagggttgaaaaagttatgaagaaatctgaagaacaagcaataatgattgaatctctccatcgatctgtggcgatgtatcggaaactttgtgaggagcagcagaaggctcgttcaaatgttgaatcggcacccactactctgcaagatagcagcagaacagacctgatggttctgtttgaaggatcacaggaagtctcgaagaaagcttatgagcaagtctctgaacgagccagaagccttgatgaagagttgacaaaattgaggactgagcttgagtctctgcggtctgagcgtgataaggcggtgcttgaagctgattttgctcgggaccggcttaatgggtttgcagcggagcttgagcatcagaggaaggagtctaactctgcttcacttagaaatgcggagttgactcgtttagtagttgattatgaaagaagacttcgtgaagatttggattctaaacaagctttagaggagaatctaaggaagctatcaatggaggtgtccacattgaagaatgcaaaagagagtttagagaagtcagagagaagagctttggatgaagtccgtgatttaacggagcgagtgcatcgtttgcaggccacaatcgacacaatccataccactgaggaggtccaagagaatgctaggtccatggaaaggagaaatcatgaggaacacattaagcgactggaaagggattgggctgagcttaacaaggagcttcaagagcaacgagatcatgtccgtgttttgtctcttgacaagaaaaatgtcttcgacagctgcatgaagcaggtagaggatatgagaaaagagctaaataactcgtggaaagctgtttctgatgctgaagcaagggctgccattgcggaggccaagtgttctgatctagaggcaaaggtgaaatcgagaaaggccatttcaagggatggttgccatgaaatctcagccgcatctgaggagaatgatgaactattccagttgaaagaggagttagaaaaatacaaggaggaagcacaagcaaataagaactacatggttcagtacaaagaaatcgcacactcaaatgaagttgcgttgaagcaattggaatctgcacatcaggactacaaggctgagaccgaggttggcaggaaagccttggaagatgagattgttaacttgagggataagttatcagaaatggagaagagttatgtcattaagtgtgaagaagctgccaatgcaattgaatctaaagagaagcacatcacttctctcatgaatgaaatttctgttttaagaacagaagtttctcagaaactaccacagttagaaaaattggaaattgaattggctttgtcaaagagttcacttgatgagcagtataagcgctggcgaactgcccaagataattatgaacgccaggttattctgcaatctgagacgatacaggagttgacaaatacttctaagcagctatcttcgttgcagcatgaaatcactgtacttcgccagactgcagatgcactgaaaaatgaaaatgaatgtctaagatcttctgctgaacaagaaaagataggcttattgaaagagaaggacgatgccctgcagaagtataatgagcttaatgatcagaatagaattctacacaatcagttagaagctttacacattcggttagccgagaaagaacggaatattgctgggctttcatcacatcgtactgataattcacatgcagaagatgatctacaaagtgtcatcagttatctgcgcagatcgaaagaaatagccgaaacagagatatcattgcttaaacaggagaagtctcggcttcagatagaactggaaagttctttaaagtctgccaaggaggcacaggacttgttgcgaagtcaagctgatagtgccagggcattgatgttcaaggatgaagagttcaagtcactgcagattcaggtcagagaaattaacttgcttcgtgaaagcaacatacaacttagggaggagaacaggcacaattttgaagaatgccagaaattccgtgaagaagctcaaaaggctaaaatggaatctgagaggttgcagaaccttctactggagaaggaggtagacgctgaaatgtgcaaaagagaactggaaatgcagaaggcagaaatagctaatctcaaccaaagtatttctgagctgattgaaaatagcaaaggcattgatttgaacacttatgaagccatgaagaatgaacttcaaaatatcaaatcaaccttgagagagaattctatggagcttgaaagtgcaaagatactgctttctgagaaagaagttgccataaaaattttggaggataagctttcattatgtcaatctgaattggattccaaggaaaagaagctgaatgatgtagaggcgtcccttaaatctgagattgacaagcataagaagattaatttaaacttaaagagaaagcatgacaatttgatgaaggagaagggagagattgctaaagaaaatcaaagccttgtaaagcagatggaggatcttaaatcaactcagaagacaacatctgaaacaacacttgagcaggctattaaagaaaaggatttcaggatacagacattagaaagaactctggaaaaggaaagagatgataacaagaaagagaaggcaaagagtaggaggaatgagaacacaatctttggtgcacttcagaaggtgcaacaggacaagaaacaagtagaggagtctatagataagcataagcaggctgtgagagagttgattgagaattatcctggattatcatctgaagtgccacctatctctgcactagaagagcaacttctttcatacttccgtgcagctaaagatatggaggaatcttctagtcccttccgtgatggtgcagcaactcaaactccagttgttgaaactgcccctgtggatgcacctacttcagctggaggacgtccagtagatacttcgtcaaggccagctaaagctaaaatgacggaagaaagagcagttcccaaaccaagcagtgaagtacgtaggcctggaggaagaagaccccttgttcgtcctactcttgaacgaactgaagaacctcatgctgatacagatatatcagctgttgatgcctccacagttcaggacaaaggggggccaccagcagagcaagaaacttctggaattttacctgtgttacagcctttgagtcgtaaacggcttatcacatcttcacagacggtagacagtgcctcgcagggtgaggctaatgatgtcaatcctccatctaagaagcccaaggaggaagaatcttcacaagggactagtgaactcaaaagtggtcaaccacctcttggggatgtagcggcacaggttaatgtgcttccagccactgatgacctagatggacaacagcctacagaagagatcgatactgatcaggcacctgagccaatggtagaggttgaggcaacaagggaagaggatgggggtgataaagatgactctggagatgcatcaacggacatcaaaggccaggatgctgatgctaatattgacgcaaatgcaattcctttagaagaagagcatgtagtggcaaagtcagaggcaataattgaatcatttgatgatgaccggaaaacagaagattcgaaggaagatgctcagcgtactactgcaactgatgttgatgatgacatggaggagggagagttggcagaggaacctgaagacaagagtgacgttgatatgtcagagatcgagggtgaggctacagccgaacgtgctgctgtggaaccggaccaaagtcctataacacaacctggtgcagctgatgcctcaccaagcagaactgcagatgcatctcctgctcgtgaaccttcccctagtccggtccaagctggtgcatcttctcgaccccagaatactagcactgcaacagaggcacgtgaaccttcctctaacccagcccaagctggtgcgtcttctgaacagcggaacaccagtactgtagtggaggctgctgaaactcgttccagaacaatcaacttaagtgagagggccagacaaaacaggcaaaccaggtttcaacgcgcacaacaacctggcactgctcggggtcgtggccagcaatctgttacactcaggaaagatgctacgggtcgaggatcaaggggccgcggggggcgtggtcagtcctagtaaagtagattgtcttttctcgtgcagggataattttgtccattgggatagagacccttgtatttttagattgatcgacgaacttcatggggatacagagacccttgtgtttttagattgatcgacgaattttgtctcattggtttttactaaatgttccctgacctgcgtgcgaatccttgtgggttctgagaccgctatatctaatccaaactgttgtgtttgttggtactatgggctggagctgcacctcctgaatcccaatagcactagcattttt

SEQ ID NO: 120245 - DNA, 6614 bp, Zea Mays
ttccgccaccaccaccacacctcgtccagcggcggtcggcaaaccctagaaccttagacccatccgccatactgcggttactgggcgcgggctagggccgggcctccgtaatcgcagcttgcggcgatgccgcttttcatctccgacgaggagctccgtctcctcggcggcgacacggctgccgttgccgagcgggctgatgctgccatccgtgagctccggcggcaggtggataccgtacgcgccgaggcggatgccgctgcgatcgctgccgagcagacctgcgccctcctcgagcaacggtacgcctccctctccgcggagttcgatcgctccaaggccgaggctgccgagctcaccgcctctgccgagcgccgcgctgccgagcttgcctcctctcaggcggagatacatcagcttcgcatccaggcgattgctaaggatggtgaggtggagaggttgaaaattgaaatctcggagctgcacaagtccaagtgccagtcgctggagttgattgagcagagagatgcagaaattaaagagaaggacggcatcatccagagctactacaataaaattgtaaacctggcagaaacttctgctggtaaagaggccaggatacaagaggtcgaagcaaagtttacccattgtcaagcaatttgcaatcgcatgactcaggagaaggagctgcttgaaaagcacaatgtctggcttgatgaagaactgaaagcaaaagtgaagaacttggctgaactaagaaaaacaaatatggatgaggaggctcggttgtcagcaagtattgctgagcttgaaagagagatatctgaatcctctagctccttgaggcgaagcaaagaacgcatctctgaactggagcaaagggtatcctacatggaaaaggtcaagaaacttgctgagcttcaccaagaaagttctgaggaatggtcgaaaaaggctggggagctcgaaggtgttattaaagcattagagacacatctgacccaagttgaagatgaatacaaggaaaagcttgagaaggagaccttgtccaggagagaccttgaaaaggaagctgtcaacttgaagcagaagcttgaaaagtgtgaatttgatctggagaatacaaggaagtccagtgaattgagcctcgttccattgaccagcattgcagcaggctcttctgatgtagtagacacaacagtacaaggactgcctatttctgatgcagttaatcagaatgatctaatggttattccaaaggtacctagtggtgtttctggtactgctttagctgcttctcttcttcgtgatggttggagtcttgctaagatctatgagaaataccaagaagctactgatgcttttcttcatgagaggcggggaaggagacatgcagaagcagttttggaaagggttttgcatgaaatagaagagaaggccgagcttatcctagatgaacgggctgaacatgagaggatggttgaagcttatgctatgatggatcagaaattgcagcaagcattgctggagcacgacaattttgaaaacaatgttaggaatctaaagtctgagctgaaaagacgggaacgtgatcatagcgtggcacagaaggaaatagatgacctgcaaaaacaagttgctgtccttttaaaagaatgccaagacatacaacttcgttgtggttctagccttcctaatgtaggttatgtcgcttcttcaagcttagtcaatgttctttccaatgtagagcatgatatcaaggacaatatgtcttttaaagacatcaacgggttagttcaacaaaatgttcaactaagaaatcaaattcacatgctctcagccgatcttgacaaaaaggatatggaactacgggagagcttccaaatcgagttgaagaaaattacagatgctgctgcgtccagggttgaaaaagttatgaagaaatctgaagaacaagcaataatgattgaatctctccatcgatctgtggcgatgtatcggaaactttgtgaggagcagcagaaggctcgttcaaatgttgaatcggcacccactactctgcaagatagcagcagaacagacctgatggttctgtttgaaggatcacaggaagtctcgaagaaagcttatgagcaagtctctgaacgagccagaagccttgatgaagagttgacaaaattgaggactgagcttgagtctctgcggtctgagcgtgataaggcggtgcttgaagctgattttgctcgggaccggcttaatgggtttgcagcggagcttgagcatcagaggaaggagtctaactctgcttcacttagaaatgcggagttgactcgtttagtagttgattatgaaagaagacttcgtgaagatttggattctaaacaagctttagaggagaatctaaggaagctatcaatggaggtgtccacattgaagaatgcaaaagagagtttagagaagtcagagagaagagctttggatgaagtccgtgatttaacggagcgagtgcatcgtttgcaggccacaatcgacacaatccataccactgaggaggtccaagagaatgctaggtccatggaaaggagaaatcatgaggaacacattaagcgactggaaagggattgggctgagcttaacaaggagcttcaagagcaacgagatcatgtccgtgttttgtctcttgacaagaaaaatgtcttcgacagctgcatgaagcaggtagaggatatgagaaaagagctaaataactcgtggaaagctgtttctgatgctgaagcaagggctgccattgcggaggccaagtgttctgatctagaggcaaaggtgaaatcgagaaaggccatttcaagggatggttgccatgaaatctcagccgcatctgaggagaatgatgaactattccagttgaaagaggagttagaaaaatacaaggaggaagcacaagcaaataagaactacatggttcagtacaaagaaatcgcacactcaaatgaagttgcgttgaagcaattggaatctgcacatcaggactacaaggctgagaccgaggttggcaggaaagccttggaagatgagattgttaacttgagggataagttatcagaaatggagaagagttatgtcattaagtgtgaagaagctgccaatgcaattgaatctaaagagaagcacatcacttctctcatgaatgaaatttctgttttaagaacagaagtttctcagaaactaccacagttagaaaaattggaaattgaattggctttgtcaaagagttcacttgatgagcagtataagcgctggcgaactgcccaagataattatgaacgccaggttattctgcaatctgagacgatacaggagttgacaaatacttctaagcagctatcttcgttgcagcatgaaatcactgtacttcgccagactgcagatgcactgaaaaatgaaaatgaatgtctaagatcttctgctgaacaagaaaagataggcttattgaaagagaaggacgatgccctgcagaagtataatgagcttaatgatcagaatagaattctacacaatcagttagaagctttacacattcggttagccgagaaagaacggaatattgctgggctttcatcacatcgtactgataattcacatgcagaagatgatctacaaagtgtcatcagttatctgcgcagatcgaaagaaatagccgaaacagagatatcattgcttaaacaggagaagtctcggcttcagatagaactggaaagttctttaaagtctgccaaggaggcacaggacttgttgcgaagtcaagctgatagtgccagggcattgatgttcaaggatgaagagttcaagtcactgcagattcaggtcagagaaattaacttgcttcgtgaaagcaacatacaacttagggaggagaacaggcacaattttgaagaatgccaggtaatatattaaattggtaatgtttaattgctggttcatatctggatgtgcataattttttattttaattttgtgcgttcagaaattccgtgaagaagctcaaaaggctaaaatggaatctgagaggttgcagaaccttctactggagaaggaggtagacgctgaaatgtgcaaaagagaactggaaatgcagaaggcagaaatagctaatctcaaccaaagtatttctgagctgattgaaaatagcaaaggcattgatttgaacacttatgaagccatgaagaatgaacttcaaaatatcaaatcaaccttgagagagaattctatggagcttgaaagtgcaaagatactgctttctgagaaagaagttgccataaaaattttggaggataagctttcattatgtcaatctgaattggattccaaggaaaagaagctgaatgatgtagaggcgtcccttaaatctgagattgacaagcataagaagattaatttaaacttaaagagaaagcatgacaatttgatgaaggagaagggagagattgctaaagaaaatcaaagccttgtaaagcagatggaggatcttaaatcaacagctcagaagacaacatctgaaacaacacttgagcaggctattaaagaaaaggatttcaggatacagacattagaaagaactctggaaaaggaaagagatgataacaagaaagagaaggcaaagagtaggaggaatgagaacacaatctttggtgcacttcagaaggtgcaacaggacaagaaacaagtagaggagtctatagataagcataagcaggctgtgagagagttgattgagaattatcctggattatcatctgaagtgccacctatctctgcactagaagagcaacttctttcatacttccgtgcagctaaagatatggaggaatcttctagtcccttccgtgatggtgcagcaactcaaactccagttgttgaaactgcccctgtggatgcacctacttcagctggagttgcaggacgtccagtagatacttcgtcaaggccagctaaagctaaaatgacggaagaaagagcagttcccaaaccaagcagtgaagtacgtaggcctggaggaagaagaccccttgttcgtcctactcttgaacgaactgaagaacctcatgctgatacagatatatcagctgttgatgcctccacagttcaggacaaaggggggccaccagcagagcaagaaacttctggaattttacctgtgttacagcctttgagtcgtaaacggcttatcacatcttcacagacggtagacagtgcctcgcagggtgaggctaatgatgtcaatcctccatctaagaagcccaaggaggaagaatcttcacaagggactagtgaactcaaaagtggtcaaccacctcttggggatgtagcggcacaggttaatgtgcttccagccactgatgacctagatggacaacagcctacagaagagatcgatactgatcaggcacctgagccaatggtagaggttgaggcaacaagggaagaggatgggggtgataaagatgactctggagatgcatcaacggacatcaaaggccaggatgctgatgctaatattgacgcaaatgcaattcctttagaagaagagcatgtagtggcaaagtcagaggcaataattgaatcatttgatgatgaccggaaaacagaagattcgaaggaagatgctcagcgtactactgcaactgatgttgatgatgacatggaggagggagagttggcagaggaacctgaagacaagagtgacgttgatatgtcagagatcgagggtgaggctacagccgaacgtgctgctgtggaaccggaccaaagtcctataacacaacctggtgcagctgatgcctcaccaagcagaactgcagatgcatctcctgctcgtgaaccttcccctagtccggtccaagctggtgcatcttctcgaccccagaatactagcactgcaacagaggcacgtgaaccttcctctaacccagcccaagctggtgcgtcttctgaacagcggaacaccagtactgtagtggaggctgctgaaactcgttccagaacaatcaacttaagtgagagggccagacaaaacaggcaaaccaggtttcaacgcgcacaacaacctggcactgctcggggtcgtggccagcaatctgttacactcaggaaagatgctacgggtcgaggatcaaggggccgcggggggcgtggtcagtcctagtaaagtagattgtcttttctcgtgcagggataattttgtccattgggatagagacccttgtatttttagattgatcgacgaacttcatggggatacagagacccttgtgtttttagattgatcgacgaattttgtctcattggtttttactaaatgttccctgacctgcgtgcgaatccttgtgggttctgagaccgctatatctaatccaaactgttgtgtttgttggtactatgggctggagctgcacctcctgaatcccaatagcactagcatttttcacatagccataaaaatgatgctacgtgaagcattccttggggtggatccctacccgggcttctaaaccacgactttatacatgactttcatttctctttgtatatggactaaaatgacttgttagtgttta

SEQ ID NO: 120246 - DNA, 556 bp, Zea Mays
gtaacagggaagagaaggcgttcagcacttaccggtcaattgtcctccttagcgacggatttgccaatggcgccgtgttgtggctcggcccgggacgggagcgggtttgaccccttgacaagccacccaagcgcgaagaaggcggcgccggcaaggatggcggtgccccaggcgtgggagtaccagcggctgtactgccgcacggcaaaccgccactggtcccgaagagtcgccgcatcggggatcgcggcatctggcgggtttgggtatccggcactgcccgggtgtgcgttgccgacgccgggcaagcgggggcgagcgacgctgccctccgccggctggggcggtggggacgtggtgggcttctcctggtggtttgccattccggccttatggatcgaccacccacaaccgctcgacgaggagaggagacaggagaggcgagcaatattatgtactaggacaagcctgaaacaagcttcggcgtggaggcctaacctccgcacggggatagaagggcggtgcacggagaatgtcctacattataggagtagag

SEQ ID NO: 120247 - DNA, 474 bp, Zea Mays
atggcgccgtgttgtggctcggcccgggacgggagcgggtttgaccccttgacaagccacccaagcgcgaagaaggcggcgccggcaaggatggcggtgccccaggcgtgggagtaccagcggctgtactgccgcacggcaaaccgccactggtcccgaagagtcgccgcatcggggatcgcggcatctggcgggtttgggtatccggcactgcccgggtgtgcgttgccgacgccgggcaagcgggggcgagcgacgctgccctccgccggctggggcggtggggacgtggtgggcttctcctggtggtttgccattccggccttatggatcgaccacccacaaccgctcgacgaggagaggagacaggagaggcgagcaatattatgtactaggacaagcctgaaacaagcttcggcgtggaggcctaacctccgcacggggatagaagggcggtgcacggagaatgtccta

SEQ ID NO: 120248 - DNA, 279 bp, Zea Mays
aaaatcatgaaggcgcagattgtgcttttaccttggataggggcggtggatggtgaggggaggagggcggcgggtcttccgaacggatggagtgggcagcgctacttttcggcgaatacgcagattgtgcttttaccttggataggtgcggtggatggtgaagggaggagggcggcggttcttccgagcggatggaatgggcagcgctactattcggcggatggggtgggcggcgctactggtatgaagggagtcgacggcggagggagatggggatga

SEQ ID NO: 120249 - DNA, 237 bp, Zea Mays
gcggtggatggtgaggggaggagggcggcgggtcttccgaacggatggagtgggcagcgctacttttcggcgaatacgcagattgtgcttttaccttggataggtgcggtggatggtgaagggaggagggcggcggttcttccgagcggatggaatgggcagcgctactattcggcggatggggtgggcggcgctactggtatgaagggagtcgacggcggagggagatggggatga

SEQ ID NO: 120250 - DNA, 561 bp, Zea Mays
cactaatgtttgagtagtggcatgtaggtatacatattaccaccttgctgactttgctgcaccagtcatgtgcaattaacgtttcgtaccatcacttgtaaaaaagttatatgttataaggcatataggtattagtcatcatgaaatttattgtctgtttatcagaaatttattatcccttttgtttatcagaaatttattgggaagtccgagaatggtatgaattctttggagacaagggttcatgggctggagatggctttggatgagatctctcctgatctggccttctcttcaggaaggttgtcaaatagggagcctgatgtaaagatgtgctgcattttgagcccaaaattctggaaaaggcacaatggtggtaggtcttcctcaaggttttctgcctcagacccagcaaacagcccagatgagagcataacttctaacaaatgggacaagcagaagtttgggcttcagggtgggtttgtcacaaacccattagccgagccaatcatttcgtctgtacggaaaacaatcttctcttacattagctgcaactagcac

SEQ ID NO: 120251 - DNA, 2101 bp, Zea Mays
ggcccggcctggtcgcccgctcctcctctcctcggcagctcggctcacccgcgcgcgtgagccgcttaaatttcaattcaaacttcccaacggaaaaccctcacggctcacgaacgggcacccgctcaccctgtcacccaccccaccccaaccccatccccaccttgcgcctgcgagccacgccgagccgatctaagagccaaagccgcagccgcagccgcacgggagcggacggagaaaattttgaaacgcgggcgaggccgccaccaccgcgccaaatcgagccatccagattccattcgacggccggaagtcagatccgtgcatctataatacttccaggaattctctcctctcccaagacccgcaccgcaccacgcgaaatcaagtcctgcaaaagcctcgcggctacctcacgtggatcggcgacggcgatgacggcgtccttctcttccgtcgccgaggtagcggttcccgctgctgcggcggtgatggcatcagctttgccgcaggagcagcagcaggcgcggccgcggccgcggccgatgcacgctggtggtggtggtggtggcggcggcggcgccaatggccgccaccacgcgtacagccgcaaggacaagtcactcggcctcctctgctccaacttcgtggttctctacaaccgcgacgacgtggagtccatcgggctggacgaagcggccaaatgcctcggcgtggagaggcgccggatctacgacattgtcaacgtgctcgagagcgttggaattcttgtgaggaaagccaagaatcgctacacctggataggtttcggcggagtctcaatatccttgcgagaactcaaggaaagggcgttaagggagaagtctggcttggctcctctgcaaaccgagcagcaatctgctgccacaatttctgaagacgaagatgatgatacattggccaatccgggtgcttatatcgagactgagagattgagtcaaactgtggacaaaccttctggcaaaccgggcgcatccggttgccgccttagatctgatcataggaaggaaaagtcacttgggctgctcacacagaatttcgtgaagctcttcctcaccatggaggttgacacgatctcactcgatgaagctgcaaaactgctccttggagaaggccacgaggagaccaatatgagaactaaagttcggaggttatatgacattgccaatgtcctgtcttcactgaatctaattgagaagatacatcaaggggactcgagaaagcctgcgtttcgttggttgggtagggcaacgctgaacacagaaaatggtgtcacagttgctgtgcccccaccagggaagatcgcatcaaagaaaagagcgtttggaacagaactcactaacattgacatgcatagaagtaatctagattcaaaaaataagaagaaagcaaaacttgtacagagtagtggtgatgtcttgacgaattgcaaattagctgtgcgtagtcggctggggcagggtaaacaaagtggctttgtttatggtcctttccacccttctggcgcaaggaaacatggacttgatggcggcaataagcctgggcaaagggagagggctgaggactgggagagcctttctgcttcatttcgaccacagtaccagaaccaagcactcagtgatctatttgtccattatgtcgacgcgtggaagacatggtattctgaatttgctcaaggcagcagcatcatgcaacaacactttggtcatcctgttaaccattttttgtaggcaaattttagggccaagcattgcagttcttagtgcatgcttgtgtattttacctgtacaatctgttaaaacggaggaaacaaagacatgattgagcctagggttcattgtatttactcaatgcaggatgtttctaggctatttcaggtggaactattagagagggataccccaggagtgtgaggtgtttcccaatctctctaatagaaacatcatgatcatctcacttctgtgggttctctattgttaattgttgtttatgtgcttacctatgtggattctaaaacttcctctgtcaccggccatgctgatgaaacatgtcataatgaagt

SEQ ID NO: 120252 - DNA, 1891 bp, Zea Mays
aataaattgttgtcatttgttaagcatattgcaaatctattaggacaatcgcggtctgcgccgtcagcctgccaagctcagcggggcggaggcaggccaaaccaacccacctccaacacaagcgaataaaagtctcgcgtctatcttcttccttccttccttcctaccaacctcccctccctccccacgcccaccgccccgcatccaccccgaaaccctagtggatcgtcgccatggccgcagccgccctcattcgccgcctccccgctgcccgggcccaggccccggcattcatggcggcgcgaccgatctccgactccacggcagcgttcaccatcgagacatctgtccctttcacctcccacctcgtcgacccaccctcgcgtgatgtcaccaccacccccgctgagctcgtcaccttcttccgcgacatgtccctcatgcgccgcatggagatcgcggccgactccctctacaaagccaagcttatccgtgggttctgccacctctacgacggccaggaggccgtcgccgtcggcatggaggccgccatcacccgctccgattccatcatcaccgcctaccgcgaccactgtacctacctcgcccgcggaggggacctcgtctccgccttctccgagctgatgggccgcgaggctgggtgctcccgcgggaagggcggatccatgcatttctacaagaaggacgccaatttctacggtgggcacggcatcgtaggcgctcaggtgcccctcggatgcggcctggccttcgctcaaaagtacaagaaggaggacacggccacgttcgcgctctatggtgacggtgcggctaaccagggacagctctttgaggctctcaacatttcggccctctggaagctgcctgccatattggtctgcgagaacaaccattatgggatgggaacagcggagtggagggcagcaaagagccctgcctactacaagcgtggcgactatgtgcctggattgaaggttgatggaatggatgttcttgctgtgaagcaagcgtgcaaatttgcaaaagatcatgctgtcgcaaatggcccaattgtccttgagatggatacctacagataccatggccactctatgtcagatccaggaagcacttaccgcaccagggatgagatttcaggtgtcaggcaggaacgggatccaattgaaagggttagaaagttgcttttgactcatgacctggcaaatgctgctgagctcaagaatatggagaaagaaatcaggaaacaagtagatgacgctattgctaaagcaaaggaaagttctatgcctgatacttctgaactcttcacaaatgtttataagaagggcttcggcgtggagtcatttgggccagacaggaaggagatgagagcttctcttccgtaggttggcagcatgatgaggcagtcctcattacatggtatgatagccaggaaaaataatttttgatgaaggcctcaggcattattggaatattttatcgggaaatgaacctgtatagagatgcgttgtctggaggatcagcttcgttgtttcgcccttttttcatttctacaattcagttttaactgctgctggctggcttcttattgaagctaatatcaccatccaagaaaaccgaagctagaggattataaatttgatcacacgtatcgtctagcactgcacggtgtttgcttgatcagtttctaactagcatggtacatgtaggacagtgcgtcattacacttccacctgtggattaatttttctacccagcgtggtgcatatgttgataaactgattttttttactagttgcacagtgatatttatttatgtagcatgcggcagtttaattgatgtagctgttcgggcctgcgagtccggagt

SEQ ID NO: 120253 - DNA, 1234 bp, Zea Mays
atgggcgcggcctccccggcgatgtgggccgggctggtgctggtggcgttattggccgtatcggggccggcggtggcggcggggctgccgaggttcgccgaggcgcccgagtacaggaacggggaggggtgccctgcccctgtggcgggcgcgggggtctgcgacccgggcctggtgcacatcgccatgacgctcgacgcccactacctcaggggctccatggcagccatctactcgttgctcaagcacgcctcctgcccggagtcgctcttcttccacttcctcgctgcggcggagggcggcggcgcgccggcggcctccgggctccgggccgtcgtggcggcctccttcccgtccctgagcttcgagatctacccgttccgcgccgacgcggtcgccgggctcatctccgcgtccgtgcgcgccgcgctcgaggcgccgctcaactacgcgcggaaccacctcgccggcctgctcccgcgctgcgtgccgcgcgcgatatacctcgactccgacgtgctcgccgtcgacgacgtgcggtggctctgggagacgcggctgcccgccgccgcggtcgtcgccgcgcccgagtactgccacgccaacttctcgcgctacttcaccgacgccttctgggacgaccccgtcctcggcgccagggtcttcgccggccgccgccgcgcgccctgctacttcaacacgggtgtcatggtcatcgacctccggaggtggcgcgtcggcaactaccgccagcgcatcgagcgctggatggagatgcagaaggagaagaggatctacgagcttggctccttgccccccttcctgctcgtcttcgccggcgagatagaggccgtcgaccaccggtggaaccagcacggcttgggcggcgacaacgtgttcggtagctgccgccctctccataacgggcctgtcagcctcatgcactggtccgggaagggcaagccatgggaccgtctcgacgccggcaagccttgcccactggaccacacctggaaggcgtacgacctctacattggcgagaatgattcatcatcttcagggccgtcacggtcagcattgtcatctttggcggcatgctggccactacagagtacagaccacagagcaatagctgtgattgacacatctaagattctgaaaataaaaaacatatcactctcctaaatatcactggtcccatgcaccgacgatatctgctcccctcatcgcttgg

SEQ ID NO: 120254 - DNA, 488 bp, Zea Mays
gtactgactgcgtgtttaagtgaaaatatatagacacatgaaagactctgtttcgaaacaaagtttcagtcgaacaacgatcaatttatacccataaatgggaatgctaaatctgtgattacgcgatttgaactagaaacccctcgcaatattttttctctttttggactcaaccacaaaggattcgtctaaaccaattaacaaactcttgcttcgattttctggggtacctttcaagtgtaccaataaatactttgctagtaaggaatcaaatgctggagaatacttttctaatagatactcgaatgaaaaattttgataccacagtccttgcaactccccttgtcggatccttatcaaaagctcaattttgtactggatcagggcatcctattagtaaacccgtttggactgatttatcagattgggatattcttgatcgttttggtcggatatgtagaaatatttttcattatcatagtggatct

SEQ ID NO: 120255 - DNA, 1421 bp, Zea Mays
ctcattcgaacaagatgctaagttggctccgacgcttccctaacgatgtgatccataggaaggggggcagctcgggccggaggacctcctcctccacctcctggaggaacaagagcagcagcagcttcaccgcgcggatcatccgttgtgcgtcctccgtcgtcgacacacaccaccagcaccgtggtgatgatgatgatgacgatggcgatgaagacgacgagtacgacgactgtcgtctaccgtcgtcgcctcctaacaaccacgctagaagaaacaccaccaccactgctgtcatctcggcccgagccttctccttccgcgagctagccgatgccgcaggaaacttccgccaggacaacctcatcggagagggaggcttcggtcgcgtctacaaggcccgcctgccaactcgggtgcagcatgctgctgatgacgccgatctgcagggccttccggtggccatcaagcagctggaccgcaatggcttccagggcaacaacgagttcatggtggaggtgctcatgctcagcatgctgcaccaccccaacctcgtcagcctcgtcggttactgcgccgagggcgagcagcgcctgctcgtctacgagtacatggcactagggtccctcgaggaccacctgttattgctgcgtgacgatggccatggcagccctttgccctggcgcacgaggatgaagatcgcgctcggcgcggcgcggggcttagagtacctgcacgaaagcgctgtcatctaccgggacctcaagtcctccaacatcctcctcgaccaagactacgcgcccaagctctctgacttcggcctcgccaagctcctccccgccccgcgcaccaccgactcctcctcctcctcctcaagcagcagcagcagcggcggcggcaaggtgatgggcacgtatgggtactgtgcgccggagtacttgcggacagggaagctcagcgtcaagtcggacgtctatagctttggggtgctactgctggagctcatcaccggccgtcgagccatcgacgccagccggccggatggcgagcaaagcctggtgggatgggcggcagggatgtttggtgactccacgaggttccatgagttgctggaccctcggctggtgatggcgattcgaggacggcctacagcatcacagctgaagcaggccgtgggtgtggcgtcgatgtgcttgcaggaacaccacgccctacgtcccgtcatggccgacgtcgtcgtggccctttccttcatcgctaatgattcccctgcttctcccccctgctagctcagctcgatcaaaaaaaaaaattgcatcacaatctctcgctcctcctcattcctctgtgtatctcactttttcttgttgtaaacattgagaagaagaattacatggcaaattaaacctagttatattttt

SEQ ID NO: 120256 - DNA, 90 bp, Zea Mays
ctcgaatctttacctcttttcggctctacgtcgactaaaggcgtcttggatggtctgctgacgccaagacacaccataggatctctcctc

SEQ ID NO: 120257 - DNA, 1858 bp, Zea Mays
cttgtcgacccagaccacccaggtggaggtgaggcgtccaagactccaagcaaagcaagcaacctgacattgccaattgccatcaccatcttggcagaaatcctcctccaagatggtcgttttgggccaacaacgtacgactcctcccacaggggggctgctgccggagaaatccgtgcaggagcagaactcagtctcatcatcttcctccacccgacagatgattggaggaggtatccagtggtggagcaggtcgctgtgggtcaagtccagggcgtggatccggaaccccatgaacatggccctgtccgtctggatcctggccgtcggcgtctcgggcgccatcctcttcatggtgatgacggggatgctcaaccgcgtgctgccaagcaagccgcggagggacacgtggttcgaggtgaacaaccagatcctgaacgcgctcttcaccctcatgtgcctgtaccagcacccgaggaggttctaccacctggccctcgtgtgccgctggaaggccggcgacatgcaccagctccgccaagcgtactgcaaggacggggcctgcaagcccaacgagaggaagcacatgacggctgtcatcctgctgctccacctcaactgctttgctcagtacgcgctctgtggcctcaaccttggctaccggaggccccggcgtccggtggtcggtgtcgccctcaccgtagcggtcgccatctgcgcgccggccgtcgctgggatgtacaacaacctcagtcctctcgggagagactacgaggcgccggcgccggcggaggggatgataataagtgaggaagagtcgcagctccagcgcaaaacgcccgacaccgagaggcgctactcgttggtgccacggcaaggacaaggagaagaaccgcagtgggtcggcgggctgtgggaggacctgtgggacgacatgtcgctggcgtacctgtcgctgttctgcagctgctgcgtgttcgggtggaacgcgagcaggctcggcttgggcaacatgtacgtccacgtcgccaccttcgtgctcctgtgcctggcgcccttcttcatcttggacctggcggccatcaacgtggacgacgaggcggtcagggacgcgctggggctggccggcatcttcctctgcgtgttcggcctgctctacggcggattctggaggatccagatgcgcaggcggttcggcctccccgagaaccgcgcctgctgcggcaagccggacctcaccgactgcctactgtggctctgctgctacccgtgctcgctagcgcaggaggtccgtacggcagacgcctacgaggtggtggtggtgctggacacgccgatgcatcgccatccgactctgcaggaagagctggccacgatgcaggagccaccagatgaagaagaaggaggcggtgtcatccccccttcgacagtgtcagctacacgctcataagcagtacccaacatgtacaggatgagcagtttcaatttcaacatcaggtggtcatttcaatgtatccatgcagccgctgaatatcatcattaaaaaaagcagcaaaaacagccttctctagtaaagatcatcttcgtcgtcatcgtcgtcttcatctctgatgatgttgcgttcatcccacagcgggcaggagcagcttgctttcttattcttccattctttcccacaggtgtagcagaactcatagccgcacctgcaatgcaacagagggctttttagcactggcacacatagtagttatcataaaggagaatgcctggccttacacgcagatcatgtggtagcagccctccgcaagctcgatcatgtgcttgcatttcacgcattggcgccacagcctctgccttg

SEQ ID NO: 120258 - DNA, 1608 bp, Zea Mays
agaaatcctcctccaagatggtcgttttgggccaacaacgtacgactcctcccacaggggggctgctgccggagaaatccgtgcaggagcagaactcagtctcatcatcttcctccacccgacagatgattggaggaggtatccagtggtggagcaggtcgctgtgggtcaagtccagggcgtggatccggaaccccatgaacatggccctgtccgtctggatcctggccgtcggcgtctcgggcgccatcctcttcatggtgatgacggggatgctcaaccgcgtgctgccaagcaagccgcggagggacacgtggttcgaggtgaacaaccagatcctgaacgcgctcttcaccctcatgtgcctgtaccagcacccgaggaggttctaccacctggccctcgtgtgccgctggaaggccggcgacatgcaccagctccgccaagcgtactgcaaggacggggcctgcaagcccaacgagaggaagcacatgacggctgtcatcctgctgctccacctcaactgctttgctcagtacgcgctctgtggcctcaaccttggctaccggaggccccggcgtccggtggtcggtgtcgccctcaccgtagcggtcgccatctgcgcgccggccgtcgctgggatgtacaacaacctcagtcctctcgggagagactacgaggcgccggcgccggcggaggggatgataataagtgaggaagagtcgcagctccagcgcaaaacgcccgacaccgagaggcgctactcgttggtgccacggcaaggacaaggagaagaaccgcagtgggtcggcgggctgtgggaggacctgtgggacgacatgtcgctggcgtacctgtcgctgttctgcagctgctgcgtgttcgggtggaacgcgagcaggctcggcttgggcaacatgtacgtccacgtcgccaccttcgtgctcctgtgcctggcgcccttcttcatcttggacctggcggccatcaacgtggacgacgaggcggtcagggacgcgctggggctggccggcatcttcctctgcgtgttcggcctgctctacggcggattctggaggatccagatgcgcaggcggttcggcctccccgagaaccgcgcctgctgcggcaagccggacctcaccgactgcctactgtggctctgctgctacccgtgctcgctagcgcaggaggtccgtacggcagacgcctacgaggtggtggtggtgctggacacgccgatgcatcgccatccgactctgcaggaagagctggccacgatgcaggagccaccagatgaagaagaaggaggcggtgtcatccccccttcgacagtgtcagctacacgctcataagcagtacccaacatgtacaggatgagcagtttcaatttcaacatcaggtggtcatttcaatgtatccatgcagccgctgaatatcatcattaaaaaaagcagcaaaaacagccttctctagtaaagatcatcttcgtcgtcatcgtcgtcttcatctctgatgatgttgcgttcatcccacagcgggcaggagcagcttgctttcttattcttccattctttcccacaggtgtagcagaactcatagccgcac

SEQ ID NO: 120259 - DNA, 2967 bp, Zea Mays
gtactagatcgatcctgcctgcctgcctgcttgtaacagcaacagcagcagaagtggcgcactgtgctttgcggtggcggaggctgcgagagaggaggaacttgcaagccgacttccatggctgccgccttctccgccgctatcctcttccacctgctgctgctcctcttctcgccgtccgctgcgcagcctggtttcattagcttggactgcgggggagctcgtgatcacacggatgccattgggatccagtggacctctgatgccagcttcgtctctggcggccaggccgcgcagctgctggtccagaatggcctgcagcagacccagcagcagctgaccaccgtgcgctacttccccgcggacaacaggaagcactgctacaccatgaacgtcaggaacaggacgcgctaccttgtcagggccactttcctctacggcaacttcgataacagcaacgtctacccgaagttcgatatctccctcggagcgtctccctggtccaccatcgtcgtcgacgacgccaccacccccgtcgttgaggaagccatcatcttggctgctgctcccacgctcagtgtatgtctctccaatgccagcacgggacagcccttcatctctactctggagcttcgacagtttaacggttcgctctactacaccactgacgagacacgcttctttcttggactgtctgcgaggataaattttggcgcaggaagcaatgattcagtgagatatcctgatgatccatttgatagaatctgggaatctgattctgtgaggagagcaaattaccttgttgatgttgctccagggactgaaagaatatcaactacaaaacccatatttgtcggtaccaacgaagaaccacctgaaaaggtcatgcaaacagcagtagttggccaggatgggtcattgaactaccgccttgatttggaaggtttcccagcaaatgcttggggagtctcgtattttgcagaaattgaagatttggcaccaaatgaaacgaggaaatttaagttagaggtccctggcatgccagcactcagtaaaccaactgttgatgtggaggagaatgctcaagggaaataccgtttgtatgaaccaggctacacgaatttgtcacttccgtttgttttctcctttgggttcaggaagacgaatgattcttcaaaggggcctattttgaatgccctggagatttacaaatatgtccaaattactatgggatcacaggatgcaaatatcatggccagcatggtatcacgatatccacaggaaggttgggcacaagagggtggtgatccgtgcttaccagcatcatggtcctgggtgcaatgcagttcagaaacttctccaaggatattctcaatcacattgtctgggaagaacattaccggaagtatcccggtggaactgacaaagctatcagggttggttgagctaaggcttgatggtaattcattttctggccaaattcctgatttcagagaatgtgggaatttgcagtatattcaccttgagaacaatcagttaactggtgaattgccatcttctttgggtgacctacctaacctgaaagagttgtatgttcaaaataacaagctgtctgggcaggttccaaaagcacttttcaagagaagcattattttgaacttctcaggtaacagtggccttcacatagtaagcaatggcattagccacaccataattgttatatgtctggtgattggagccgttgtcttactgggtgttgctattgggtgctatttcattacatgtaggagaaagaagaaatctcatgaagacactgttgtcattgcagcagcaccagctaaaaaacttggttcatattttagtgaagtggctacagaatcagcacacagattttctttatctgaaattgaaaatgctactggcaaatttgagagaagaattgggtctggaggctttggcatagtatactatggaaagttggctgatgggagagagattgcagtcaaacttctcacgaatgactcgtatcagggaatcagagaattcttgaatgaggtgacattgctttccagaatacatcatagacacctggttacattccttggttacagtcagcaagatggcaaaaacatactagtgtatgagttcatgcataatgggacactaaaagagcaccttcgtggagctgataatgaaaagataactagctggctgaagcgtcttgagattgcagaagattctgcgaaaggtatagagtatctccacacgggatgctccccaacaatcatccatagagacctgaagagcagtaacattctcctagacaagaacatgagagcaaaagtggcagacttcggtctttcgaaacctgcagtggatgggtctcatgtgtcaagtatagttcgagggacagttggatacctggacccagagtactacatctcgcagcagctgacggagaagagcgacatctacagcttcggcgtgattttgctggagctcatctctgggcatgaacccatctcgaatgacaactttgggctcaactgccggaacattgttgcgtgggcccgatcgcacatcgagagcgggaacatccacgccatcattgatgagtcgttggacagaggctgctatgacctgcagtcggtgtggaagatcgcggaggtggccataatgtgtgtgaagcccaagggcgcccagaggcctcccatctcggaagtgctcaaggagatccaggacgccattgccatggagcgggtgctcgtgtccaattgcagcaacaggatgggttcaggtagcgtggagcagaatggaggagcatctttcgacgagctgctcatgcagccgggtctcagatgagatgagaacaacctactcgtaccttgagtccattgtatgtagtaattaatgtgtttactacattttttttgagaaacaaattaagtaatgctagcaaaggaacca

SEQ ID NO: 120260 - DNA, 1616 bp, Zea Mays
tctttttttttctgctcaagaaaccaaaaggcaaattgatgtcagtgatttaggctttttcatatgattacatctatgtgaggatctttatggaaaaaagacctctcttattatgaatgaaaaaatttgcaggtatgttcaaaataacaagctgtctgggcaggttccaaaagcacttttcaagagaagcattattttgaagttagtaccctgtccttaaagcagattattaatttcagatcatgcttttgagtgaaacggcctctagctgggttggttagatgactagagtagcactttagtcctgagttcaactccccgtgagagcgaatttcaggcgaatttcagactagggttaaaaaatccttcgtctgtcccacatcagtggggcagagatttggcgggtttcttgacctgcgtgagaagctgtctgcctgtctcactgaatcaccaggttatgagttcgaaacagcctctccgcatttgcaaggggaaggcttgtttcggtttattccttacccatacctcactcatgtgggaggctccggcactgggtctgctctttttttatgtagaccaaatagctatgctgttcttagaagaatggtagcatgactcccatatgttctaatttgttacatgcctgcagcttctcaggtaacagtggccttcacatagtaagcaatggcattagccacaccataattgttatatgtctggtgattggagccgttgtcttactgggtgttgctattgggtgctatttcattacatgtaggagaaagaagaaatctcatgaagacactgttgtcattgcagcagcaccagctaaaaaacttggttcatattttagtgaagtggctacagaatcagcacacagattttctttatctgaaattgaaaatgctactggcaaatttgagagaagaattgggtctggaggctttggcatagtatactatggaaagttggctgatgggagagagattgcagtcaaacttctcacgaatgactcgtatcagggaatcagagaattcttgaatgaggtgacattgctttccagaatacatcatagacacctggttacattccttggttacagtcagcaagatggcaaaaacatactagtgtatgagttcatgcataatgggacactaaaagagcaccttcgtggagctgataatgaaaagataactagctggctgaagcgtcttgagattgcagaagattctgcgaaaggtatagagtatctccacacgggatgctccccaacaatcatccatagagacctgaagagcagtaacattctcctagacaagaacatgagagcaaaagtggcagacttcggtctttcgaaacctgcagtggatgggtctcatgtgtcaagtatagttcgagggacagttggatacctggacccagagtactacatctcgcagcagctgacggagaagagcgacatctacagcttcggcgtgattttgctggagctcatctctgggcatgaacccatctcgaatgacaactttgggctcaactgccggaacattgttgcgtgggtaagaaagaagagtattcctgttggttctgctgaagcaaaagcgttaaataaataa

SEQ ID NO: 120261 - DNA, 5584 bp, Zea Mays
tgtgtcccccctggccctctcctcagatcagatctctccttctccccccgagtggaggcacctcgcgtcaccgcctccgctagcccttccgctccatactagccgaaagagatctcggcaccgccgcccgtcgccatggcggcggccaacgcccccatcgccatgcgcgaggcgctcacgctcaccagtctaggcatcgcgccgcagttcgtcaccttcacccatgtcaccatggagtcggagaagtacatctgcgtccgcgagacctccccgcagaacagcgtcgtcatcatcgacatggccatgcccatgcagccgctccgccgtcctatcaccgccgactccgcccttatgaaccccaacgccaggatcctcgcgctgaaagcccaaatacctggaacaacacaggatcaccttcaaatatttaacattgaggctaagactaagatcaagtctcaccaaatgcccgagcaggttgtattttggaaatggatcactcctaaattgttgggtttagtgacacaaacatctgtttaccactggtcaattgaaggtgattctgagccaaccaagatgtttgataggacagctaatttggcaaacaatcagatcatcaactatcgatgtgacccagcggagaagtggcttgtacttattggaattgcacctggagccccagagagaccacaactggtgaagggaaatatgcaacttttttctgttgatcaacaacgtagccaggcacttgaagcccatgcagcatcttttgcaacatttaaggttgttggtaatgagaatccatcaacccttatttgtttcgcctcaaagacaactaatgctgggcagatcacttcaaagttgcatgttattgaactgggtgcacagccagggaaacctggcttttctaagaaacaagctgacctcttcttcccaccagatttccaggatgattttcctgtagctatgcaggtttcacaaaagtatgggcttatctatgtaattacaaagcttggccttttgtttgtatatgacttggaaactgctgcggcagtttacagaaatagaattagtccagaccctatatttttgacagcagaatcttcctctactggtggattttatgccatcaacagaagagggcaggttttacatgccacagttaatgatgcaactgttgtaccttttgtcagtggccaattaaacaaccttgagcttgctgtgaatctggccaagagagctaaccttcctggtgctgagaacttggttgtgcaaagattccaggaactgtttgcacaaacaaaatacaaggaggcagctgagctggctgcagaatctccccagggtctcctgaggacgcctgagaccgtggctaaatttcagagcgttcctgtgcaagctgggcaaacgcccccactcttgcagtactttggcacattgctaactcgagggaagctcaatgcctttgagtcgcttgagctatctcgacttgttgtcaatcagaacaaaaaaaatcttctggaaaattggttggcagaagacaagctggagtgtagtgaagaactaggagatcttgtcaagactgtggacaatgatcttgcactgaaaatatacataaaggctagggcaacccctaaagttgttgctgcttttgctgaaaggagggagtttgacaagatactgatatactcaaagcaggttgggtacactccagattatctcttcctcctccagaccatattgcgtacagacccacagggagctgtaaactttgccctcatgatgtcacaaatggagggaggctgcccagtagattataatacaataactgatcttttccttcagagaaatatgatacgggaggcaacagcctttctgttggatgttctgaagccaaacttgccagagcatgcttttcttcaaaccaaggttttggagataaacttagtgacttacccaaatgttgctgatgccattcttgctaatggtatgttcagtcattacgaccgccctcgtattgctcagctatgtgaaaaggccggtttgtacttgcgagccctccagcattactcagagttgcctgatatcaagcgtgccattgtaaatactcatgccattgagccacaggcacttgttgagttctttggcaccttgtcaagagagtgggctttggagtgcatgaaagacctcctactggttaatctgaggggaaatcttcagattgtggtgcaggctgcaaaagaatactgtgagcagctaggggttgacgcgtgcatcaaattatttgagcaattcaaatcttatgagggtctttactttttcttgggatcctatctgagctccagcgaggacccagatatccatttcaagtacatagaagcagctgcgaggactggacagatcaaagaagttgaacgtgtaaccagagagtcaaacttctacgatgctgagaagacaaagaactttttgatggaagcaaaactacctgatgcccgtccactgattaatgtttgtgaccgctttggttttgtgccagacctcactcactacctgtacacaaacaacatgcttcgatatatcgaaggctatgttcaaaaggtgaatcctgggaatgctccattggtagtggggcaactacttgatgatgagtgtcctgaagattttatcaagggtttgattctctctgtccgttctctccttcctgttgagccactggttgatgaatgtgagaagaggaaccgcttacgtttgctcactcaattcttggagcacttagtgagtgaaggtagccaagacgtgcatgtccataatgctcttggaaaaatcatcatcgacagcaacaacaatcctgagcatttccttactaccaacccattttacgactctcgtgttgtgggtaaatattgtgaaaagcgggatcctacacttgctgttgttgcttacagacgtgggcagtgtgatgatgaacttattaatgtcactaacaaaaactcattattcaagctacaagctaggtatgtggttgagagaatggatggtgatctgtgggataaagttcttcagcctgagaatgaatatagaaggcaactcattgaccaagtggtttcgactgcgttgcctgagagcaagagccctgagcaagtgtctgctgctgttaaggctttcatgactgctgacctgcctcatgaactgattgagcttcttgaaaagattgttcttcagaattccgctttcagtggaaatttcaatctgcagaacctgctcatcttgactgctataaaggcagatccatccagagtcatggactatgtcaacagacttgataactttgatgggcctgctgttggagaagttgctgttgaagcacaactgtatgaggaggcttttgctatattcaagaaattcaacttaaatgtgcaggctgtcgatgttctcttggacaacatccggagcatagaaagagcagaggaatttgctttccgtgttgaagaagatgctgtttggagccaggttgccaaagcccagttacgtgaaggtctggtcagtgaagcaattgagtccttcattcgtgcagatgatgctgcacactttcttgatgtcatccgtgctgccgaggaagctaatgtgtacaatgatttagtgaagtaccttctgatggtaaggcaaaaggcacgggaacccaaagtcgatggagaactcatctttgcatatgcaaagattgacaggctcagtgacattgaggaattcattcttatgccgaatgttgccaaccttcaaaatgttggtgaccgtctttttgaggaagaactatatgaagctgcaaagatcatctatgctttcatctcaaactgggctaagctggctgttacccttgttaagctgaagcagttccaaggtgctgtggatgctgctcgcaaggctaacagtgctaaaacatggaaggaggtctgctttgcttgtgttgacgctgaggagttccgtcttgcacaaatatgtggtctcaatattattgttcaggttgatgacttggaagaagtcagtgagtactaccagaacagaggatgcttcagtgaacttattgctctcatggagagtggtcttggacttgaacgtgcacacatgggtatcttcacagaattgggagttctatatgctagataccgctctgagaagcttatggagcacatcaaacttttctccacccgtctgaatattcctaagcttattcgagcttgtgatgaacaacagcactggaaagaacttacctacctgtacatacagtatgatgaatttgacaatgctgccaccacaattatgaaccactctccagatgcatgggatcatatgcagttcaaggatgtctgcgttaaagttgcaaatgtcgagctatattataaggcagttcacttctatttgcaagagcatcctgatctcatcaatgatatgctaaatgtgcttgcacttcgtttagatcataccagagttgtagacataatgcgcaaggctggtcagttgcatcttgtgaaaccatatatggttgcagttcagagtaacaatgtctctgctgtgaatgaagccttgaatgagctttatgttgaagaggaggactatgagagactccgtgaatcagttgacatgcatgacaactttgaccagatatgtcttgcccagaagcttgagaagcatgaattgctggagatgaggaggattgccgcctacatttacaagaaggctggcaggtggaagcaatcgatagctctatcgaagaaagacaacatgtacaaggattgcatggagacatgctcacaatctggtgaccgcgaattgtcagaggacttgcttgtctatttcattgagcagggtaagaaagaatgcttcgcttcttgcctcttcatttgctacgacctgatccgaccagatgtcgctcttgagcttgcatggatgaacaacatgatggactttgccttcccgtacctgttgcagttcattcgtgaatacactagcaaggtggatgatttagtgaaggacaagattgagtcgcagaaggaagaaagagccaaagagaaggaggagaaagaccttgtggctcagcagaacatgtatgcgcagctgcttcctctcgctttgcccgccccgccaatgcctggcatgggtggccctccacctccgatgggcggaatgggcatgcctccgatgggtatgccgccgatgccagcatttgggatgccaccgatgggaagctactgatttggttttgcagcataagtggaacttcattggagttgtagatggttgacagtttggaatcaatattcttcattgtaccaggaaactttttggcgagtgagtgaaatcagtcttacccgtagtttgagaagtgcaacctgtgatatgtttacgatgggatcggaaataggatgattaggttgtttcagcatgagctgttgaaagctggtaccatatgtatagtgtgataaaatctttgtagacatttttcttgtatgatacttgtcggcacagttatatatatatatatatatatatactgtatttatatattacacctgagtgcattcaatatagagaa

SEQ ID NO: 120262 - DNA, 1198 bp, Zea Mays
gttggaaactttctggaaggctgcatcaatgattgggattttggcaaagacagccttgtgtcgttcttcctgattagaacaattcaggaagtagtcgttcgagtccagcacatcaatacgcttatggataaaattgaagcaatatacaaaatagtgagcaccatctttgatagggacaaaaacctggtgcaaaaaaggagtagaaaactaattactaaaaaatggaaaacatatatgaaaaaagaagttgaaagaaaaaaagtatagacagttgcaaagtatgtgtcctggtgattgcaactgtaaatgatggaaagtaaaaaattgtaggtatgaaaaaagtgggttggggaaaaggtctgctaaccaattttgctcttgacaaatcatagttttcgcactcagacatcaaattattccatacatatatgaattcttccgtctcagatttatcagcgttgagtactgcttcacacgttgatacattgaactgtatgtgttttccagtttggagaataaataaaaaagaaaaatgataaatgattaaattagtttaaacacataaatgcaagacagtatacaaaaaatacatggttttggagaagaaacttacataaaaaccagtggtcagaaacactctgtatccacaagaatcaaccttgtgcacaatatcatcatatcgcatgcagtgcacgaaaaagtctatgattcctgactcgccaagggtgtcattagaaaaagatgttaaaatttcctcgccagttagtccaacaagaaggccaaactccaacaaaattctcctgcatcaacaaaaaaaagaaaaaaaaacatatggattagtgagaagaacagtagaatgtgcaactgctagagtgctgtgattgcaactgttggtctagtgtgatttcaaagtactgaataactctgggaaattctgttacacaaatatgattgcaaactactggtgtagtataattgcaactagtgtgttgtaattgcatgtactatataactctgtgaaattctttttaaataaaaatgactgcaacttctgttatggtgtgattgcaaccacgcattaggtacgattgctactgctatataagtaactaactgttcaagaaaaataattgctacttggttagaattgcaaaataaaatgtaaatagcaattgcaacttgggaaaaacaaaaaaaa

SEQ ID NO: 120263 - DNA, 248 bp, Zea Mays
tttttttgtttttgttcctaacattttattttaatgtttaccttcatgcttcaggtcctcctatgtagttagtagacatggcttttttattttttaccaattttttttgtgttcctgacattttattttaatgttcaccttcaggcttcaggtcctcctatgtagtagtcatggctttatctggccaaacactgttgcacccattacatatcaaagtttttggtagtagtttagaaacaatcgcatgt

SEQ ID NO: 120264 - DNA, 137 bp, Zea Mays
taaatgcagagcagcaaaggataaccacgagacttgtaggtgttggaatttatatcgtccagttcatctaattaacggcagcacgttattatttcaacaaacctgacgtatatttaaaataaaataaaataaaaaaa

SEQ ID NO: 120265 - DNA, 99 bp, Zea Mays
gtcagcaacaaattccagtttcatattattataaggcgatatgtcgatcatggcggacaggcggagttactattttattattgttcaacacatgaaaaa

SEQ ID NO: 120266 - DNA, 1404 bp, Zea Mays
tccaggtagtagctgtagcctgtaactgcgcgacgcgccggcgagggtgtccggtggccatggcggggtggtcctgcacgcggtgcggcgggccgacgacaactggaacctgtggcgatagcagattcaggtaagaattgaagacaatgatgtcggcatccctccagacactggcatgcttctcaattctgtctgcccttatgatccgatctgtggagggaagcataccaatgccttgaaggagatgagtgagccattgaaggtgcgtatcttgagcctgtcgtcagattttcaagcagcttgatggcatcaaatctgttttggaaaaaaggaaaactattctgtccggtacgtacatccagtctgaaaagattagcagagaagaaaggatgccggcggggagacgagacatgctggagaatgggtacaattattactggaatgtgcaccagctgaagctgattgattgagtctttaaataaataaataaataaaaaggctggtaaaattaaacctgtatcagtggttgcaatcgaatggtggtccacgtgattccctgcaggatgaggcacctagctagctgttggattcctgcacgaggccaagaagaagccgtgcggacgatcagatgcaccgaacgaatgctcgcatgaaattgaatgaacgcacacacagggaatgaaggaaggaagctccggtattgatccgccggccgacagatgctgtctgatcaacactacactatgatgagtctatgacatgagtggagtggagggacggtgcacatgcatcttgggcagtctgcagtgtgcaaggacgagagcatgcggtttgcttttggcggctctattctacctgcaactcatcagcagggagggaaggtagaagaggagcaacgtgtaggaggtacagtaacaacaagctagcatgccaagtaacacactactgttcctgtcgcgtacagtacgtccattttacgtactgggatctgggaatgggatgctggtgcagcagtacgtagcagagagccagcagcaccgggggtccagtccaggggcctgcctaccctcctctctataccgtctgcatcaagacgtgcatctaaaggtcaacagaaagaaaggtacccatgctgtgctagcagacacaaccaccgcaccaccaaccatgttttttttgtttagtcgatcctaatggcaaatcaaaccgtggggctcaacgacatgcatgatgcagatgcatgcagctagcatcgtcgggccaccgacggtttgacaatgtgctccatgttggagagagactgattaataatgtatgcgtgccttctcaccctgactttattattcttagcatttaaatcatgtactgtaaaaaatcaccaatatatagtaccctttttatgtc

SEQ ID NO: 120267 - DNA, 1781 bp, Zea Mays
tccaggtagtagctgtagcctgtaactgcgcgacgcgccggcgagggtgtccggtggccatggcggggtggtcctgcacgcggtgcggcgggccgacgacaactggaacctgtggcgatagcagattcaggtaagaattgaagacaatgatgtcggcatccctccagacactggcatgcttctcaattctgtctgcccttatgatccggtactccacccggtggataatggggttgtcgctgttagattccaccagtagtggtgaccagtagaaatctatcgttgcgttgtattcctgaaaatgattatatgttcaaacaggctaaccagataaaaccgttttttttttgtatcctgcagatctgtggagggaagcataccaatgccttgaaggagatgagtgagccattgaagattttcaagcagcttgatggcatcaaatctgttttggaaaaaaggaaaactattctgtccggtacgtacatccagtctgaaaagattagcagagaagaaaggatgccggcggggagacgagacatgctggagaatgggtacaattattactggaatgtgcaccagctgaagctgattgattgagtctttaaataaataaataaataaaaaggctggtaaaattaaacctgtatcagtggttgcaatcgaatggtggtccacgtgattccctgcaggatgaggcacctagctagctgttggattcctgcacgaggccaagaagaagccgtgcggacgatcagatgcaccgaacgaatgctcgcatgaaattgaatgaacgcacacacagggaatgaaggaaggaagctccggtattgatccgccggccgacagatgctgtctgatcaacactacactatgatgagtctatgacatgagtggagtggagggacggtgcacatgcatcttgggcagtctgcagtgtgcaaggacgagagcatgcggtttgcttttggcggctctattctacctgcaactcatcagcagggagggaaggtagaagaggagcaacgtgtaggaggtacagtaacaacaagctagcatgccaagtaacacactactgttcctgtcgcgtacagtacgtccattttacgtactgggatctgggaatgggatgctggtgcagcagtacgtagcagagagccagcagcaccgggggtccagtccaggggcctgcctaccctcctctctataccgtctgcatcaagacgtgcatctaaaggtcaacagaaagaaaggtacccatgctgtgctagcagacacaaccaccgcaccaccaaccatgttttttttgtttagtcgatcctaatggcaaatcaaaccgtggggctcaacgacatgcatgatgcagatgcatgcagctagcatcgtcgggccaccgacggtttgacaatgtgctccatgttggagagagactgattaataatgtatgcgtgccttctcaccctgactttattattcttagcatttaaatcatgtactgtaaaaaatcaccaatatatagtaccctttttatgtcaaggcacacctgtgatgatatgcaatgtctgagggttttattataggatttggaacgaaattgacgttttactacgactggtatatgcaccgaaaaagaagttcattttcgtcctagtacgcgagatatatatatgctggattgttcatcatttccctcaggtcaaaaggtgaacaacacaactggggaggggaccgactacgacctacaacacacactgtgcaaggattcggggacaaggaaaaaaaaa

SEQ ID NO: 120268 - DNA, 2250 bp, Zea Mays
cttcccccactcgtcttcgccagaaacccgctggcgctttggtctctgtcgtccaagttcccatctccggccaccaatagttccgacccgtaagcaccaacgccccatttgccactaccctaccgcgcaccggcaaagcgcagcgccaggccgcagcttgcaggggcaggcggcggcgggcagggcaaccgccactgcagccgggatccggcggccagcggcaaccggcggggggcaggcggtcgggacctggtgtcggtctacagccagacagcagcagcagcagcgtgaccctcaaaatcctagaccactaccgtatggtccactgctcctttgctggtgtcgtccactgctcctctgcaacgtcgtttgatctcctgtgcagtctgcacacgcgtgttgaaggagttgattcctggacagcacacgatagcacaatcctctactggttcattcctggactaccggtggtaatctgacctgctatatcgctttgcttattatctatattcatcaaagcatctatttgatcataatgttaaaagcgcgggcaagtttctagtgcttatcatttgccctccggtcaccccgttgtcgcgcgaagccgacgctatttcattccccgacaggaccggggctccgctgccgcctcttcgcccctatatggcggtcccgaggcctcaaatccgtgccctacgtcggggcacgctgcttctcttccttgtcccgctcatctactctgtgtccaggctgcaaccctgggctccagaaaagggtgtgtgcctgccacccccaaccgcgccgaagcggcctgaccatctcgtgctcggccccgccgccggacaggaccgccccgaccgcctacagtgccgaggacttagagctctgaacaagattggcatatcaagtgaagagaactattctggagaacatgtttcttttgctactgtattcacaacctacaattctgtctcagctggagatgacaatgttccatctgattctgtaactgttggaaacagttcttatagcaaaatagaaagatccatggccattctgaacactttcatcagtttcataaaggtatcaatgccaagaagcgacttgatcatattgactgatcctggttcaaaaatttcagtaaatcaagggactgctacactattgccagttgaaggaaactattctcgaggaaatttgatgcttcagagaataaagacatacattgcatttctggagcaaaagcttgtggaatttgataggatggagaggttgaatcattttgttttaactgattccgatatagcagtggttggtgatcttggacatatattcaaaaaatatcctcattttcatctggctgttacttttcgtaataacaaagggcaaccgttgaattctgggtttgttgcggtaaggggaaccagggatggcatcactaagtaagttgacagctattgaatagatcgtattatacacaaccagcaaacttcaaaataaactctgttttttcagcgctgtggaattcttgaaacaagtccttggaacttacagtttaagatatatgaaggcttctcgtatgcttggtgaccaattagcacttgcatgggttgtcaagtctcatctaccatcggctttcggaaaattttctaagaatgaagcatttactggtgaagttaatggaacatctgttctcttcttgccttgtgctgtttataattggaccccgcctgagggtgctggacagtttcatggtgtacccttggatgttaaggttgttcatttcaaaggttccagaaagcgattgatgcttgaggcatggaatttctacagctcaacctctaagctgtctgatatgctatgcctaatcttgagaagtggccggacgaaatatgacttctgaacttttgggttaaaactgacacatgttgatactgttcaaagctgttgtatgttcaagtatagtacaaaaaaatgctgaccatgaggctgtcattgcaagaattcagatcagcataaaaaattgctagtagcattcagtatgtaacaaaaacatgtgagaacccatacgagaaccacgcagggtgaccatcgccttgtgttcttttggtttatccctacctgttaaatatgtaatgtggttccccaccaatgtgcgctatgtaggcaatttcgccgtcagatgtcgtcagcagtattaaatagagctggcgctgtttcaatgtgtcaccggcaaaatttgcagatgtt

SEQ ID NO: 120269 - DNA, 2119 bp, Zea Mays
cttcccccactcgtcttcgccagaaacccgctggcgctttggtctctgtcgtccaagttcccatctccggccaccaatagttccgacccgtaagcaccaacgccccatttgccactaccctaccgcgcaccggcaaagcgcagcgccaggccgcagcttgcaggggcaggcggcggcgggcagggcaaccgccactgcagccgggatccggcggccagcggcaaccggcggggggcaggcggtcgggacctggtgtcggtctacagccagacagcagcagcagcagcgtgaccctcaaaatcctagaccactaccgtatggtccactgctcctttgctggtgtcgtccactgctcctctgcaacgtcgtttgatctcctgtgcagtctgcacacgcgtgttgaaggagttgattcctggacagcacacgatagcacaatcctctactggttcattcctggactaccggtggtaatctgacctgctatatcgctttgcttattatctatattcatcaaagcatctatttgatcataatgttaaaagcgcgggcaagtttctagtgcttatcatttgccctccggtcaccccgttgtcgcgcgaagccgacgctatttcattccccgacaggaccggggctccgctgccgcctcttcgcccctatatggcggtcccgaggcctcaaatccgtgccctacgtcggggcacgctgcttctcttccttgtcccgctcatctactctgtgtccaggctgcaaccctgggctccagaaaagggtgtgtgcctgccacccccaaccgcgccgaagcggcctgaccatctcgtgctcggccccgccgccggacaggaccgccccgaccgcctacagtgccgaggacttagagctctgaacaagattggcatatcaagtgaagagaactattctggagaacatgtttcttttgctactgtattcacaacctacaattctgtctcagctggagatgacaatgttccatctgattctgtaactgttggaaacagttcttatagcaaaatagaaagatccatggccattctgaacactttcatcagtttcataaagtaaatcaagggactgctacactattgccagttgaaggaaactattctcgaggaaatttgatgcttcagagaataaagacatacattgcatttctggagcaaaagcttgtggaatttgataggatggagaggttgaatcattttgttttaactgattccgatatagcagtggttggtgatcttggacatatattcaaaaaatatcctcattttcatctggctgttacttttcgtaataacaaagggcaaccgttgaattctgggtttgttgcggtaaggggaaccagggatggcatcactaacgctgtggaattcttgaaacaagtccttggaacttacagtttaagatatatgaaggcttctcgtatgcttggtgaccaattagcacttgcatgggttgtcaagtctcatctaccatcggctttcggaaaattttctaagaatgaagcatttactggtgaagttaatggaacatctgttctcttcttgccttgtgctgtttataattggaccccgcctgagggtgctggacagtttcatggtgtacccttggatgttaaggttgttcatttcaaaggttccagaaagcgattgatgcttgaggcatggaatttctacagctcaacctctaagctgtctgatatgctatgcctaatcttgagaagtggccggacgaaatatgacttctgaacttttgggttaaaactgacacatgttgatactgttcaaagctgttgtatgttcaagtatagtacaaaaaaatgctgaccatgaggctgtcattgcaagaattcagatcagcataaaaaattgctagtagcattcagtatgtaacaaaaacatgtgagaacccatacgagaaccacgcagggtgaccatcgccttgtgttcttttggtttatccctacctgttaaatatgtaatgtggttccccaccaatgtgcgctatgtaggcaatttcgccgtcagatgtcgtcagcagtattaaatagagctggcgctgtttcaatgtgtcaccggcaaaatttgcagatgtt

SEQ ID NO: 120270 - DNA, 1988 bp, Zea Mays
ccaacgccccatttgccactaccctaccgcgcaccggcaaagcgcagcgccaggccgcagcttgcaggggcaggcggcggcgggcagggcaaccgccactgcagccgggatccggcggccagcggcaaccggcggggggcaggcggtcgggacctggtgtcggtctacagccagacagcagcagcagcagcgtgactctgcacacgcgtgttgaaggagttgattcctggacagcacacgatagcacaatcctctactggttcattcctggactaccggtggtaatctgacctgctatatcgctttgcttattatctatattcatcaaagcatctatttgatcataatgttaaaagcgcgggcaagtttctagtgcttatcatttgccctccggtcaccccgttgtcgcgcgaagccgacgctatttcattccccgacaggaccggggctccgctgccgcctcttcgcccctatatggcggtcccgaggcctcaaatccgtgccctacgtcggggcacgctgcttctcttccttgtcccgctcatctactctgtgtccaggctgcaaccctgggctccagaaaagggtgtgtgcctgccacccccaaccgcgccgaagcggcctgaccatctcgtgctcggccccgccgccggacaggaccgccccgaccgcctacagtgccgaggacttagagctctgaacaagattggcatatcaagtgaagagaactattctggagaacatgtttcttttgctactgtattcacaacctacaattctgtctcagctggagatgacaatgttccatctgattctgtaactgttggaaacagttcttatagcaaaatagaaagatccatggccattctgaacactttcatcagtttcataaaggtatcaatgccaagaagcgacttgatcatattgactgatcctggttcaaaaatttcagtaaatcaagggactgctacactattgccagttgaaggaaactattctcgaggaaatttgatgcttcagagaataaagacatacattgcatttctggagcaaaagcttgtggaatttgataggatggagaggttgaatcattttgttttaactgattccgatatagcagtggttggtgatcttggacatatattcaaaaaatatcctcattttcatctggctgttacttttcgtaataacaaagggcaaccgttgaattctgggtttgttgcggtaaggggaaccagggatggcatcactaacgctgtggaattcttgaaacaagtccttggaacttacagtttaagatatatgaaggcttctcgtatgcttggtgaccaattagcacttgcatgggttgtcaagtctcatctaccatcggctttcggaaaattttctaagaatgaagcatttactggtgaagttaatggaacatctgttctcttcttgccttgtgctgtttataattggaccccgcctgagggtgctggacagtttcatggtgtacccttggatgttaaggttgttcatttcaaaggttccagaaagcgattgatgcttgaggcatggaatttctacagctcaacctctaagctgtctgatatgctatgcctaatcttgagaagtggccggacgaaatatgacttctgaacttttgggttaaaactgacacatgttgatactgttcaaagctgttgtatgttcaagtatagtacaaaaaaatgctgaccatgaggctgtcattgcaagaattcagatcagcataaaaaattgctagtagcattcagtatgtaacaaaaacatgtgagaacccatacgagaaccacgcagggtgaccatcgccttgtgttcttttggtttatccctacctgttaaatatgtaatgtggttccccaccaatgtgcgctatgtaggcaatttcgccgtcagatgtcgtcagcagtattaaatagagctggcgctgtttcaatgtgtcaccggcaaaatttgcagatgtt

SEQ ID NO: 120271 - DNA, 836 bp, Zea Mays
gccctagggcgtggaccgtccggccgtcaggcagggaacccgagctcctgcaccaggtcgcggaccgtccggcccttcgcggacaggaggaagaggaagaagaagcggcagcgagcgaggatgccgtgcctgaacgtgtcgaccaacgtgaacctggagggggtggacacctccgccatcctcgccgaagcctccaagtccgtcgccaacatcatcggcaagcccgaggcctacgtgatggttgttctcaagggttcggtgcctatggcatttggaggtacccaggagccagcagcttacggtgagctggtttccatcggaggcctgaaccctgatgtgaacaagaagcttagtgctggcatcgcttctatcctggagtcaaagctgtctgttcccaagtcacgcttctacctcaagttctatgactcgaagcgctcggacttcggttggaacggctccaccttctagacttgaggtctgcagctgaaataaaagaaattcgtggaatcatggtacctaatgcccatggctattgcctattaaggacaatgtcataagatgtgtcttaatcggtgctgaactgagaaacagtaactgttgtcgtggaactggaagtggggtgctggcgtgtcagagtgcttgcttcctacctagcatagcatgcctgtgctatcttgttattggtattggcttgatatcagtctatattatcatttattatggttggtccttcgggtttggtaactgtatcttcaaaccgtgtgttctctgttaacctagcggaaatctgccaaagctagtgttgtttttactataggcttacagttacaggggat

SEQ ID NO: 120272 - DNA, 517 bp, Zea Mays
aaactaacaggtccaaacggcccattattagcctaggcaggcagagcagcagaggagattcctttccctttccgttagcaggatagagagggagaggagcagaagatagcagagggccagaggcgcagaaggcagtcgcggacaggaggaagaggaagaagaagcggcagcgagcgaggatgccgtgcctgaacgtgtcgaccaacgtgaacctggagggggtggacacctccgccatcctcgccgaagcctccaagtccgtcgccaacatcatcggcaagcccgaggcctacgtgatggttgttctcaagggttcggtgcctatggcatttggaggtacccaggagccagcagcttacggtgagctggtttccatcggaggcctgaaccctgatgtgaacaagaagcttagtgctggcgtgtcagagtgcttgcttcctacctagcatagcatgcctgtgctatcttgttattggtattggcttgatatcagtctatattatcatttattatggtt

SEQ ID NO: 120273 - DNA, 928 bp, Zea Mays
aaactaacaggtccaaacggcccattattagcctaggcaggcagagcagcagaggagattcctttccctttccgttagcaggatagagagggagaggagcagaagatagcagagggccagaggcgcagaaggcagtcgcggacaggaggaagaggaagaagaagcggcagcgagcgaggatgccgtgcctgaacgtgtcgaccaacgtgaacctggagggggtggacacctccgccatcctcgccgaagcctccaagtccgtcgccaacatcatcggcaagcccgaggcctacgtgatggttgttctcaagggttcggtgcctatggcatttggaggtacccaggagccagcagcttacggtgagctggtttccatcggaggcctgaaccctgatgtgaacaagaagcttagtgctggcatcgcttctatcctggagtcaaagctgtctgttcccaagtcacgcttctacctcaagttctatgactcgaagcgctcggacttcggttggaacggctccaccttctagacttgaggtctgcagctgaaataaaagaaattcgtggaatcatggtacctaatgcccatggctattgcctattaaggacaatgtcataagatgtgtcttaatcggtgctgaactgagaaacagtaactgttgtcgtggaactggaagtggggtgctggcgtgtcagagtgcttgcttcctacctagcatagcatgcctgtgctatcttgttattggtattggcttgatatcagtctatattatcatttattatggttggtccttcgggtttggtaactgtatcttcaaaccgtgtgttctctgttaacctagcggaaatctgccaaagctagtgttgtttttactataggcttacagttacaggggatattggctgctaactgaaattcctcttcatagcc

SEQ ID NO: 120274 - DNA, 822 bp, Zea Mays
aaactaacaggtccaaacggcccattattagcctaggcaggcagagcagcagaggagattcctttccctttccgttagcaggatagagagggagaggagcagaagatagcagagggccagaggcgcagaaggcagtcgcggacaggaggaagaggaagaagaagcggcagcgagcgaggatgccgtgcctgaacgtgtcgaccaacgtgaacctggagggggtggacacctccgccatcctcgccgaagcctccaagtccgtcgccaacatcatcggcaagcccgaggcctacgtgatggttgttctcaagggttcggtgcctatggcatttggaggtacccaggagccagcagcttacggtgagctggtttccatcggaggcctgaaccctgatgtgaacaagaagcttagtgctggcatcgcttctatcctggagtcaaagctgtctgttcccaagtcacgcttctacctcaagttctatgactcgaagcgctcggacttcggttggaacggctccaccttctagacttgaggtctgcagctgaaataaaagaaattcgtggaatcatggtacctaatgcccatggctattgcctattaaggacaatgtcataagatgtgtcttaatcggtgctgaactgagaaacagtaactgttgtcgtggaactggaagtggggtgctggcgtgtcagagtgcttgcttcctacctagcatagcatgcctgtgctatcttgttattggtattggcttgatatcagtctatattatcatttattatggttggtccttcgggtttggtaactgaaccaacaaaaaaaaa

SEQ ID NO: 120275 - DNA, 802 bp, Zea Mays
aaactaacaggtccaaacggcccattattagcctaggcaggcagagcagcagaggagattcctttccctttccgttagcaggatagagagggagaggagcagaagatagcagagggccagaggcgcagaaggcagtcgcggacaggaggaagaggaagaagaagcggcagcgagcgaggatgccgtgcctgaacgtgtcgaccaacgtgaacctggagggggtggacacctccgccatcctcgccgaagcctccaagtccgtcgccaacatcatcggcaagcccgaggcctacgtgatggttgttctcaagggttcggtgcctatggcatttggaggtacccaggagccagcagcttacggtgagctggtttccatcggaggcctgaaccctgatgtgaacaagaagcttagtgctggcatcgcttctatcctggagtcaaagctgtctgttcccaagtcacgcttctacctcaagttctatgactcgaagcgctcggacttcggttggaacggctccaccttctagacttgaggtctgcagctgaaataaaagaaattcgtggaatcatggtacctaatgcccatggctattgcctattaaggacaatgtcataagatgtgtcttaatcggtgctgaactgagaaacagtaactgttgtcgtggaactggaagtggggtgctggcgtgtcagagtgcttgcttcctacctagcatagcatgcctgtgctatcttgttattggtattggcttgatatcagtctatattatcatttattatggttggaaccaacaaaaaaaaa

SEQ ID NO: 120276 - DNA, 806 bp, Zea Mays
agattcctttccctttccgttagcaggatagagagggagaggagcagaagatagcagagggccagaggcgcagaaggcagtcgcggacaggaggaagaggaagaagaagcggcagcgagcgaggatgccgtgcctgaacgtgtcgaccaacgtgaacctggagggggtggacacctccgccatcctcgccgaagcctccaagtccgtcgccaacatcatcggcaagcccgaggcctacgtgatggttgttctcaagggttcggtgcctatggcatttggaggtacccaggagccagcagcttacggtgagctggtttccatcggaggcctgaaccctgatgtgaacaagaagcttagtgctggcatcgcttctatcctggagtcaaagctgtctgttcccaagtcacgcttctacctcaagttctatgactcgaaggctcatcctgcacaagaaaatgctcaatgtttgcatgctttgcatcaagagtagatcatcgctcggacttcggttggaacggctccaccttctagacttgaggtctgcagctgaaataaaagaaattcgtggaatcatggtacctaatgcccatggctattgcctattaaggacaatgtcataagatgtgtcttaatcggtgctgaactgagaaacagtaactgttgtcgtggaactggaagtggggtgctggcgtgtcagagtgcttgcttcctacctagcatagcatgcctgtgctatcttgttattggtattggcttgatatcagtctatattatcatttattatggttggaaccaacaaaaaaaaa

SEQ ID NO: 120277 - DNA, 1378 bp, Zea Mays
tcgcgtcgcgcggatctctctctctccgcgtcgtccaggtcctcctcagatccgccaaacccgccgagacagagagatcgccatggccgcggcatcgcctccgctcctccccaccacggtcgtcccggcggccgcagcacccccgacacccgcgcccacggccatatcctccgcggacgccaccgacaccaacccagcggcgatccgggccttcctctcccgcctcctcgacaccacccggcgcgcgctgtcgggcgcccgcccctggtccgagctcgcggaccgctcggctctctcccgcccggagtccctcgccgaggccacgtcccgcttgcgcaagaacctggcctacttccgcgtcaactacgccgccgtggccgcgctgtgcctcgccgcggcgctcctggcgcaccccttctccctggccgcgctgctggcgctgctcgccgcctggtgcctcctctacgtgctccgccccgccgacgcgccccccgtctccgcgttcggccgcaccttctccgaccgcgaggtgctcggaggcctcgccgccgcctccgcgttcgtcgtcttcctcacgtcggtgggctcgctcatcttctccgcgctcgcgctggggaccgccatcgtctgcgcgcacggcgcgtgccgcgtgcccgaggacctcttcctcgacgatgttgaccaggctgccggcggcaccggcaacccgctgctgtcgctcatcgcctccgccaccggaggccgcgtctgatcatgagtctgtaatagatgctatgcttgaggtcactgccattttcttgatcgattattttcgcggaactatttatgcagctcaaaaattatactactatatatagctacggaaagcaacaaatcaaaccatatactggagtttgtttatgtatcatcgagcagaaatatattcttgttattcgtagcattatatttgtattttattacacgttttgataataatcagtaaacatcccggaattcggcttcagctcacacatgtaaaacatagaaaacgtttgtgtgcatttggtctttggctttgttgccaaaagataatagtatgccaccttatatgtgcaaaaaaaggaggtttctggaagcaaattattgcaacgggagaaaagggagtacgttaagctagagcatgtcttgtgcatggagaaaggtagagcatgtcttgcatatgcaaaaaggtcaaaaaacaaaaacaaaaaaaatattgtcttgtatatgcaaaaagctagagcgtgtcttgtaaatggaacaaggtgagtatgtcttgtatatgcaaaaaggtttaaaaacaaaaggaattgtcttgtatatgcaaaaagattaaaaataacaattatcttgtatatgc

SEQ ID NO: 120278 - DNA, 1078 bp, Zea Mays
gcaaaggcacacttagctctactctcactgcgtgcaagcagcaatctctactgctccccttcctctcactctctccatcgccgcctagctcattagctaagctttgcgcttccatttcacccccaccatgccgccgccgccacggaggcttccaccgcgcctcgcccaccgccgctgtggcatcgccgccgcgtggcttggcctacctccacgacgacatgagcatcgtgcacggcaacctgacggccagcaacgtgctcctggacgagcagcacagccccaggatctccgacttcgggctgtcgcggctgatgacgacggcggcaaactcaaacgtgctggcggcggcgggcgcgctggggtaccgcgcgccggagctgtcgaagctgaagaaggcgagcggcaagacggacgtgtacagcctaggcgtcatcatcctggagctgctgacgggcaagtcccccgcggacagcaccaacggcatggacctgccgcagtgggtggcgtccatcgtgaaggaggagtggaccagcgaggtgttcgacctggagctggtgcgcgacgccgccgcggggacggccgcggacgagcagctcatggacacgctgaagctcgcgctgcactgcgtcgacccggcgccggcggtcaggcccgaggcgcacgaggtgctgcggcagctcgagcagatcaggcctggtggcagcgagggcggcgctgggccaagcgaagaaggtggtggtggcgccgccgccgcccatgtgccggcggcttctgcttctgcgggagacgacgacgagtagcaagcaagcagcgccagacaggaatttaccagacagaaaaagaagcaatggagaaattaagagagataatatatgtaggaattctttcatttgtttgtttcactggacggatcggattgatcattttcttgcgttcctaggtaatttccagtttgtataggcaaatattatttgctctagaatcatcgctgtagtgccctacgacggatggaagagaggagaatactcctagtattaataatgcattgttattattttttctatttgatttactccta

SEQ ID NO: 120279 - DNA, 2945 bp, Zea Mays
gcaaaggcacacttagctctactctcactgcgtgcaagcagcaatctctactgctccccttcctctcactctctccatcgccgcctagctcattagctaagctttgcgcttccatttcacccccaccatgccgccgccgccacggaggcttccaccgcgcctcgcccaccgccgctgtggcatcgccgccgcgtccacgctcctgttcctcctcctgctgctctccgctcctcctaccatcgcccagcaccaccgccaccacgccacgggcgacggcgtggtgatcagccaggccgactaccagggcctgcaagccatcaagcacgacctctcggacccctacggcttcctgcgctcctggaacgacagcgggctcgccgcctgctcgggcgcgtgggcgggcgtcaagtgcgtcctaggcagcgtcgtggccatcacgctcccctggcgcggcctcggcggcatgctctccgcgcgcggcctcggccagctcgtccgcctccgccgcctcagcctccacgacaacgccatcgcgggccccgtcccgtcctcgctcggcttcctgccggacctccgcggcgtctacctcttcaacaaccgcttctccgggaccctccccgcctccatcggagggtgcgtcgccctgcaggccttcgacgccagcaacaaccgcctcacgggcgcggtccccgccgccgtcgccaactccaccaggctcatgcgcctcaacctcagccggaacgcgctctccgacgcagtacccgtcgaggtcgtcgcctccgcctcgctcatgttcctcgacctctcctacaacaacctctcgggccccatccccgacgccttcgccggctcctacagctcgccttcgaagctgcgcctcaacagggacgccatcaccgggagctaccagctcgtcttcctcagcctcgcgcacaactccctcgacgggcccatcccggagtccctcaccaagctcaccaagctgcagcagctccacctctccgccaacagcctcaacggcaccatcccggcgcagctcgccgcgctaccggacctcaaggcgctggacctctccgggaacgcgctggccggcgagatcccgcccgggctcgacaacctcaccgccacgctccagtccttcaacgtgtcctacaacaacctctccggcgcggcgccgccgtcgctggcgcgcaagttcggggagcccgcgttcaccgggaacgtcctcctctgcggctactctgcttccacgccctgcccggcgtccccgtcccccgcgccggcgtcgcccgcgcaggagccgccgcgcggaggccgcaagttcagcaggaaggcgctcgtgctcatcgtcgccggggtcgtcgtcggcgtcctcgtcctgctgctcctctgctgcctcctgctctgtttcctgagcaggaacaagaggtctcccagcggtactgctggaacacggagcgggaagcaggcggccaaggagaccggtggtgctggcgccgccgccgcggcggccgggcgtggcgagaagcccgggtccggcgcggcggaggtggagtccggtggcgatgtgggcggcaagctggtgcactttgatgggccgctggcgttcacggccgacgacctgctgtgcgccactgccgagatcatggggaagagcacctacggcacggtgtacaaggccacgctggaggacggcagcctggtggccgtcaagcggctccgggagaagatcaccaaggggcacaaggagttcgaggccgaggcggcggtgctgggacggatccgccaccccaacctgctggcgctcagggcatactacctgggacccaaaggggagaagctactcgtcttcgattacatgcccaacggcagcctccactcgttcttgcacgctcgcgctcccaacacgccggtggactgggcgacgcggatgacgatcgccaagggcacggcgcgtggcttggcctacctccacgacgacatgagcatcgtgcacggcaacctgacggccagcaacgtgctcctggacgagcagcacagccccaggatctccgacttcgggctgtcgcggctgatgacgacggcggcaaactcaaacgtgctggcggcggcgggcgcgctggggtaccgcgcgccggagctgtcgaagctgaagaaggcgagcggcaagacggacgtgtacagcctaggcgtcatcatcctggagctgctgacgggcaagtcccccgcggacagcaccaacggcatggacctgccgcagtgggtggcgtccatcgtgaaggaggagtggaccagcgaggtgttcgacctggagctggtgcgcgacgccgccgcggggacggccgcggacgagcagctcatggacacgctgaagctcgcgctgcactgcgtcgacccggcgccggcggtcaggcccgaggcgcacgaggtgctgcggcagctcgagcagatcaggcctggtggcagcgagggcggcgctgggccaagcgaagaaggtggtggtggcgccgccgccgcccatgtgccggcggcttctgcttctgcgggagacgacgacgagtagcaagcaagcagcgccagacaggaatttaccagacagaaaaagaagcaatggagaaattaagagagataatatatgtaggaattctttcatttgtttgtttcactggacggatcggattgatcattttcttgcgttcctaggtaatttccagtttgtataggcaaatattatttgctctagaatcatcgctgtagtgccctacgacggatggaagagaggagaatactcctagtattaataatgcattgttattattttttctatttgatttactcctagtatacagcacgagtagctgatctgtttctgctgtagagcaatcagcagtagcctgaattcacggattggcaatttggcaagggaaaaggcaatttgccaactg

SEQ ID NO: 120280 - DNA, 1830 bp, Zea Mays
atggagcctgtcaaggaaggggagtttgaagaggaaaggagaaaagggcagaatctgctccctgctctccacatgaattcagcagcacctgcacctataaagagagccggccggcctgcttcagccttgcttggcctcttgcttgcattgcatctcgccattgccaaggagcagtaccatgagttcgtggtaggcatgtcaagtcaaggacgtcgacgaccgatgcatttccacgtgaaggaggcgactgtgacgcggctgtgcgggacgcagcagcagcggatcatgacggtgaacgggcagttccccggtccgacggtggaggtggccgagggcgacgccctcatcgtgcgcgtccgcaaccggggcagctacaacgtgacggtgcactggcacggcgtgcggcagatgcgcacggcctgggccgacggcccggagttcgtcacgcagtgccccatccgccccggcacctcctacacctaccgcttcaccgtcgccggacaggaaggcacgctctggtggcacgcgcacagctcctggctccgcgccaccgtccacggcgcgctgatcatccgcccgcgcgccggcgtcccgtacccgttcaacgccggcgacacgccagccagggagatcaccatcatactaggggaatggtggaacatgaaccccatcgacgtcgtgcgcaccgccacccgcaccggcgccgcgcccaacatctccgacgccttaaccgtcaacggccagcccggcgatctctacaagtgctcatccaacggcaccacgacgttctcggtcacgtccggcgagacgaacctgctgcgcttcatcaacgccgcgctcaacacggagctcttcgtctccctggccggccacaccatgacggtggtgggcgccgacgcctcctacaccaagccgtacgccacgcccgtcatcttggtcgcgcctggccagaccaccgacgtgctcgtcaccttcgaccagccccccagccgctactacctcgccgcgcgcgcctacgccagcgcccagggcgtccccttcgacaacaccaccaccacggccatcttcgactacggcaccggcgccagcaacagcagcagccccgcgatgcccacactcccggcctacaacgacaccgcgacggccacggcgttcaccacgagcctgcgcggcctccgcgcggcggaccttcccgcgcgcgtcgacgagagcctcttcttcaccgtcggcgtcggcctcttcaactgctccagcggccagacctgcggcgggcccaacaacacgcgcttcgcggccagcatcaacaacgtctccttcgtgctcccgtccaccacctccatcctgcaggcgcactacgcgtacgccgccggcggggcgacgccagcaggcgtgttcaccgccgacttcccggcgaacccgccggtgcggttcgactacacggcgccgaacgtcagccgcgcgctgtggcagcccgtgccgggcacccggctggtgctccagggcaccaacgtgttcgcggccgagaaccaccccatccacctccacggctacgacttctacatcctcgccgagggcttcggcaacttcgacgccgccgcggacaccgccagcttcaacatggacgacccgcccatgaggaacacggtgggcgtgccggtcaacggctgggcggtcatccgcttcgtggcggataatcccggggtgtggctcatgcactgccacctggacgtgcacatcacctggggtctcgccatggcgttcctggtggaggacggcgtcggggagctgcagtcactggaggcgccgccgtctgacctgcccatctgctag

SEQ ID NO: 120281 - DNA, 652 bp, Zea Mays
ttttttttcgtgaacgcgcaggagagctgcgcatcattaaattaagagaagaaaacagtccaaaatggaccaaagtacaatgcgtcaatgccacaataggccaaacacaagaccaccaattcctgctatgcacttcaccagtggctactaattgacacaatccaggctttacctatgttttaatctaggcaaaactgaaagtgggatattagcaaaatggttcatagaaggtgctagaggcaaattcccatttaaactatagcaacacggtaatgctagatctagatgtaatgcgagcaaatcaatgatagtagtatctcactaggaacttgaaggggtggcattcattatgaatgtgatagtacctattcgatgccgaaaacttttcaaagatattgcaacttgcattttttttgttctatatgtatacatacgccaccatgatcatcaaaatattttcatgaccagttgtccagttaaatatccagaaaaatactgcttagtttttatccaaaacatactagttgaaagactggtgatcatgccacatttaagtggtcaatgacattaagaattagaatgacatgctagtagatgctacagcctgcaacaaacagttgggtacaatattcttgttttgtatcaattttta

SEQ ID NO: 120282 - DNA, 1291 bp, Zea Mays
ctcgggcctcccgacccctccgtcgaagccgcagccatggcgaccaccaccaccaccactccacttatcgtctccttctcgcgcagctgcagctgcccctatccacaccgccacttccccggcaagcccaagctgcccgcacccacctcctgctccctctccctccgcctcctcgctgccccccttgccgtcctgccgcggcgcccgcgtgacgtgtcggcggcgtacggcgacggcgacatggacgacgacttcggcgacttcgaccccgacgacgcggacggcgtcggcgaggacgacgacgtcgacaacgagcaggactacgacgtcgactacgaccgcctcctagctcccgtcgtcaagccgccgtcgccgccgggcgcgtcggcgtcgcccggggaggagggcgacatcgccatggtcgccgccgacagcttcgtctccacgcgggattcagcgtccgacaccgtcgtcgactacgccgtggatgaggacgagtttcacaagattaggctgctccactgcgacttccttatccgcaaggtgcccgaccccgacgacgacgtcttcgacttcagagagatgtatgtcacgccaccggacaccgacatctactccattccgagggttcttgccccgatgccgcagaagtacgcgaggtgcacgaagaaaaactttggccgttaccacgtgagcgagccaccagttgagcatttgcgcgatccactgtacaagacagagagggagatcatgaaggttttcttgaccaagcactacagaaacaggcgcgctgatgacccagatttttttcttgattttgaggagatctatgttattgactcgagaacaaggtcaatcacaagagctaaagttatggttagtgttcctgaaggaaagaaaagagaccggcggaacgacctgctactgatccgtgacgggggtgagtctttcagaatcatcgacaagactaaaagggacgacgcaagcactatcatacaaagagaggagtgggccaagtcgagacaagacgtggagaagcatttcaggaagctcagagactttgactactcgaattggttctaggaaaggttttcaccgcatctactgttgattatcctggagctagcagctggtttgatccactgagagatgaccatttcgaaattagataggttcggtgtaacgtagaacatatgccatctagggagcatggtaagctcaaaagtcaaaatattgtgattctgctgaatgtactactctttttttaaaaaaaaaatccttcacgaaatga

SEQ ID NO: 120283 - DNA, 129 bp, Zea Mays
gtaaatgttcctttgcgataatctagagaaaagatttatagggggtcgcaatgtacttacttttaatggacaccctcttaaatctcaataggttgttttagaagctaaaactccctctcaaaattaaaa

SEQ ID NO: 120284 - DNA, 1170 bp, Zea Mays
atgaggcgctctaccagcgacgcgacgccgacggtggcggcggcgctgacgagcccgaagcccggcgccaccaagcggcagcgggaggcggcgccgctcggcgacgtcaccaatatcctccccgagaccccggccccgagtaagcccagaagaaatgcacgccgccggcccttctccgcgccctccgacgcctccactgcctcctccacctgctcctcctccgcctcgttcaccccggcgctcaagacgtcctcctccgcgtcggccacccccgcgcccaagccgccgccgtccttcactgcctccgtcacgcccgcgcccaagccgtccttcgccgccgtcaccgacgaggaggggagcgcgttcaaatctccgaccatttgcacggtctatgcgaggcgcaggactaccgaggccgaggctgagggacggagcaaccccaccatcaccaacaggggcaaacaacccatcggtgctgcggcgagttgccctcctcttggaaaatctacgaggaacattaggaaaaaggatgctcgacccatctcgtcgtcagctacctgcggtgaagctaaaaagaagctgcggccgcttgcgaggacacccaagttgccagaggaatttgtgaagaagcaaaaggcatacttcgcagatgtggatgcctttgaactggcggaggaggaggtatcagaatccgagctggagtgaaacctgagagctgaaggtcctccccagaactacgtacgtgtccttcctccatgtacaggagtagttacttctacggcgatgggcggccagggcccagggtcatgttatcgatgtataggcatagctaggtcctcttgtaacacgcggctgatcactggagaacacctcagtataggcaaggcaactaacgcccgtaggaaattagcaaggacgagggagatcgacttccaagcgtatgagagcacagtggatggtgctgggtagaatgtggtgtgcgcttttgatcttttttgcagcgtagtacaacacggctacaggcatgtggaatggatggtggtgatatccggatctagacatcaagtagtggtgctccttgtgccttcagagccagcatctgtgtgtgtgctttttttaatggcggccgatggatgttgcgtatggctgcattggtacttttgaagtcaa

SEQ ID NO: 120285 - DNA, 1425 bp, Zea Mays
gccaagcaggtctcagcgaggttttctgctataaataaggcatcgtccaggcaaacaattaatagggcaaagcaaatcaaggacgctctgcacgtactattcatcttccattgttgctttgctttgctttgcttaccggcaaccatggccagcactcgtgcagcagcaactctccttttgctcctcgcgctcgccggcacctcgtcggcgcagctgtccacgggcttctactcctactcgtgccccggcgtgtacggcgccgtcaagtcggtgatgcagtccgccatcgccagggagaagcgcatgggggcctccatcctccgcctcttcttccacgactgcttcgtccagggctgcgacgcgtcgctgctgctggacgacacgcccagcttccagggcgagaagatggccaaccctaacaacggctccgtcaggggattcgaggtcatcgacgccgtcaagtccgccgtcgaaaagctgtgccccggcgtcgtctcctgcgccgacatcctcgccatcgccgccagggacagcgtcgtcatcctgggtggtccgacctgggacgtgaaggtcgggcggcgggactccacgacggcgagcttcagcggcgccaacaacaacatcccgccgccgacgtcgggcctcgccaacctcacgtcgctcttcgccgcgcagggactttctcagaaggacatggtcgcgctctctggtgctcacaccatcgggcaggcacgctgcaccaacttcagagcccacatctacaacgacaccgacatcgacgctgccttcgcgagaacgaggcagtcaggctgcccaagcacctcaggcgccggcggcgacaacaacctggcgccattggacctccagacccctaccgtcttcgagaacaactactacaggaacctcctcgccaagaaggggctcctgcactccgaccaggagctcttcaatggcggagccaccgacgcgctggtccagtcctacgtcgggagccagagcgcgttcttcgcggatttcgtggcgggcatgatcaagatgggcgacatcacaccgctgaccggctccaacaacggacagataaggaagaactgcagaagagtcaattagcagatagctagctagggtcactaattaagacccatgcatggctgttgaactgcaagctaagtaaacactatgtgagatcgtcgcgttgatgtgctcacatgtcgtctttttatttgggtgaaggatggatgcatgtatcagatcacttgttgtttaattaatgccatttcagtctttgtccaatatactttaatctgcatgagaaaaaaggagaataagtactagccagcgtgtgaagtgtatatatgcgcagcgcaacaagtagaatatgaagagtttcaaacatccaaactcatataataaacgcatatctttacg

SEQ ID NO: 120286 - DNA, 1002 bp, Zea Mays
atggctccagcagcacctgcatctgcgacaaaatgcagcagcggcatcgtcatctctgtgctcttgcccctcgcgctgctaatggcggccgccggcacctcgtcggcgcagctgtccacgggcttctactcttcctcgtgtcccggcgtgtacgacgccgtcaagtcggtggtgcagtccgccgtcgccagcgagcagcgcatgggcgcctccatcgtccgcctcttcttccacgactgcttcgtccagggctgcgacgcgtcgctgctgctggacgacacgcctagcttccagggagagaagatggccaaccctaacaacggctccgtgaggggattcgaggtcatcgacgccgtcaagtccgccgtcgagaaggtgtgccccggcgtcgtctcctgcgccgacatcctcgccatcgccgccagggacagcgtcgtcatcctgggtggtccgacctgggacgtgaaggtcgggcggcgggactccacgacggcgagcttcagcggcgccaacaacaacatcccgccgccgacgtcgggcctcgccaacctcacgtcgctcttcgccgcccaaggcctctcccaaaaggacatggtcgcgctctccggagctcacaccatcggccaagcacgctgcaccaacttcagagcccacgtgtacaacgacaccaacatcgacggcagcttcgcaagaacaaggcagtcaggctgccctagatcctcaggctcatcaggcgacaacaacctggcgccattggaccttcaaaccccgaccgtcttcgagaacaactactacaagaaccttgtctgcaagaaggggctcctgcactccgaccaggagctcttcaatggcggagccaccgacgcgctggtccagtcctacgccagtggccagagcgagttcttctcggactttgtgacgggcatggtgaagatgggtgacatcactccgttaactggctccggtgggcagattaggaagaactgcagaagggtcaattaa

SEQ ID NO: 120287 - DNA, 462 bp, Zea Mays
atgattttactttccagaccattgcatctctctcaggagcatatgcaacagaacccattgaagcagatgtccatgcatctaaaattttatagaagcggatgtggaggcagtcaaacagaggagaaggggacaaccgtctctatggtggtcatcagctgcccaccagggacaccacacacctggtacccttcaaacacgacaggattcaggttcgccctagcaggcgtgtatgacaagattcaagcgctcctcgatcatgacaccgctatcaactgcacgacccccaatgtggccctcatcggggagcgaggcagcgacgccgagtggcacctccaagaggaaagacgcattcctggacccaaacgtgaggcatgggaccccgctgtcggacacggtgatgacggagatctccgtgacgcgcgctctggagccgcctgtcttcgtcggagtcgttggagatga

SEQ ID NO: 120288 - DNA, 1895 bp, Zea Mays
ggttttctcacggtcacggcttgcttcgtctcccttccgtcgccgaccgagaaggagtgggaagaaatggattggaaaagctagggttttcgccatggccatcgcccacctccagctccccgttgtcgaatccattctccccacgctctcctcctagctgcggcatctcacatcgccgaaaaaaggggccttcgatagaaagattgagtctgacagacgtgagggttacaagcctcattactttgaagctaacaatcgtagtaataagacagtggagagcagggcaaagtactttggccgtatgacgggtggtttcttatcttcgtcaagagggtttggtggtggttccttctttggcagaagtatccaggcccctgcccctcaagttaacaaggttagtagacccatagttcctgcaactgaccagggcaatgcagccaaaagggatgtccaacatgcatccacacaagctgcagccaaatctacttcagctggggaaaccagaaattcatggactaattttaatcgaccggtcagcccaaatgtgcagccagcccctaccagctttaaaaagtcatggcatcagctgtttagtcgttcagcatcagtctccccttgtcctgatgctacaacttcagctcgtgatacgaatcagaagccagagccaaatggagcgcaactaagcaatgcttatacattcctctttcagtaccctcctcttgacagcaagccaagttcgagccagtccatgcaatttccaggttttccaccgcttaatggagcacctcccaataagccactacctcattttcctgctggacatatgccattctatgatgatgcagaatctgtggtatttgaagatccagaacagtttgaggacccatgctatgatcccgatgcaatcgcattgcttgggccagtttcagagtctttagataatttccctccagacttggattgtggattcatctcgagtgatgttgtcaaggaatcacatgggaggccttcaccaattgagtctcctctctctaggtctcgtatggttgaagaaaatcctatcaagcccctgcacttgttagttgcaaaaaggcctggtggtcctattcagcctgaggctagcagtgagcaacgcacatggcaaatgtggagcacaccattggttcatgaaagtttaggtctccaaggtcatcaaagtcagtggcttcaacagacaaatcaattaaactatagtgccaatgttttcaatggcagaacaaacgcccccctgggtactggtttgaatgacagtgatccttggctgcagaaagcacctttcaagcaattgccacctgatactccaagcctgttccttccacatgaaataccagggaaattacacaacgacttggtttttgggtctccaaacaaatcagcacgtgaacacccctttggatcacctggtccttcttggcccaaggaggaactgtcgttgagtggagcccaggaaggtggtggccatttttcattgctgtcgggcgcacatgttggcggcagcggagacttattttgctccacaagtcctgatgtgcagtccttggtgtggtctttcaacgaaaaggagacagcatagcagggacggactttgttgtggaaggaaatggaggatgtctgactgagccaaaacctccttgcctcctctgagtgtcacagggcggggttaatcggcgaggagataagtagtctccctccatgtcccttggcgcaaagaagatttgggggggggggggggggggcattttgtttagtatcgactcctctcacctgacctgttaccacgcgccatcttactttcacctgatgggtcgttgtatgaactctgggattcaatgaaaaatggggctgatttgtttcaa

SEQ ID NO: 120289 - DNA, 278 bp, Zea Mays
tttgttgagtttctggaacattgagcgagtactctgctactgttggccacacatgttgttctgctattgaatttttgcacggatggaatgagaattgggtcgccaaggacgagcaattctggcacatggctatgttggttgtctcagttgtcttttacaatgccacattctctttctcgggtccatctgaacatgactgtggactcaacctattttacattgtcttcacatcgattcttgttttttcatttgcaatcatttccctgcacccgaaggta

SEQ ID NO: 120290 - DNA, 417 bp, Zea Mays
ttagtgtccaataaactaggtgctggaaatccacatgcagcacacctatcaatttatgtttcagccttgcctccacatcaagaaattggaatgctttcactttcacctaccatgactgatgtatatttgttactgggagctagggcttattggctgctccgccgaggtcatgcaatggccctagtgggagctcgacgagatggacgacacactcacctacagaggggagctagggtgtgttgtgcatgcctgcgagctgtagagaagagggggcagtctggatctgaaccctcagcaaggtattacatccacccgctcccccacgccaacgtcctccagattttgcagctcctactagagaatggcattagagtaaatgaactaacaaggacagaggttgctctcgtcgtcccataa

SEQ ID NO: 120291 - DNA, 670 bp, Zea Mays
ctagatttggcccagcttgatacctgcaggatgccaatgctattataatctattgttggatgccataaatttaccattcatgtcttctgttttgtgcaacgataagattgattttaatgtatacggacaagatatttagatacaatcacacaattaaacttttagctctatctgtgggtcaagcttgcagctgtatgaagtttttttctgttgtattatgtctccatgactccatagagtgtcttttttcatgtttaataattacttaggttttattttaagaattcccacatcacacatttttattttgttttccctgttcctttttctcttcctttccattcaattaatgggatgtttgataccttacgattgcaccaacctgttcaattgtacttcagatatcatcttctttgattgtaatcttttgcatactcttgttgatggtgctaccatattcttgaaaccttccacattgtccatctgagcattcttctatctctggatttgtcccttaacaatcacttgctttgaggttccatttggatacacatgactagatccagtttaagattattgtatatcttttgttctagctatttctgttgtttttctttctatccatacattatcaatttgatgatcctgacgatgcccctgaggtgcatac

SEQ ID NO: 120292 - DNA, 786 bp, Zea Mays
gttccattacagtctacaacaacaacaaccaagtcattctcgtgaccaaaaattgcttcacctgctcccgtatgcatgatactcgggagattttccgggcagaagaggaaatcctgacaagtagtgcgttccttgctcacagctcactggtcacgcttgcttcctcctccgcgcgctccccatcgaccgcgcttgctcgtcctccgcctgccctggccctggccacgcaaccctagccatggcgagccctggtcctggccatagccgcgtggccgccgaatcggcgaggtcgcgctcgcccggtgaggctgcgggagctccaggccgcctgcgcccgcactggcctcgtcctcgtgttcgtgttttttttcccacgcaaattcgtcatatgaggaggaaaggatgaaagggggcaaattaatccatttcaaccaagttgtccttcaggtggagatgctatgtaatttaaacgggttttacggtggatcttaaatccactcatggagccaaatctagattcactttgcgtctgtttagttgcttgtatatgagagtcaggcctgtatggttggatacaaaataagtcattttgatgttattaacctgcattcacccatacgctcaaaattatggtatcttatggcagcctgctctcacgaacgtgcagccatcccatcagactgtttaagcgtgaatctgtctcaaacaacacgtgtatgcgagcaacattccctttcacaatagttctgcaaagtgggggtatgtcagcttttaagaaaaaaaata

SEQ ID NO: 120293 - DNA, 2393 bp, Zea Mays
gttccattacagtctacaacaacaacaaccaagtcattctcgtgaccaaaaattgcttcacctgctcccgtatgcatgatactcgggagattttccgggcagaagaggaaatcctgacaagtagtgcgttccttgctcacaggccctcgttgtgtcatgtaactgcaaatggctcgccaaactagcgttacagaagctgacctggagttcatgctaattgatgaaaatgcaaagccgaagcccctgccttattcacttctcgaaaagatcacaaatggtttctccggggcacatattattgggtatggtggatctgcagatgtttatgagggattcatcgggaatcacaaaatcgctgtgaagaggttgcgcataccatatcagcacgagaaggaattcagtcaagagattgaatgcctgatgaaggtgaagcacataaatgtcgttaggtttataggatattgttccgacacgcaagggcaggcggaaaagtatgaagataatcatgtcatggcagacagccaagaacggttaatttgttttgaatttctaccagcatgtcttgataaatacatcaaagatccatcatgttcacttgaatggagacagcgctatcaaataatcaacggagtttgtcagggcttacatcaacttcatgagcatgaaattcttcacttggatctgaatccgagaaatatacttctagacgatgacatggtcccaaagatttctgattttggcatctccaagtgcttgaaaaaaaaccaaggccacttttatactgaaactataagtggaacaccgatatatatgtcaccggaacggggcaaacatggtccaatcacaacgaagtctgatttgtttagtcttggtgtcacagttatcgagataatgacagggaacaaggagaacattgatcaagccactgttgaagatgtatttgctagctgcatcaaaattttcaatgataaatcattgacagctgcacaagtgcggcagataatggtatgtgctgagatagggattaagtgccgcaacagtgaaccagacaagagaccatcaaatacaaaggaaataatcgataagcttgaagaggaagcaaggacagaggaatctcaagagtctggcaagctacttaaggtcctaccaaccctactcctgtttgatttgcatcccgggaaattgatcccatgctcactgcagctaacaaacgacacggatgaacacatggcatataagcttagtataacagagagtgtggactggtcaaagtacttcacgaccaagctgccgctatatggcattgtgcaggcgcgatccacttacactgtcattctgacagtgttgttggagtgtgatgctccggtcattaacagatcttgttatatgaccctgcagagctgtacactggcatatgagtacatctggaagttcaataacacacttgagtttgaggattttcttgaggttaagaaaacagagaatgcggtgaaggaagtgaaactgaaagcatttttgtgtgaggaaggacgatcaatttctaagcaaacgaggccgcgcgtcaagctcttgtccatagtgaaaccacaaacacctctgttgtcattggatgcacacccgaccaagccctgggtcataactggtcatgcctttggacatgttcgcatttggaaccatgagacacagaagctactgtattcgtttaaactatctctgggaccagtttattctgtcaaatttattgcacggaagcaatggttcgtctccagctctgcagaaggcctcatacatgtctacagtatggaaacaaaaatgcagaaggtcaagagttacagagctcatgacggcgtcagcatatcgctggccgtgcatccaaccctaccatatgtgctgtcatggccttgttcgggcccccacgagaagaagctatggaactgggaaaagggatgggactgcacacaaacatttgagagggagtacgttgcaaggaattttgtatgtcaagttgcttttgacccaaaggagaccaacagatttgctagcgcttcgaactatagggttaaggtttggagcgttgatcttcccaaatgtaactataatctgcctggtttttttaacgaagtgaacttcctggaattcttcacacgtgatgatcaacagtatttgattattactgtctctcatgataagactgcaaaaatatgggacatgcggaacaagaaatatgtttatgatagtatggaacaaaatttgatgtctcccgtgtcttctgtcttctcacatcccaatctgccgatactacttacacgttcaattgatggcacttctcatttctggagtcccaaagatttcagataaatagaagattgaagcgaaataggccgtaaacgtac

SEQ ID NO: 120294 - DNA, 105 bp, Zea Mays
accctactattgaacgcccataaactatacatatgtttcaaaacaggaatggaactaattaataagaccttgtatattacaataagaacattcttgttcatcaag

SEQ ID NO: 120295 - DNA, 1534 bp, Zea Mays
cctcccgtatgacaacattggtgagaaatttcttctctcgcatcacaggataatgatggctcaaggagattaccaaattcgtatatggaactataagacacgggcaattacttcggctaaatttataatgcacaagcaatggattctggcgggctgttctagtggacttgtctatgtgtaccgttatgaaccagaaaagaaaaaatcagtagagaaaatccgagttctacaaggacactcaaatgctatcaattccttggctgttcattcaactaagccatgcgtgctgtcagcatccaaagatggcaaaattttgatctgggactatgaaaatgagtgggagttaatgaaaacatttgatgtcaaaagtcctgtgcagcatgttgcgtttagcccaaaggactccaatatgttcgccagtgcccaggacaaaacagtaaagatatgggattggcattctggtaactgcaagtctacattgtctgggcattcagatttggtgttatgtctggattacttcagtcagggtgatcagctatacttgatcactggttcacgagacaaaactgccaagatatgggattgcaagacgaggagttgtgttcggacattggaagggcatacagatgttgttaatgttgcatgttgccatccagatcttctaatactaattacaggttcattgaacgggtcagttcgtctgtgggatttgaatcgctcaactacgttccgatatgagctcatatttgaccttggagaagtatatgctatagcaagtttgaagggtacaaggattgtgattggacacgaaataggattagcactggtagacatagacctagagggcaagaaggatggatatgtgaagagcaatgtcgcaattatggattcaaaaaatgacacagatcaaaatatgaaagagacgcagttgggtgaactacagtccatcggagacaccgcaaaggtcactaatccaacgccttcaagttatccagctaccgaaccaaggtctactcctttgaccaagaccgacatggtgaggttcagtgaccgcttggagcgcccgacagagtcattcgctgttgttgcatcctcttgggatatgcacagcgagttggctaggctcaacacccactcgacgtgggcctggcttggaggcgttcgaccagggacgagtactaacacggtgagcagggccttctgctctaggttcgggatgcaggaggaagacataaaggtggtgcagcattaccctaaagatttcttcatcaccttcgagcaccagcaccaccgggacgccgatgtggcgcgacgcgacttcacctatagcaacatcgacatttgcgtcagaccgtggcagctccccgtccatggtgaccacatcgacttcggcttccatgttcgcctctatctggaaggtattcccctgtacgcgtggaatgaggtcatcgccaagcaggcagtggctaagtgttgtgtgcttgactacgttgaggctttagtccctgatgaaggaggatacgaggacccttaa

SEQ ID NO: 120296 - DNA, 2125 bp, Zea Mays
atggatggtcattacatccgacaaatatgttcatatatgggactaccatacaaggtcagattggctaaatttatagcccgcaagcaatgggttattgcgggtgctactagtggattcatcttcgtctatgattatgactcaaaaaaggaaataatacacgttttgtgtaaccacacagaacccatcaagtctttggctattcacggaactgagccccttgtgctgtcagcatccgtggatggcaaaattttgctgtgggactatgcaaatgactggcatttgattaaaacatttgatgcgagaagtcaacgtttggtgcaagtcgcgtttaatccaaaggacaccaatatgtttgctagtgctcagggcaaaacagtaaagatttgggatcgccagcatgatgaatgccaatacaaattagatgggcattcacatcagatcgagtgttttgattactttagtggtggtgattttgataagctatatatagtcaccggctctcaagataaaactgccaagatctgggactgcgagaatgcgggctgtgtccagacactggaaggacatgcaggtcccgttagagctgtctgttaccatcagaatctctcgttattaattacagggtgctctgacggatcaattcatctatggaactccactaccttcaggcttgagcataaactgaactttgctgacttcggattactgagttctgtagcttgtttgaaaggatcgaaaaggattgcaatcagaagcagggaaggattagcacttgtagacatagacatagaggacaagaaggatagcgatgtggagagcatcacgactactgcttccatgaacgacacaggtccaattacagaagagaacggagtggcagcagaccatatctctgatgaccacctggcgcagggcgtagtatatgtacatacagagattataggcaaagtcaattcagcatgcaccatagacgtccatccgacaaagccatggatggtcatcactcaagctaacaagtttgttcatgtttgggactaccatacaaaggtagtggaatggacgattcagattaagggagcgaaagttagttcagctaaatttatagccagccaggattggattgtggcgggtactacccgtggattcctccacgtgtacgattgcgaatcgaggaaggaaatacgccgtctttgtgaacacccgaaatctatcacgtcattggctgttgacgatgatgcccttgagctggtgctgtcagcgtccatcgatggcaagattttgatctggagctactggcactactatcacgcacgtagacgtagtacctggcatttggaaaaaacatttgacgcgggaagccagtgtctgaagcaagtcgcgtttattgctccaagtgtccatcgcagcagcagcactatcatcgctactgctcgagacggaacagtaaagatttgggatcccgatcgttctgacggatgccgtgagttcacattggctgcggattcaggtcagattgttgaatgtttcgattggtttagtcgtggtactgatatatacttggtcaccggttctcgagacaacactgccaagatctgggacatagaggatgggagttgtgtccgaacactggaaggacacgcagatcatgttaccgttgtctgttaccatccggatctttcaatgctcattacaggttcaagggacggctcgattcgtctgtggaactccactaccttcaggtttgagcatgagctgaactttgacctcgggtctctgagttctttagcttgtatcaagggatcaacaaggattgcaatcggatatgaaagaggtctagtactggcagacatttgcactcaggaacatagagcatgatctataaagcggcataataccttgagagcgacagaataaaatctaaacattgataaagcggcaaaaatccctggcaaacatttgctgatgcgatgggattgcatccaaacatttttcttggtaagctaatagactgcaataagtttttccatggacttgggaggtgtcgatctgcggatatgcttttgtatggtttaaacatatcatcggatagaaatttatactactatattaaaaatttaatatggac

SEQ ID NO: 120297 - DNA, 231 bp, Zea Mays
cttaaaatatagtcgcatcggacgcatatgcacatgttaattacttgtgtcgtattcttccaggtttgagcatgagctgaactttgacctcgggtctctgagttctttagcttgtatcaagggatcaacaaggattgcaatcggatatgaaagaggtctagtactggcagacatttgcactcaggaacatagagcatgatctataaagcggcataataccttgagagcgac

SEQ ID NO: 120298 - DNA, 1771 bp, Zea Mays
gaatcagctcccacccaacgaggcccgcgcgcttcccaccccccaaccacttgttggcgatggcttcccgaggaaatgggccggaccgccagaggtagaagctgtccgaaccaccccgtacagatgagatgagatgagatgagtttgggctgttcgcctgtggctgcctttgttccgtctgtgtctgtctatgatgggacgggacacctagggttcggataccggcaccggctcaactgacgacggactatcgccagtggcgatcaccctccctgtcccctgaccgcggcgtcccctgctcgcgccgcaccggtggcgacaaggcaccccttgcctgctcccctagacgcgagcgagcgagccaacacctgtcggcacaagaatggatgggaatgctgagacgatccaattctcatggggcaagcgtcgagggaaaggtggtgctaagatggatacacagttctttgggtccttcacattggacaatgtgaagtattcactgtttgactgtgtctatctatttaagcatggtgatcctgaaccgtacattggaaaaatagtgaagatctgggagaaagataatgataaaaaagtaaaaattctttggtttttccaccctgatgaggttcagaactatttaagtggccctgtgatgggaaaggagatttttcttgcctgtggtgaaggtgctgggcttgcagatatcaacccgctggaagctgtcgctggaaaatgcactgttatatgtacttcaaaggataagaggaatcgtcaaccatcccctcaggaactacaaattgctgattatatcttctatagggtctttgatgttaaaagtctaacactttctgatcagttaccagataaaattgctgcatttacagttgatcttcttctgaatccaaaagatgagctagtcatacctgcaaatgttctggtgaatccaaatgtggatgagggtatggttgccacagttcctacacccccttcagcagttaaattggaggatcgaagtcaggctgctgcacttccccttacgcagacaggccaggtggatgaaaatctgcctgccacagttccccttccaaaaccttcagcgaatcttgttgggcacctctcctcatatgttaagattggtcaaaagcagcgcgacgagcagaagaaggctgtagcaacctcgcattgttcccagcccaacacgatcgagtacgacttggccttggactggatgcttcttcgggaaaagcaagaccagagcttcagagtacttcacaagaagcacagagaagccaggaaagggttcgcaagcctggtcggcaaaggatccaaggcagagtagcaggccggttgcccggttccaacctttcagagcttggcgcggtatgactgccgactggcaggaagagagggtcgtgcgcgcagaggttctctttttgcagtagccatcgagtagttcgttgggtcaattcgtgttaatttctgttaggaaaggaaaaatgtgttaataagtgttaggatagaaaatgcacgtcagctttgacaggtcagagcagcctaggtaggcatcaatatgttgctgcgactgcgatgttttaatttgacttggaacctcttatgttgggcgacaagtttgccctatgggggagagagacactgtttcgtctctgttaccatctcatctgatttcactttcagtcaatctcgtccatatcgttctacagattaggttggatcaaacaattgacaccaggcacaattttcttttacataa

SEQ ID NO: 120299 - DNA, 2246 bp, Zea Mays
ttcccgaggaaatgggccggaccgccagaggtagaagctgtccgaaccaccccgtacagatgagatgagatgagatgagtttgggctgttcgcctgtggctgcctttgttccgtctgtgtctgtctatgatgggacgggacacctagggttcggataccggcaccggctcaactgacgacggactatcgccagtggcgatcaccctccctgtcccctgaccgcggcgtcccctgctcgcgccgcaccggtggcgacaaggcaccccttgcctgctcccctagacgcgagcgagcgagccaacacctgtcggcacaagaatggatgggaatgctgagacgatccaattctcatggggcaagcgtcgagggaaaggtggtgctaagatggatacacagttctttgggtccttcacattggacaatgtgaagtattcactgtttgactgtgtctatctatttaagcatggtgatcctgaaccgtacattggaaaaatagtgaagatctgggagaaagataatgataaaaaagtaaaaattctttggtttttccaccctgatgaggttcagaactatttaagtggccctgtgatgggaaaggagatttttcttgcctgtggtgaaggtgctgggcttgcagatatcaacccgctggaagctgtcgctggaaaatgcactgttatatgtacttcaaaggataagaggaatcgtcaaccatcccctcaggaactacaaattgctgattatatcttctatagggtctttgatgttaaaagtctaacactttctgatcagttaccagataaaattgctgcatttacagttgatcttcttctgaatccaaaagatgagctagtcatacctgcaaatgttctggtgaatccaaatgtggatgagggtatggttgccacagttcctacacccccttcagcagttaaattggaggatcgaagtcaggctgctgcacttccccttacgcagacaggccaggtggatgaaaatctgcctgccacagttccccttccccaatcagaggtcaaggaggaacagaaaccagtcattgccattcccatttcccagactgtggtcaagaaagaggataagaaatcactttctgacattcccctttcccattcagcagtcaaggaggatgagacaccagttgcttcaattggccctccacagtctgcagttatggagaacattcccaaacatacacagttacaggatgctcatgctggggagaggccaccaaaaaagttgaaattatcccaagaaactacagagcaggacatagatccaacgaatactgaacaaagacctttggagctacagccaaagaatattgacagaagcaaatggtttaacattgaatggaatgacagactaaagatggctgatgataaggggacacttgtctatattcaaaatctcgatattcggtttggacctgctgacatagagttcgtaaagcattacagctaaattgtactgcgaagcccattaaccaccccacatatgatgatccaaacaatggcaaagcatatgctatattcagaactaaagatgctgctgatgctgccatttcaaaaatcaattctggtttggttgttggtggaaggcccctgtactgcagcaaagggttacttgaggttccaaaaccttcagcgaatcttgttgggcacctctcctcatatgttaagattggtcaaaagcagcgcgacgagcagaagaaggctgtagcaacctcgcattgttcccagcccaacacgatcgagtacgacttggccttggactggatgcttcttcgggaaaagcaagaccagagcttcagagtacttcacaagaagcacagagaagccaggaaagggttcgcaagcctggtcggcaaaggatccaaggcagagtagcaggccggttgcccggttccaacctttcagagcttggcgcggtatgactgccgactggcaggaagagagggtcgtgcgcgcagaggttctctttttgcagtagccatcgagtagttcgttgggtcaattcgtgttaatttctgttaggaaaggaaaaatgtgttaataagtgttaggatagaaaatgcacgtcagctttgacaggtcagagcagcctaggtaggcatcaatatgttgctgcgactgcgatgttttaatttgacttggaacctcttatgttgggcgacaagtttgccctatgggggagagagacactgtttcgtctctgttaccatctca

SEQ ID NO: 120300 - DNA, 2808 bp, Zea Mays
ctgtgtctgtctatgatgggacgggacacctagggttcggataccggcaccggctcaactgacgacggactatcgccagtggcgatcaccctccctgtcccctgaccgcggcgtcccctgctcgcgccgcaccggtggcgacaaggcaccccttgcctgctcccctagacgcgagcgagcgagccaacacctgtcggcacaagaatggatgggaatgctgagacgatccaattctcatggggcaagcgtcgagggaaaggtggtgctaagatggatacacagttctttgggtccttcacattggacaatgtgaagtattcactgtttgactgtgtctatctatttaagcatggtgatcctgaaccgtacattggaaaaatagtgaagatctgggagaaagataatgataaaaaagtaaaaattctttggtttttccaccctgatgaggttcagaactatttaagtggccctgtgatgggaaaggagatttttcttgcctgtggtgaaggtgctgggcttgcagatatcaacccgctggaagctgtcgctggaaaatgcactgttatatgtacttcaaaggataagaggaatcgtcaaccatcccctcaggaactacaaattgctgattatatcttctatagggtctttgatgttaaaagtctaacactttctgatcagttaccagataaaattgctgcatttacagttgatcttcttctgaatccaaaagatgagctagtcatacctgcaaatgttctggtgaatccaaatgtggatgagggtatggttgccacagttcctacacccccttcagcagttaaattggaggatcgaagtcaggctgctgcacttccccttacgcagacaggccaggtggatgaaaatctgcctgccacagttccccttccccaatcagaggtcaaggaggaacagaaaccagtcattgccattcccatttcccagactgtggtcaagaaagaggataagaaatcactttctgacattcccctttcccattcagcagtcaaggaggatgagacaccagttgcttcaattggccctccacagtctgcagttatggagaacattcccaaacatacacagttacaggatgctcatgctggggagaggccaccaaaaaagttgaaattatcccaagaaactacagagcaggacatagatccaacgaatactgaacaaagacctttggagctacagccaaagaatattgacagaagcaaatggtttaacattgaatggaatgacagactaaagatggctgatgataaggggacacttgtctatattcaaaatctcgatattcggtttggacctgctgacatagaggagttagttcgtaaagcattacagctaaattgtactgcgaagcccattaaccaccccacatatgatgatccaaacaatggcaaagcatatgctatattcagaactaaagatgctgctgatgctgccatttcaaaaatcaattctggtttggttgttggtggaaggcccctgtactgcagcaaagggttacttgaggttccaaaaccttcagcgaatcttgttgggcacctctcctcatatgttaagattggtcaaaagcagcgcgacgagcagaagaaggctgtagcaacctcgcattgttcccagcccaacacgatcgagtacgacttggccttggactggatgcttcttcgggaaaagcaagaccagagcttcagagtacttcacaagaagcacagagaagccaggaaagggttcgcaagcctggtcggcaaaggatccaaggcagagtagcaggccggttgcccggttccaacctttcagagcttggcgcggtatgactgccgactggcaggaagagagggtcgtgcgcgcagaggttctctttttgcagtagccatcgagtagttcgttgggtcaattcgtgttaatttctgttaggaaaggaaaaatgtgttaataagtgttaggatagaaaatgcacgtcagctttgacaggtcagagcagcctaggtaggcatcaatatgttgctgcgactgcgatgttttaatttgacttggaacctcttatgttgggcgacaagtttgccctatgggggagagagacactgtttcgtctctgttaccatctcatctgatttcactttcagtcaatctcgtccatatcgttctacagattaggttggatcaaacaattgacaccaggcacaattttcttttacataagtataagataagggctgatttggtgatcaaggatcacggaagattgttagggattgaggaggaaattagtttatttccctatcaatcctcccgtgatcctttgtcactaaaatcaaccctaagagctagattggaggagctaaaatctcatctttattcaattttaaataagaagaggattttagccctgcaatccccataagggactcagattcttttaccactgatcatggaccacatacacaactgagcaacacagagccccgtttgccatctcctttattggcaccgaaataaaagacggcaattattgctaaacaagaccatgtcatggtacaacctaacacagacaccaaatgttcaaggactttgcgtgctagacacaagattgttacgaatatgcacatctaattctggtgtattatataagctagaccaagcctccgtctcctctcatcaagtctgcatgcatcctcacatctcaatatggtgcgcgtggctctggacatctccttggctgtccagaggcatgtactgggccatgatggcgcggatctccgagtccatgtacctctg

SEQ ID NO: 120301 - DNA, 396 bp, Zea Mays
atgtacatggagttcacatcagaacccggactgatggtgggggcgcctgcgtgcgagttggagaagccctccatcagcgtgcctgtgccgactcctgctccagcggccgctccggcgacgggcaggcagtggaggccatccggggacgtggccaccgtgggatcgaacaccgccaacatctcatcgtcgtccgatgtgaccaatccgtctctcccctcctcgctttatgtgtgcttccctattgcgggactcgcagacgggagtgccctggacgacgcggtgaagagggtggactcatcgtcccaactggagatggcgctcctgtgtgagccttcggcggaggggatcagcaaacttggggcgacagcggaccgagggggcagaggcgggagctga

SEQ ID NO: 120302 - DNA, 918 bp, Zea Mays
atgaacatccttgaatcttccgatcttggcggctacaaagaggtgaaggtgatggatgaaattgagcaccaaagggctctcatggtggacctacacgaccttgtgctaccgatacttgatccctgcagcgggcaagcgaagctcgtgcagcaactcttcgaagaagtattcagctgctccggtaagatcatctcctcactacaacctggtcgtaacgacagagagaaacaggccattcttatcaaatgtaaaagaaaaggatgtatgggaaacgtggagaataatcgcgtatcggaggagaacgacggcggcggcggcaagggccgtggaaacaggagaaggaagaatgcaaaacacgtagtgagttcagttgtgacacaagcaccaaactttgatgggtatcagtggagaaagtacgggcagaagtggatctccaaagcaaagcattctaggtacgaccccaataatgcaaaaaaaaggggtctgatgcatgaggttattatgtctaacaggagttactatagatgtgcctacagcaaagagctagggtgccctgcaactaagacagtgcagcagaaggaaggtggtggaaactacggaacggtgaggttgttcgacgttgactactacggccagcacatttgcaacagccatggccgcatagttcatccaaatgtcgtcgttgatgagccagcaacgcatgacgacggcggcgtgccaattgtcaaccaaagcagcagcagctcgacgtcgtatgcccatggagttcaggatgagagctttggggacttgttcatggtgcctgacatgccggaatacctgacagagctcacagatgttgaaatggcgaatgcgtttgggtttaccgcctcgatgaactcgccactactggtctctgaagatatattatgggcatga

SEQ ID NO: 120303 - DNA, 883 bp, Zea Mays
agatgtcattctatatcaataatgcaatatacttgtgcttcagctaattcgttcattttgacaataggtgtaacagactattctgttactggcagcaagtcaaaaggaatactggcggctcagacaagcaaatctacagatatgctccatcttcagaccccaaccatcactccaccaaagtcctcgttcaacttcaagcccagcacctccattcttgattcacagatcgatgtgctcaaggccagcccaaaaccactctccatagaaccccatttcagctccagctcgaaggaggacgactcctccagcctcgagaccattgtgaagtgcaaggaagccaaggcaaaactgttccagaaactggccgatgatgccctgaaggaagtagacagctaccggcagatcgtgcgcgccaagacccataaactggaggaggagtacgccgcgaaggtcgcgaagctgtgcttccaggagacggaggagaagaggaggaagaaagtcgaagagctgaaggtgcggatgaagctgcggatgcagaccgagatccagggcttgcttgagcggatggaagccacaaagaagatgtgggtataggctccggttaacaattgcatgttgctgctgcttaatttcttcgggtatagactccagctaacaactgtctgccgctgccgccgttgctgaatacctgagatttggtgttgtccattagaagagtttgcccattgttatgtttcttaccatcttgtgttacaatctacctgctgcctgctgttgtaacttgtaagtggatgcctagccttgcgcttgcttatataacttgccagcattcagttagtggtttgccagtttgtgctgctatatcattgcagatattttttat

SEQ ID NO: 120304 - DNA, 254 bp, Zea Mays
ggcttttggacagcaagaaacgattgcgtctcctccaacaatgttaagtcaggagacttttggaaaagaaatcgacttgctgacttgtagggcaaagtccaaatttttcagacttacttgatttatatgaacccagaacctgttgtgattttcatttgctcctcttgtgactcctgttcgtttcgctacctttggttagcacatttttcctgtagaggcccaggcccctccagtttcgtcaaaccaaaaaaaaa

SEQ ID NO: 120305 - DNA, 1060 bp, Zea Mays
gcaactaacatgtggctgtatatatatgtacacacgcatagacgcgatcttagtacaacgcgcgactccatacaacaatacaaacaaagctgtaacgtactgtaaaagtaagatatggaggccgccggcggcggcggcgaggttcacaaggctagcaacgacaaggaggagcatttcgtgctcgtgcacggcgccggccacggcgcctggtgctggttcaagctggcgtgcctgctccggggctccggccgccaccgcgtctcctgcgtcgacctcgccggggccgccggcagcctcgtcgacccggacgacgtccgctcgttcgacgagtacgacgcgccgctcctcgacttgatggccgccttgccggacgacggccgcaaggtggttctggtagggcatagcgcaggaggactgagcgtcacccacgcgatgcatctgttcagagacaagatcaagcaggccatcttcgtagcagcgaccatgctcccgttcgggtaccagtcggagcaagatatcaaagatggagcacctgatctatccgagttcggcgacgacgtttacgacctcaagttcagtctgggagacgaccgccctccgacgagcgtggcgctgagagaggagcaccagcgcgcgatcctgtaccagcaatgcacccacgaggactccacgctcgcatccattctgctgcgcccgtggccggcagctctgggcgccgccaggttcggcttcggccgcgccgacgacggcgccgtgaacactgtgcgtcgggtgtacgtgaagacggccaacgaccgcatgctgaagccggagcagcaggaggcgatggtccgccggtggccgccgagcgaggtggcggcgatggacaccgaccacagccctttcttctccgccccagagcgcctcttcgagctgatcatcaagtcattgtgaatctctcatctgtagtaatcgcttgtgttcttccagactccagtgcctggtgctgtcctgtatgccatgccaaccaataagttatcatttatttatcaataaattatctcaaccaagttatcattta

SEQ ID NO: 120306 - DNA, 1053 bp, Zea Mays
aatttggactggcgaagaaaatgcaggcccccctgctgctgctgcacgtccgtcaaatagattggtagggagcccagagggtgatgggaatggcgaaggagcagcacttcgtgcttgttcatggcgaagggcatggggcctggtgctggttcaagctccgctggctcctcgagggcgctggccaccgtgtcacgtgcgttgacctggccggaggcggcgtcgatcctaccgaccccaacaccatccggtccttcaagcagtacgacaagccgctcatagacctcatctccaacttgccagacggagagaaggtgattctgatcggacatggcgctggagggctgagtgtgatccatgcaatgcatgaatttgttgacaggatcggtcaagcatttttcgtggccgccacaatgctgccgtttggatttcaagccgatgaagataagaacgatgggttaccgactttgcccgagaacgagattgagttgacacttggtgcaggagcagatgatcctccaacaaccattgccttgaggccagaattccagcgtgatcgactatcacaacaaagccctgaagaggaatcagtacttgcttcaatgctgatgcgtccgtggcctgcaacagctatcagtacagcaagcttcgaaggagatgatgagagattgaaccgaatcaaacgaactttcataaagatggagcgcgaccacatgctggatcctcaacagcaagactccatgatcaaaaagtggccacccagtgaggttttggtcatagatacagatcacagccccttcttctctgcaccagaacagctgttcaatttaatagtcaaatctctatgatgacaaatgcagaaagctactgactggggttgcccaaattcttgtaacactacccacaaacaataatcaccacaagatttaggacctcagatttgtcaaacatgcttctcaatgaatcttcctggcatatccgcatatctacaaatatggtttaatggtgcaagattgcaagtaaaagatcgcttagcgcaaacacttaaattcagtt

SEQ ID NO: 120307 - DNA, 1580 bp, Zea Mays
cagctcccaggcaagaatcgtagggtcatccatgtaggcgacatttgtgattgtattttttctcatcaaaacagcctaagatatgaaagaacaatgtatgcaattgtgatggtatctggtaagacatggcagaagggcgatcaaacaaaataagtgccataaaaaacagctgttgttaagaattcagatcccaacgctatgaatataccaacactcgcttctccatcttgtgaatgtggcatcagggaagaaggcgtcatcagaagtatgatccaggccagcctcctttccccaccttggcatgctgtgccttacctccataatcttaccagctattacacagtgacagtatcagcctcatcttatagtttcctgcctcgctgatcacaaaatctaatgcctataacaagggaaaaaaaggaattctaagcttagctgtcacttaattagtaaatagcgagtctctgtttgagagatacaggcaatgtagtactacaaactacaaacgctggacgataacaataataaatgatgtgaagacgcgcgcggatgcaccaagcatttcaccaaacaagcgccgcggatgctacagaatcgcgacgcgcgcgcacatagaagacctcctcgtcgtaggagaagtgcttgagctgcagcgcgcggtacccgccgtcgttgaaggcccaggtgcagcacacattgaggtccgcgcgggcggcgtccactagagcagcggtgaacgcggcgcgcgtggcggcgtccgccgcgaaatgagtcgtgcacgaagaagggccgccccgacgctcacaggtgcgggccccggcgctccaccgccgcccactcgccctcgtcggcacccagcagcatggcggaggggatgcagcaggaggccgcgaggaggacgcggcggaggagagacacccgcggcgtcgctcggcctcggagcggcggccgcggtggcgccgccaagcgaggacacgtcgggctgttccactcccacgccgattggtgggtccggtcaggcgggtcaacgcccgccccggcggcgggcatctggaggcttgctcttgtttggaggctgacacgtgggggccacaacacagcggcagaaataatcccgaccggaccaagcgcccaacaactgccgccccaagccaagggaagggaaaaggctatcgttctcgtcagtcgtcacgagagccgcgacggcgcgcatggcggcgacggcagcggcgctccggtgctgcttccccggatcctccggtgtcggtagtggcttcgtcaagcccaactcctccaggcgaggctggtgcgcagcggccgtggcggcgccgtcgcgggaggcggaaccggtttcgtcgctggggcaccgcacccgcgtcgacttccccatccttcaccaggaatttgatgatgccaaattagtttacttcgacaatggtgcaacatcgcagaaaccatgtagtgtgatgaaaacattagatgagtactaccgatcgtacaattcgaatgttcatcgtggtatccatgcactcaggtagtatattcaattttatgttatttatccatgaagtgtgtctaaa

SEQ ID NO: 120308 - DNA, 1766 bp, Zea Mays
gaggcttgctcttgtttggaggctgacacgtgggggccacaacacagcggcagaaataatcccgaccggaccaagcgcccaacaactgccgccccaagccaagggaagggaaaaggctatcgttctcgtcagtcgtcacgagagccgcgacggcgcgcatggcggcgacggcagcggcgctccggtgctgcttccccggatcctccggtgtcggtagtggcttcgtcaagcccaactcctccaggcgaggctggtgcgcagcggccgtggcggcgccgtcgcgggaggcggaaccggtttcgtcgctggggcaccgcacccgcgtcgacttccccatccttcaccaggaatttgatgatgccaaattagtttacttcgacaatggtgcaacatcgcagaaaccatgtagtgtgatgaaaacattagatgagtactaccgatcgtacaattcgaatgttcatcgtggtatccatgcactcagtgcgaaggctactcatgcatatgaggatgcaagaagaaaagttgcaaattttgtcaacgcagctgatagcagagagattgttttcactcgtaatgctactgaagctattaatctggtagcctattcatggggactatctaacttgaaagaaggagatgaaattgttcttacagttgcagagcatcatagtgctattgttccatggcaatttgtttcccagaagactggtgccaccttaaaatatgttggattgactaaagaaaatgtcccagacattgagcagttaaaagggtttctgtcgaacaagacaaagatagttgttgttcatcatgtctcaaatgttctaggttccatgcttcctatcgaggagattgtaacatggtcaaacagagttggagctaaagtccttgtagatgcttgccaaagtgttccccatatgccagttgatgttcagaaacttggcgcggactttcttgtcgcatcctctcataagatgtgtggccctacaggcgtcggatttttgcatggtaaatttgagattttgtcgtctatggagcctttcttaggtggtggtgaaatgattgcggatgtattcgaagacaaatccacatatgctgagcctccctctagatttgaggctggaactcctgcaattggagaagctataggactgggagcagccatcgactatttatcatgcattggcatggagcagatccacgaatatgagaaagagctggggacatacctctacgaaagccttctctctgttccaaatgtccagatatatggcccggcgccttcccagactgtccaccgtgctccgttgtgctccttcaatatcgagaacgtccatcctacagatatcgcagagattcttgatctgcagcatagcgtagcgattcggtcggggcatcactgcgcgcagatcttgcataggacccttggcatcaacgcaagtgctcgtgcgagtcttcacttctacaacacaaaagacgaggtggataccttcgtcgacgcgcttaaagccaccgttgatttcctcacggatcgatactagtgcggttcagttcagttcccttttttttttgccagtttcatcgctctctcgtttgaactgttgtatgcacacacaaaaaagtatgcatatatatttggtataaagaaaacatacaaagtgtacggcttggcaaagtgagctcccttatttggagttttggactgtactcccttatttggcggttgttgttgaattaaacgtagttcaggatgcagagagtacaaa

SEQ ID NO: 120309 - DNA, 1759 bp, Zea Mays
gaggcttgctcttgtttggaggctgacacgtgggggccacaacacagcggcagaaataatcccgaccggaccaagcgcccaacaactgccgccccaagccaagggaagggaaaaggctatcgttctcgtcagtcgtcacgagagccgcgacggcgcgcatggcggcgacggcagcggcgctccggtgctgcttccccggatcctccggtgtcggtagtggcttcgtcaagcccaactcctccaggcgaggctggtgcgcagcggccgtggcggcgccgtcgcgggaggcggaaccggtttcgtcgctggggcaccgcacccgcgtcgacttccccatccttcaccaggaatttgatgatgccaaattagtttacttcgacaatggtgcaacatcgcagaaaccatgtagtgtgatgaaaacattagatgagtactaccgatcgtacaattcgaatgttcatcgtggtatccatgcactcaggctactcatgcatatgaggatgcaagaagaaaagttgcaaattttgtcaacgcagctgatagcagagagattgttttcactcgtaatgctactgaagctattaatctggtagcctattcatggggactatctaacttgaaagaaggagatgaaattgttcttacagttgcagagcatcatagtgctattgttccatggcaatttgtttcccagaagactggtgccaccttaaaatatgttggattgactaaagaaaatgtcccagacattgagcagttaaaagggtttctgtcgaacaagacaaagatagttgttgttcatcatgtctcaaatgttctaggttccatgcttcctatcgaggagattgtaacatggtcaaacagagttggagctaaagtccttgtagatgcttgccaaagtgttccccatatgccagttgatgttcagaaacttggcgcggactttcttgtcgcatcctctcataagatgtgtggccctacaggcgtcggatttttgcatggtaaatttgagattttgtcgtctatggagcctttcttaggtggtggtgaaatgattgcggatgtattcgaagacaaatccacatatgctgagcctccctctagatttgaggctggaactcctgcaattggagaagctataggactgggagcagccatcgactatttatcatgcattggcatggagcagatccacgaatatgagaaagagctggggacatacctctacgaaagccttctctctgttccaaatgtccagatatatggcccggcgccttcccagactgtccaccgtgctccgttgtgctccttcaatatcgagaacgtccatcctacagatatcgcagagattcttgatctgcagcatagcgtagcgattcggtcggggcatcactgcgcgcagatcttgcataggacccttggcatcaacgcaagtgctcgtgcgagtcttcacttctacaacacaaaagacgaggtggataccttcgtcgacgcgcttaaagccaccgttgatttcctcacggatcgatactagtgcggttcagttcagttcccttttttttttgccagtttcatcgctctctcgtttgaactgttgtatgcacacacaaaaaagtatgcatatatatttggtataaagaaaacatacaaagtgtacggcttggcaaagtgagctcccttatttggagttttggactgtactcccttatttggcggttgttgttgaattaaacgtagttcaggatgcagagagtacaaa

SEQ ID NO: 120310 - DNA, 2154 bp, Zea Mays
acacgatcgatcgggccaggcccgcattctatgggatccgtctctccactctcttctctaccgaacacaatctcatccgtcttcctcttccccatcagccgccctaccgagtcttcgcacgcacgacgcttcgtcaggatcgattcgcgagacctctcctgtccggatcgaggttcatggtttacatatgcgcgtttgtttactgatgcataccacgaccacctgatccggatgtcaggacagatctcctgctttaatcgagtccagttcatgtatgaactctcccttttcctggcacgttgctagatgtaaaagggtgttccgggatttaagagaaccacccacgcatccatgtctgaccagcaaaggcactacggcagctacgagctcctcccggctcacccagatttgcggtgcctggtctgcacgcggccgttcactcttgacgccgaggtcaccgacagcttggaagctttagccatatgcagggagtgcaagacgacggtgcttagtgacagcaacagggacgacactccccgagccaaccgacagagaagatggcgaaggcagcaaagctccatcaggggggtctcggtgttctcgcagctgatcaacctagctagacaacagggtcatgaggcggacactgattctccgacggttccccgccgccacacatcctatagttctacgccgagccggtcccagagggggcacacttccgacgacgagagcgatggtctgagctacgccgattccgtgtttggtgagatcgagtcgaacatcagttttggtgatgagggtggggaatctgacacttctcttgatcgccacaccatggttgggagggaaattggcatacagcttgacaatgagagctacatgaacacagatacagatattgatcctatgaatgctggagtataccagtgggactcagacgatcctgaagacgatgaagatgaggagtcagaggagtctggtttggatgaaggagatgacaccatgcaggagcgccggcagcagtggcatgatatcgtcccgagtggattgaatgagcaggaatctgaaggtgctgcatggacttggagaacagttggaagccaagacataaacaggactgatctgagagtcgacatggaaggacgggaaatcaggagactttttattgggaaccccggagattatgttgatgcaagacagtttgaaatgcttctcgagcaattcgctgatgaggataacaattccagaagaggagctccacctgcagcggcatcttccatcgaaaatctttcgtctgtggtcatctccaaaggctatgagataaacggtggtgtaacctgtccagtctgcaaagatgacatgcctatcaccactgtagcaaaacagctaccatgcatgcatctctatcattcatcttgcatcttgccatggcttaattctaggaacacatgcccagtttgtcgttacgagcttcctacagatgactcggaatatgagaggtccaagcatgccgcggtcaatgaaggaggtatccatggggtggagcgtacccatccgcaggaagttgttgaagaaacttatgaacctgaggttgatggaggttccaatacaggcggtgatacaatgaatgagactaatacacatgaacagcatactgcacagcagccaaatggagcacatgggcgtcatagatggctgtttattgcagcagctccagttgtaagtcttgtcagtttagctctagttttgtgcttcaccaatcctgctggcaatgttaggaggcaattgtgccgtaggtcccagactaccactacggcacatgtagacacaagaagaagttggtggtctatgttctaagtaaccagtgtttacttgctgatgctgaatttctgtgtgatggcgtgtgcttgttgccacttgccagtgttgtgtcaattatgtatgaaaaggttctagataaatttgaagtgcaaactgtgtgtgccaaccaaggtgttcttgtaaccaagttcagacagttcagcaaaacaaatactgatgattgctgctgttcattgatattttatatgtttggttgctcaggttgtaacttcaagcatgtaactaacactctgccttaaagtttacccatgcattcatcagtaagtgcct

SEQ ID NO: 120311 - DNA, 1029 bp, Zea Mays
tgctcgatggcacaggaggtagtaaggagatctatgttgatggatacctgaggaacttttcagcggatgtgattgctagagcatgttttgggagcaatttcgtagaaggaaaagacatattttgcaagctcaggcagctccaaaagttgatttctgaacaggatacacttgttgggctgtctgcagtgtggaaatacttgcctaccaagagaaaccgggagatacaaaagctagatcaagaagtccggttactaatcctggatctctcaagggaagacaggagcagaagccgcagcaataatgccggcacgcacgtgtccacatacgacaaccttctgcatgccattgtcgatggtgcaaaccagagccccagctactgcagtgcccctgaagatttcatcgtcgacaactgcaagaacatctactttgctgggtatgaaactacagcggtcactgccacctggtgcctgatgctccttgctgcacacccagactggcaggaccgtgctcgggctgagattcgagaagtgtgctgtggacagacagcgatggacatcgacgtccttcgtcagctgaaaatacttacaatggtgatacaagagactctccggctgtaccctccagcgtcactgatcatgcgtgaggccctgacaggcatcaggctcggtggagtcgacgtccctcgcggcaccatcatccaagtagccatttcattgctgcaccttgacatggaagcctggggtccagacgctaacgagtttcgtccagaccggttcgcgaacggagctgccgcggcgtgcaagccagcccacatgtatatgccgttcgggtacgggccgaggctgtgcaccgggcagaacctggcaatggcggagctgaaggttgttcttgcgcgcctgctgagcaagttctcgttctcggtgtcgcctgggtaccagcactccccggtgtttcggttgaccattgagccggagtccggcatgccccttgtggtgacaaggctagcatgatcttctgtttgtttccaaa

SEQ ID NO: 120312 - DNA, 729 bp, Zea Mays
atggccaaggtccaccccaacgccgcggggtccgtcgttgccacagcagcagcagtaggccgggccccggcggaggctgatggagagccgtccactgtgctgacggtgtggcgcaagtcgctgctcttcaactgcgacggcttcactgtctacgacgccagcggcgacctggccttccgcgtcgactgctacgccggctccacccggcgctggcgccgcgccggcgtcgtgctcatggacgccagcgggaagccgctcctcaccgtgcgccgcaagacgcggctcggcctcgcggagcgctgggtcatctacgacgccgacgccgacgacggcacgacgacgacggccagggccacgccgctgctctccgtccgccgccgcatcggcgcgtgctgcaagacgctggcgctcgcccactccgcggccgcgggcaccgacgacgcggcggcggcggctgcactgtcgtacgtggtggagggctcctacgggcggcgcgcctgcgcggtgcgtgaggagcgcgggggcgccgtcgtcgcggaggtgcagaggaaggaggccgtcggcgacgacgtgttccgcctcgtcgtggcggggtcacgtctcggcgcgccgctttccatggcgctcgtcatcgccctcgacgacatgttccgcggcggggccggcggcggcggctggtcgacgacgcggtcgttgctacgcaggaagaattcgtccatggctatatag

SEQ ID NO: 120313 - DNA, 500 bp, Zea Mays
cggtcattggaatttggaatgaccccatccatggcggctcaaccgaaattacatttccagacatcgaatttgaggaatacatacagacgctgcaaaatggtaccagccacaaacaaacaaacaaacaaaagcaaagcaaagcaaagcaggcaattcagatgatgatggcagacaaatcatgcatcaagaggtcaccccacccattattcttccctgcgatggcaggatgccaaaaaaagagaaaacttgccaagaaattcagtacagactgactgattgattgattcctaagatatgcacagcagcagcagcatgcatgcatgccatatccaaccgctcttagttcagccttccatttcttgggttaatcttgaacccccgccagtttcagcagggctcgctcagtcacaagactagagatggcaacgggtacaaacccgccgggttttgctatcccaaacccgtacccatgaaaaatatttacacccattaaaaaaccc

SEQ ID NO: 120314 - DNA, 372 bp, Zea Mays
atggaccgcaatccgagaccgtcaaagtcaaactgcttctgccggctggcatcgtccgccggacaccgactagattctctcatctatgccgtgtcttgtcttctagaacaagatgaatttacagcaaaacacgtgtgtacaatacaggcgcaacgacgagctcgctcacatcacatcactgctagacagctagagggccatctctgcctgaagcctggtcagctcgctcacatcactgccctgtctagaagacgccgccgccgctttcgccgatggttccacggaccgcctcgccggcggctcaggcagctcgtcctcgatctccccctcctcctcctcctcctcctccagctcttccagctccgcttctag

SEQ ID NO: 120315 - DNA, 173 bp, Zea Mays
aacaaagtttttgaaaaccacagtttttgaaatactacaatatactttagtcatgacaataccacagtttacaataccgcagttttgaaaactgaggtccagagctaagtttagaatgccttaaaacaactatagtatttgcaatacttcaattttgaaaacagagattttag

SEQ ID NO: 120316 - DNA, 2449 bp, Zea Mays
ctcttgtgcttacgcccttgttcgtctcccggcggcgtcttcctctttactcctcccgctctccctccctcgcaccgtccgtctgctagctcagcctactcactccactcaactcacccccaactccactccgctcccgagcccggactgactgactgactgtggtggtggtggtgcatcagcagcccgcgcggcgccaaaacacgcaaactgctccctccctcactcacccctatcccccgcgctgggtcgcccgatcgccatgcgcgcggcggcttcctcttggcgtttctagatgggctcctcctcctccctcctcttctcctcgtcctcctccgccgcatccaccgccccccactcctttccccactctcatgccaccgccaccgcctccgcctcctctcactccttattgccgccgctgccctcccccacacctccctccgcctcctccttcttccccaaaccacttcctcctccactacctccatcagctagaccaccaagaagccgccgccgccgccatggtccgcaagcgccccgcgtccgacatggacctcccgccgccgcgccgccacgtcacgggcgacctctccgacgtcacggcggccgctgccgccggtgttggtggtagtggcgcgccgtcctccgccagcgcgcagctgcccgcgctgcccacccagctccaccagctgccccccgcgttccagcaccacgcgccggaggtggacgtgcccgcgcacccggccccggccgcccacgcgcaggcgggcggcgaggcaaccgcgtccacgaccgcgtgggtggacggcatcatccgcgacatcatcgggagcagcggcggcgccgcggtctccatcacgcagctcatccacaacgtccgcgagatcatccacccctgcaaccccggcctcgcgtcgctcctggagctccgcctccgctccctcctcgcagccgacccggccccactgccgccgccgccgcagccgcagcagcatgctctcctgcacggcgctccggccgccgctcccgcggggctgacgctccctcccccgccaccgcttccggacaagcgccgccacgagcatccaccgccgtgccagcagcaacagcaggaggaaccgcatccggcgccgcagtcgcccaaggccccgaccgcggaagagaccgcagcggcggccgccgccgcacaagcagcagctgctgcggccgccaaggagcggaaggaggagcagcggcggaagcagcgcgacgaggagggcctccacctgctgacgctgctgctgcagtgcgccgaggccgtgaacgcggacaacctggacgacgcgcaccagacgctgctggagatcgcggagctagcgacgccgttcggcacctcgacgcagcgcgtggccgcctacttcgcggaggccatgtcggcgcggctcgtcagctcctgcctgggcctgtacgcgccgctgccgccgggctcccccgccgcggcgcgcctccacggccgcgtcgccgccgcgttccaggtgttcaacggcatcagccccttcgtcaagttctcgcacttcaccgccaaccaggccatccaggaggcgttcgagcgggaggagcgcgtgcacatcatcgacctcgacatcatgcaggggctgcagtggccggggctcttccacatccttgcctcccgccccgggggcccgcccagggtgaggctcaccggcctcggggcgtccatggaggcgctcgaggccacggggaagcgcctctccgatttcgccgacacgctcggcctgcccttcgagttctgcgccgtcgccgagaaggccggcaatgttgacccggagaagctaggggtcacgaggcgggaggccgtcgccgtccactggctgcaccactcgctctacgacgtcactggctccgactccaacacgctctggctcatccaaaggctggcccccaaggtggtgacaatggtggagcaggacctgagccactcgggctccttcctggcgcgcttcgtggaggccatccactactactcggcgctgttcgactcgctggacgcgagctacggcgaggacagccccgagcggcacgtcgtggagcagcagctgctgtcgcgggagatccgcaacgtgctggccgtgggcgggccggcccgcaccggcgacgtcaagttcggcagctggcgcgagaagctggcgcagtccgggttccgcgccgcctcgctcgccggcagcgccgcggcgcaggcgtccctgctgctcggcatgttcccctccgacgggtacacgctggtggaggagaacggcgcgctgaagctcgggtggaaggacctctgcctgctcaccgcgtcggcctggcgccccatccaggtgccgccgtgccgttgatgagacctctgcctgctcctgcttgcgttgagaggccgccactccacttgttttgcatctgtagctgc

SEQ ID NO: 120317 - DNA, 848 bp, Zea Mays
ttaataaactacattggtcattgattccatcccccacacacctgcaggctggcccccaaggtggtgacaatggtggagcaggacctgagccactcgggctccttcctggcgcgcttcgtggaggccatccactactactcggcgctgttcgactcgctggacgcgagctacggcgaggacagccccgagcggcacgtcgtggagcagcagctgctgtcgcgggagatccgcaacgtgctggccgtgggcgggccggcccgcaccggcgacgtcaagttcggcagctggcgcgagaagctggcgcagtccgggttccgcgccgcctcgctcgccggcagcgccgcggcgcaggcgtccctgctgctcggcatgttcccctccgacgggtacacgctggtggaggagaacggcgcgctgaagctcgggtggaaggacctctgcctgctcaccgcgtcggcctggcgccccatccaggtgccgccgtgccgttgatgagacctctgcctgctcctgcttgcgttgagaggccgccactccacttgttttgcatctgtagctgctcggtttggtcatcagctgggagataagaaaagcggaaacgtactaattgctctggagtagatccatccattcacagtgatagttactgatgtactaagctttaattagttcaatgctagatcgttcttgttcaggtgtcgatcgcgtatccttgtccttggtctccttttcattttggtgctttgtctagtcgctttcccgactaatgccgtgctcttcatgcgcgttctagtgaagattcttgccgagaatattagcatagttttcatgtaaagtagccatcaagc

SEQ ID NO: 120318 - DNA, 1347 bp, Zea Mays
gtgattttttttctccgttcttgccaattcctgtactaattactacatagcttctggtcctcgacgcttttttttcttctgcacttcactgtcgcaggaactactaatttctattatgtttgagagcaagcaagtccatttcatttcgatcgatcggttccaattttctttgatgcttggttccctgctaatctaatctaatccatccatctatccttggttcgattaggttctcgttcttcagtgcgcgatatcaatccactgaggcgctgggtgcagttaatttcccaaactatatttgggggtgttcagcaaaaaccgcgtcaactgcgcccgtgcgggtgagggatcactagagcctggactcgcgctagagatggtcaaggcaaaagcaagggtccgctatgagcttggaccgacatttgaggaggtcaaagaagaagtcatgcttgatatatcaccaacagactcgacaaagttttgtttaattcagtggcctaaagaccaggtaccattgatcttttgcataaaattcagatgacaaagaacatataaagagaagcaagatgacaaaattgaggtagggaatggaggatctctcaaaattgagggactaaagaagtaaagagtaaagaaatacttgttccctttatttttttttgttataataggttttattgtactgctaatttttctgtgtaaaagaacttttgtttcgtgtacttctcttttcatgtaggcatatatcagtatatcaatctatgtttcgtttactctcagttctttcttccttttgaccagcagctcttgtctttgtagtctgagctggaatatctatccttcatgtacgttaaccccactggttttgctgaactaagaaaaagagttgaagacttgtacaaggcccatgaacaagaattggaagaggcaaataaaattttaaggcaaaagattgttgaggatcagtttctcgatcttgttagtgttgaaacagaagtgcgctcagtttacaaagagctctacagcatttacaaaactacactcaaatccaagagttcaataaatgaggtgaatcaggttgctcagctgaggatcatcataaaaccaaaatcctgcagtggtgttgggccattgtgcactgcacaacagatctgctttcatgttcttggccttgttcatggcatatggacacccgttcctcaagctttatgtcaacatgtggaagattacattgtaactccaaaacctaatggctaccaaagtctacacacaacagtgataccatttcttaacgagagtatgtttcatttggaagttcagataagaacagaagatatggatttaata

SEQ ID NO: 120319 - DNA, 1381 bp, Zea Mays
cgtaccgatccccggccggccggttgttgcagggagggcaaggagaaatggcgaagaagctctccagggcggccgtgctgctcctcgtcgccgcccctctgttcaagtacttgtgcgccgtgctcgtgggcatccaggtcgggcgggcgctagagaggtgtccggagagcgccagattcagcctgggagagactctccactacgtcaccaaggtatggtgcgtgatcgatcgtaccataaaaaagaggtgacgacgactagcttgtttgtaaattgtgtacttgtttcaggagctttgggatggcaatgttctgggagggcgacgaggaggaggaacgcacagttgtttcactgtcagtggtgctgaaagctcgtcgtcggaggaacgaccctacgccgccctcgcttcggccgatggcgttcgtgctcccaggacaaacagcgacgcaaatgtcacccagacgacgacatacacatactacaaccacacttcgccgaggggcgtgatcagcgtggggccgtggggcggatccggcgggcagccgttctacatgcgcggcgccagcgctcctcgccttcgcagcgtcgtcctctaccattccggcgccatccactcgctggcctacgagtacaccctcgccggcgactacgactacgaggggccgccgcgccgacgccgagtggccggtccctggggcctcccgcattcctacggctccagaggagttcgtgccgagatcgacctgcgttcaggggagcacgtcaccgcagtggagggcacgacggggcacttcgccgacgtccccggcgtggtcgtcacctcgctgacgttccgcaccagcgccggcagaacgtacgggccgtacggcagcgtcggcgcagggtcgcaccgcttctccgtgccggcggcggacggcgcccgcatcgtcggattctggggacgctccggctggcttctcgacgccgtcggggtctacatgaagcctcctccttgctcgtcgtcagacacggcggcgtacgagaaacatgcatccagacgtcagcgacgaaactaatcagtgcgccacagtatacttattgggcagagagagagagagagttagagatcatcatctctaccataaatagaatcctgctgtaacctgtatgcataggtacagtactaggtagacagattttctgaatcttgctgtcagtatgatggccgcataaataaataactaggtacgtgcccgtgcgttgctacggtttccatttattgcatagatagaccttgtgaaataaattttagagaggtcaattcaactttagttgaagatcttgatcttttcaatgatccaaagctgaacactcatagagtacacaacatttatagctttac

SEQ ID NO: 120320 - DNA, 981 bp, Zea Mays
ctggcttgggctggagtgagccttgtaaatgttggcaggccgattggtcgtgtggaccgagtggtcgtgtggttataagtaacacccaaaccctggctgtaaggggtcatgaacaatttagctatcagatatcaaatcaaatcgtcttcctcgctgctatctccttcttcaacccttcttctagctgaacatctctcttctttccgatattcccttctagttgctaacatctggtatcagactcggttccattctagacactccttccctatttcctggttagtctcgacaactgcgatggaagtcgaggtggcacgggttctcgaggcgatggtacacatggagctccgcttgaccgcggcactggctggcagtggtggcgagcaggaccccgaatccttctcctacgccaccgcttcctccgccatcgcgccacgctctcgccgccgatctggaggtggttcaccacggagggcgaggagcaggaggcagcgtacgaagcggccgtagagcagctgctggtcctggagaaggagctcgccgtctcctggaagccattcttcggcggggacaaggtcgggttcgtggacctatcgctcggcccgctggcgtacgtgcttccgatcgatgtacgaggaggtgatcggcggcggcgtgagcgtgacgacgaataataagatggtcgcggaggagaagatgccgtgcctcgctgcgtggatggggaggttcctcagctcgccggccgtcagggcccatctgccgccgctcgagaagctgcggcccaggtaccaggccatgcgcgagtcgcttctcgtctcagcgagagcacaagtggtcgagaaggagcgcggcagcagtagctagctacttgctactatctcattatctgtcaggctgtcagctccattcgataatttaataagaaaaaaaactgcccatgttgatgtatcaagtcgatacaaatgcactggcttttcccca

SEQ ID NO: 120321 - DNA, 2548 bp, Zea Mays
ggccaccacctgtttgggaattctggctgtcactgaagattactggtccacagatgatgcattcggtaggatactttggattgccagttatgccggcgacatgtattacaatttcagagattgtgtctggttcaagcgagcaaatatttcctgaaatatttctgcaaagcttacatgagtgcagagtttgtcttagtgaaaatactggcagaagtttactccagctcccatgccaccatttgttttgcttgatgtgtatgaagtctaattgcagaattcatgtaatagaagggaatttaacccaggtctggttaagagaagatgcagttgcttacttcaaaaatatgtttgatggtggcctgaggccaacctcaaatgcatttaacaaagttatagatcgctgggtgaaggttgatatgctcaacgaggcccatgggttctttgatatgatgcttgaaaaggacatagatgatgttacggtggtcattttctactttggaggacaacatgtgggctgggaaatgaagacaaaatggttgtctaatggttggctatgtttggtatgtggtgcatctgatactcaagagcttcctctacatttcattaaacttgcaaaggatacgtacacatttgactgcatgttcgaaaaaatcggatatggcactgtgaggctttggtttacatgctgtccttactatttgttcgaagagattattgcaacgaggaaccatttttttaggaatgtgcttgagcattatcaatgtggcattgagatgatacggagggatttatttactggccattggaaacattatcttcaaggtgctataccacttcaaccctgctttgatggtctcataaatgttggcaaggtagccgcacgtaccctccaagatactgttgtagggaattcttgcattgtgtctagacagcctccatggccacccccaacgtgtcaccatttcagaactatgcatgctgaaactgtggcaaattggaaccacttattcagttggtgttttgcaaattcagatttgggtgaattactgactctcaactgccctgctgacagagcaatggtgctgctgatgtaccaaattgagttgagactgctcaattgggcctgggcagacgagtgtgtcttcaacctgtgtctacttcgattacacagtgttgttcatagcagcctagccaatgcttataaatcctggttgataacagtgattcaccgaacacactcaattggccaagatcatttttggcataacgtggataggggtgtggtgtgtggaattaaggatagatgctgtgcaagattggcaaagctagttttatctgctacactgacacaagattctggcaagctttctcaacttgaattgcaccatccattgttgttgaatactcagtcaagcggcttgaggacaagccgcatttcaagcggtggggaatatcagcatatcatcttctcctcaagtcaaagatggtaccagaagaatacgaacaatgctgctacgacgacgatgaccatacatggagtatatgaagatggaggcatcgcaggaaaaggcacaggcgcgccaggagagcgggctcggtgtctaatgaaagctagcgtccgtctggcttgggctggagtgagccttgtaaatgttggcaggccgattggtcgtgtggaccgagtggtcgtgtggttataagtaacacccaaaccctggctgtaaggggtcatgaacaatttagctatcagatatcaaatcaaatcgtcttcctcgctgctatctccttcttcaacccttcttctacctgaacatctctcttctttccgatattcccttctagttgctaacacaagacgacttgcttatttcttatttgctcatcgatcaatttcagttcagttgtgcgtatgtatgtacttcatgctgtcatgtcacgcttgcagctctcgccgccgatctggaggtggttcaccacggagggcgaggagcaggaggcagcgtacgaagcggccgtagagcagctgctggtcctggagaaggagctcgccgtctcctggaagccattcttcggcggggacaaggtcgggttcgtggacctatcgctcggcccgctggcgtacgtgcttccgatcgatgtacgaggaggtgatcggcggcggcgtgagcgtgacgacgaataataagatggtcgcggaggagaagatgccgtgcctcgctgcgtggatggggaggttcctcagctcgccggccgtcagggcccatctgccgccgctcgagaagctgcggcccaggtaccaggccatgcgcgagtcgcttctcgtctcagcgagagcacaagtggtcgagaaggagcgcggcagcagtagctagctacttgctactatctcattatctgtcaggctgtcagctccattcgataatttaataagaaaaaaaactgcccatgttgatgtatcaagtcgatacaaatgcactggcttttccccagtctgagcttgcttctattgggtgagcaaggcaataaagatcctgctaattaagtgtct

SEQ ID NO: 120322 - DNA, 820 bp, Zea Mays
gccagaacacgtacacttgacatgaaaatggctcttctaacaagcagatgtgcccctcggctgcctctgcggatctgtcacactgctagggctaggggagggctgctggtgccgcctcagctgctgctgcctcgtcaggataactggaagaagctgctaccactgcagcgcccgcccgcccctgcgcacccgcggcggctgttctgctcgttcagcgattttctgaaggcagcggaagccggtccagcgcgtcatggcgcgctactgtcgttcgccgtggcccggaacaggctccaggacgccgtggcggggaaccaccgggaccgggcgctggaagcccttgcggagctcaaggcgttcgccggcagcgagcactactacggcgacggctacagagcgacggagcttctcttggcggcactgtcgcctttggctcggctgtgcaagggccaaggactagtagtcgacgacgacggcgccgtggtgactaaggaatcactggcggtggcatgcctgctgctgcggaacgcttctgcggagatcggcgccacactgtgcgaggaaatctcgcaggaggaggacgtcaaatccagcttggagaggatccgagaccgaagtggttgtgattgtgacgaggtgcgcgagctagcaaacgagattctcgcacggctaccctcaactccaaattaactaggctcagtctgtctattgcttacgcgatttcacctccatcgtgtgcttcgatcgagagcctcacttgtattttccctttcttttttctaataaaaaagtcgaccatcgtgtgatatatatatatata

SEQ ID NO: 120323 - DNA, 643 bp, Zea Mays
acgcagcgcctggggtcggcgacgaggagggtgcgctggtatcggctgaagacgtccttgacctccttcttggcggcctcgacgacgtaattctggtagtatgcgacgagccccttggcgacggcctggcggatggcgaagacctgcgacgtcttcccgccgccgcggacgcggacccgcatgtccacgtccttgaaccgcgaccgccccgccagacattgttgcagtgggggctgctgggttttggcggcggcggcgttagggtttgcgatgtggatttggcggcttgcgggagggggcggcggacaggggaaaaaattgtctgccgccggctgtaggccaacgtctatgctagactgtttcatatgtggcatttgtttttcagaaccattcagagtttgccggtctattcatgtgtatttcttcagttgtccatatactctgtactagtgattgtagtgatcagttgtgacttctattgtcatcaaaaccatggaaattgattattataggtctagttacatcgaagtttattatgtgcttcatcaaaaatgtaattttttagctgctgatgcttcttgatcaactcaaataaaaggcttgtatatcctcctgcctcccatcaatagagaaacaaaccata

SEQ ID NO: 120324 - DNA, 408 bp, Zea Mays
atggggtggcgacctgtgagctatggcgagggaggagctcaagcagagccggtggcgcgctggcgcggagaaaacatggggacagcgccacgacacaggagcgcgcgggatccgtcgaggccacgacctgggcgacctgcagagatgcgggagagaggagcaaagatgaggttggcgccagcgttcaagagcagcggctggtggagctcagcgccgtggaggagcagagagcaccatggttgggggagacgccatgggggagctcggccaggggctttggcggtcgtgtttggtaccatgggcggcggcgtgcaggagaggctgagtagggagagatggagatgggcgccgcgcctcgccgcctggcggcctggcgggtgggggcctgggcatggccggttggcctag

SEQ ID NO: 120325 - DNA, 1322 bp, Zea Mays
cgacgcggagcggaagccccagtggccagtgcccaccaccttcacgcctcctcgcgtcgtcgcaaccgcagatctggccaacggcccccgaccgatcgacccccctccccctcggcgcggcgaggcgcagtcaaatttgtcaagctactgttgatgctccagatatagtagaaaaccatgggagaagttagtgatgataattccaacatgtcctttctaaaaagaatcgctacaagtgacgtgccactgttgaaagagtatggtgtgaatggagttgttgtcgccctgcttctggctgtagttactcctgtcctgctttccatgatgtttggcaagaagacaaagcaaagggcggtgcgagctgatgtgggtggagaggagggatttgcaatgcggaacaacaggttttcctccttagttgaagtcccatgggagggcgccacgacaatgtcagctctgttcgagatggccagcaaaaagtactctcgacagaggtgtcttggcacgaggaagctaattaagagggaatttatggaatcttctgatggtaggaagtttgagaaactgcaccttggtgaatatgaatgggatacctacactgaggcatttaatcgtgcatgtaatttttcttctggacttatcaagatgggccacgacctagatagtcatgctgctatcttctctgatacaagagctgagtggatcattgctgctcagggatgcttccgacaaaatttaacggttgtaacaatatatgcatctcttggtgaggatgcattggtgcattcactaaatgagacacaggtttcaactctgatatgtgattcgaagcaacttaagaagatacctgcaatcagctataaattgcagagtcttaggcgtattatctatattgaggatgaacctgtcgaggctgagacactgaaccaagtgaagcatttgacaacattgtctttcactgaagtagaggagcttggcaagacatctcatgttgatgcaaggttaccttcaggctctgatactgcagttatcatgtatacaagcggaagtactggtcttcccaagggtgtaatgatcacacatggcaacatggtggccacaactgcagcagtcatgacaatagtcccaaaccttggcatgaatgatgtttatctggcttatcttccattggctcatgtctttgaactagcaggggagactgtcatgttagcttctggcagtgccattggatatggttcagcattaactatgactgatacatcgaacaagattaaaaagggaacaaaaggagatgtttctgtactgaatcctactcttatgat

SEQ ID NO: 120326 - DNA, 1263 bp, Zea Mays
gaagggagttggtttggatcttgggcaccagagaggatgttatgggatcacattatttataaaccaatacgggcaatgcttggaggacgtctaagatttgttctttgtggtggtgcacctctgtcaagtgacacacaaagatttatgaatatatgtctaggtgtcccagtgggtcaaggctatggattgactgaaacttgtgctggagcagctttcactgaatgggatgatacaagtgtgggtcgtgttggtccaccacttccttgttgctatgtgaagcttgtctcatgggaagaaggtggttacaagatttctgattctccaatgccgagaggagaggtcgcggttggtggacacagtataacaaaaggttatttcaacaatgaagcaaagacgaacgaagtatacaaggttgatgagaggggcatacgctggttctacactggtgatattggtcagttccatcctgatgggtgccttgagattattgacaggaaaaaagatatagtaaagcttcagcatggagaatatgtgtctcttggcaaggttgaatcggctctagcaacaagcaactatgtggagaacatcatggtttatgccgatccatttcataactactgtgttgccctggttgttccagcgcaccaggccttggagaagtgggctcagaattccgggatgaactatgaaggctttggagagctttgccaaaacgaccgagcaattaaggaggttcagcaatcgctatcaaaggccgcaaaagcagcgaggctcgagaaattcgaggtgccagcgaagatcgtgctgttgcctgaaccgtggacgccggagtccgggctggtgaccgcagcgcttaaactgaagagggagcaaataaaggccaaattcaaaggcgatctggacaagctctaccactgaagaagcgacagaggacggtttaatttgcacctactgcttccagacgcttgcggtgccaaaagctgcctggatggaacttttactgacctgcacgagtggtgtgtgtgtgtgtatcccagctgctgatacacaggagcttcgttcttctgtgactgtgactgagggaaaataaacccagtgttggaatgatcttgatttgtaatagcttcacgtcatgggattttaattttgtcatagcacagaggatgctcaatttcacgtccgttacgggtcagttatgacactaagcatattgtaaatgatgtttttttatatagacacaataaataggccctgggcacatca

SEQ ID NO: 120327 - DNA, 1649 bp, Zea Mays
tcagttgctggcttgaaggagtcccctgaacggtggtcagtggcagcagtggcttccccgtcagcgtcagcgtcgtcctcatccttcttcaaaagcctttcggagagcaggagtctaaagtttggcggcggtttcggttcgcctgcaccagccagcgccgctgctcatacggaagctttcagggtgtttgcagccacatggaacgtagccgggaaggccccggacaagggtctaagtctcaacgatttcctgccttctgatgactactcggacatttatgtgctagggttccaggaagtggtcccgctgaacgccggcaacgtgctggtgatcgaggacaacgagccggcgtcgagatggctggcgctcatcaaccaggcgctgaaccggccgtcgccgccttccgacgcctccgcggcatcggaagctccagcgaccagctgctcgttcagccggtcgtccctggacacggcggcggcggcggtggctgtgcagacgccggcgacgccgagcgccagccgctggacccatcccggttccacaaggcctccaacagggagatccggcgcgccgccatcacccgcgggcggcggctcaaggcgtgcacgtgcccgtcgccggaccaccagcaccgtcgccgccgccgccggcgcctgccgctgagggcgccctgcctgatgggctgcggcggcaggggcgcgagcgccgcagccgtcgagggcgacgacacgacgacgacgtccgacgaggaggacgaggaggtcagggccagcagcttcgcggcgtccgacgtgaccaagagccccgccgccgctgccgcctgggcggctgcgggtgcgggggcgccgggccggcgcgagaggtactgcctggtggcgtgcaagcagatggtggggctgttcgcgacggtgtgggtgaggcgcgggctggtgccccacgtcggccacgtccgcttctcctgcgtcggccgcggcatcatgggctacctcggcaacaaggggtgcatctcggtgagcatgtcgctgcaccagacgagcctgtgcttcgtgtgcagccacctggcgtcgggggagaaggagggggacgagctgaggcggaactcggacgtggtggagatcctcaggaacacgcagttccgccgcctctgcaagcgctccggccgccggatacccgagcggatcctcgaccacgatcgtgtgatctggctaggcgacctcaactaccggatcgctctgagctacacggaggccaagaagctcgtccaggccaacgactgggccgctctcttcgagaaggatcagctcaagactgaaagggagagcggggtgttcagagggtggaacgagggcaagatcctcttcgccccgacgtacaagtactcgtggaactccgacacctacgccggcgaggacgtgtcgtccaagaagaagaggaggacgccggcatggtgcgaccgcatcctctggcacggcgaagggatagtgcagctgtcctacatccgcggcgagtccaagttctccgaccaccgccctgtctgcggcgtgttcatcgtcgaggccgcggtcgtccccgacagcagccgcctcgtcaagttcgcctcgggccccaacatgaaagtcggcgcggaggagctcctgctcgcctcctcc

SEQ ID NO: 120328 - DNA, 1391 bp, Zea Mays
actaacacccctgaagtagaagaaaaatgccgtgagcgcagcagatgtcgtgcggtgcagtgcagtgcaggtgcgggatctctgaatcgctgacgcccagcctcctctgtcatctccctcctcggacctcgccacctcacgcggaaggaggggaagaggaagcgcggagactggaaatcgggccccaaatccgcttcggtctctcgatcggcgaggcatgattcatacaaccggctaggatggcctcaaaagctataaaaagaaggcctatcagcgctgagactgatacaacaggggaaaaacaaatggatacagcactgtcagatcctgtaacagaacctcttctaggaaacactcctcaggaagagaaatccaagacatatgagcctattacacggtcaggtttctgggatgggacggcacaggagtgtcttcgttggacacatcttttagcagcttttgttgctcaatctgcaagaaacatagtaaatgttctttctgaatttggatatttgctagcaagactctttggttgctcttctgcttccaaaagttcacaaaatggacagacacttccagttaacctcagtccattacaggaagaaaggttaagattgttgagacaaaggatagatgtgccatatgactgctcctctgtcaagcatcaggatgccctgaaagaactttggaagttggcttaccctaacagacaacttcctcctctgaagtcagatctctggaaggagatgggctggcagaactccgatccatccacagattttagagcagctgggttcatgtccttggagaatctaatatattttgccagaaattacccagattcctttcacaggctactgcataaagcagatggtaagagagctgaatgggagtatccttttgcagtaggcggcgtaaacatatcctatatgttagttcaaatgctggatttacagtcaggaaaaatgagaacaaaagctggtgttcactttgttcaactactcgatgatgacggtgtggctttcgataaccttttctgtgtagcatttcaggtgcttgattctcaatggcttgcaaggcgagcgagttatatggaattcaatgaggttctgaagtctacacggggtcagttagagcaagagcttactatcggaggtatttctcgcattcaagacatgccatcattcagaatgctgagaaggtagcgctgtttgtacttcacaggaaaagagatacattttagattccaatatattgtttaaatttgttgtccgttctttcactggattttgaagacgtgacattgtgtatgttattgagtatattgtttgtaatgtcgcagcttaaagctacagatcataatatatgatatgatatcttgaaaagaaaaa

SEQ ID NO: 120329 - DNA, 1134 bp, Zea Mays
attaaaggcaatttggataattctccaaataaacctggccacagggcagtgaaaaagcaaatgatctatggactccaaaagtccacaaaagatacagtccggattcccatgccagtgtcttttaaccaaattatcttttgtcagaatcttcttatcattctgtatctagttttacctttatggcatttctttttattatcaaatgaatggcaattttatacctgtgaagaattggataaatgcaattaactttggtatgtgatattcgtgaccgataaaggcactgcaattcagaagaaataacatcttttttctgttacaggatgccctgaaagaactttggaagttggcttaccctaacagacaacttcctcctctgaagtcagatctctggaaggagatgggctggcagaactccgatccatccacagattttaggttcagttctgcagtgatgacgtttcttgataaattgtcatgcattatgttgacatgatttgagccggatgatttgtattttaaagtatcctatgcttgcagagcagctgggttcatgtccttggagaatctaatatattttgccagaaattacccagattcctttcacaggctactgcataaagcagatggtaagagagctgaatgggagtatccttttgcagtaggcggcgtaaacatatcctatatgttagttcaaatgctggatttacagtcaggaaaaatgagaacaaaagctggtgttcactttgttcaactactcgatgatgacggtgtggctttcgataaccttttctgtgtagcatttcaggtgcttgattctcaatggcttgcaaggcgagcgagttatatggaattcaatgaggttctgaagtctacacggggtcagttagagcaagagcttactatcggaggtatttctcgcattcaagacatgccatcattcagaatgctgagaaggtagcgctgtttgtacttcacaggaaaagagatacattttagattccaatatattgtttaaatttgttgtccgttctttcactggattttgaagacgtgacattgtgtatgttattgagtatattgtttgtaatgtcgcagcttaaagctacagatcataatatatgatatgatatc

SEQ ID NO: 120330 - DNA, 224 bp, Zea Mays
gaaatttcatgtcagatctgtttgatatttgaacagaaaattttttatcataacaggaatcgtgatgtcaattgtcaacagcaagaggtaaccagaacctatgtgcctatgctacttactaattgcatgaacactgaccagataattaaaaacaaacaatgcttccaaacatgctaagagctagcacaaaaaacttaaaaaactcacaaaaacaataaagaaaa

SEQ ID NO: 120331 - DNA, 474 bp, Zea Mays
atggagaaactgctgcgcctggagaaccgcgtcgagccgtgggtcgcggtggtgacgagcggacgcagcgattcccctccatggacggcgcacgggaggtcgcgggcgcgagagaaggacgccgcggatcttgggaagcgcgcggcggacacgagagaagcgcgatcgatgcagtgcccactagtgaaggagggcgtccaattatatcgtggactatgggcacatggacccagactggtccgggatggcagcgggtcgggtaaagtgcgggtaagccatttacccgcccaccaacatattcgcgcctctagtgcttacccgtgcccgcgagagcttgcgggtaaaattttcgacccgtaccctcaggatatcagcggatatcgggcaacccgttacccgccagaaaataccatacgagtatgtggtcatgttaatttcaccaagaccaccaacaacttgacagacataatataa

SEQ ID NO: 120332 - DNA, 1489 bp, Zea Mays
gcctcgggagacgggacgagcaatgcgtcgtcgtccatcgatcatgaggcgtctccgacggagctaaaagagatcgatcagtgagcggtggtggattgaagaatcgagggcgaggaggaagagagggaggatggaggaggtggagcagcagctgaccaagaaacagatcgaggagttccgggaggcgttcagcctcttcgacaaagatggcgacgggacgatcacgaccaaggagctgggcacggtgatgcggtcgctggggcagacgccgacggaggaggagctgcagggcatggtggacgaggtggacgcggacggcagcggcgccatcgacttccaggagttcctcaccctgatggcgcgccagatgcgggaggccagcggcgccgacgaggaggagctgcgagaggccttccgcgtcttcgaccaggaccagaacggcttcatctcccgcgaagagctccgccacgtcctccagaacctcggcgagcgcctctccgacgacgagctcgccgagatgctccgcgaggccgacgccgacggcgatggccagatcaactacaccgagttcaccaaggtcatgcttgccaaacgaaggaaccaggagctggaagaccatgggagtgagtcatctcactccaagagactctgcccctcctgtacaatcctctgaaactctactcactctgccaccttagtttctagctgtcaggagaaccaaatgtaactaacagcaagcaaaggaagaacctgcatgattcgcggtgtacatggtacaaaaaaaaagactactgaaatgatggccgaatactaatacgagttcccaattcagtagtccatttttcttcttcaaaaaatgcaaggcaagttaagcccggtgctgagaactggagcaagatggcaagaacattctgggctccatttcgcagtttctgatcatagtgttccagcacggctcatagtcataggcatatacggatatacaaaactcatactcaaaacctactgaatgaacttcccttcagctacagcaagcaactcaagacgcagcatatacaacgatggtggagcaccagcgcaatttcctgggcacccaccgttacatgcagaatagtttgcttgaaaggatggtgcacaaaatagtttgccattcctcctctctgaggttctgctaagaagcatgttgcgtttgaagatcgtcggatttccagacgacgtccttcaaggtcttggaaaggttcttgtagaactgcagataattatagctcacacatttaagtaaatactgttcaaacaaaagatgctgaaagagcaaaataaactatgaattagtgaattcaaactgctggttgatcagcttatggacagtacatgaatacatatgtttctttatgggcatgatctttgcatgccccatagttaccttatgaaattccagagtgtcaccctttgcttttcggacttctaccatgtggagagagggcgcaac

SEQ ID NO: 120333 - DNA, 306 bp, Zea Mays
agggaaaagaatattaagaaacgttccgaccccggcaaaaatgccattgctcattccgttgatagcaacggcttatggcacgcgctgacgccgcaatttttccctcgtgagctgttacatgactgtctgacgcgcgctctaaatgaaggcgcgactattaccgacgaagcctcggcgctggaatattgcggattccatcctcagttggtcgaaggccgtgcggataacattaaagtcacgcgcccggaagatttggcactggccgagttttacctcacccgaaccatccatcaggagaatacataa

SEQ ID NO: 120334 - DNA, 2052 bp, Zea Mays
atggcgggggcggccgtcatcctgctcgtcgccgttggagcggcgaccgtactgcacctggccgccgccgccgcagtcgtcgtcccgccgccggacgacgcaggccagcatggtgttacagtaactgtggacaacggcgtggtgcaggtgacgctgtcaacgccccaggggcacatcatcagcgtccgctacaacggcgggcaacaaaatcttctctactactacacccgcgggggcaacactggagggtattgggacgtgttctgggactaccccgggtcaggtcgtcggccaggaatgatcgacatgttggacggttcagagttgagggtagtatcctcaagcgaagagaaagtggagctttccttcaggagtgactacaatccatcgctcccaaacagcgtcaggctgaacatcgacaagaggtttgtgatgctgagaggcagctccggcttctactgctacgccatcttggagcacgccagcggctaccctgctctcagcgtcgccgaggcccggatcgccttcaagctcaacgcggccatgttcagctacatggcgatctcagacgacatacagaggtacatgcccagcgaggcagacagggtcgcgccacgtggtgctccactggcctacaaggaggccgtcctgctggtggaccccgtggagccacagttcaggggggaggtggacgacaagtaccagtactcgctggacaacagggacaacgccgtccatggctggatcagcggcggccgcaccggcaccaccaccagcccggccgtgggcttctgggtcatcacgcccagcaacgagttcaagagtggcggccccatgaagcgggagctcacgtcccacgtcggacccacctccatggccgtgtttctcgggaagcattacactgggaacgacataatgctgagcctaggcgacggcgagtactggaagaaggtgctgggcccggtgttcatctacctcaactccaagtccaaccccggaggcggcggcgagggcgacctccgggctctctgggacgacgccaaggcgcaggcgcgagcggaagccggcaagtggccgtacagcttcccagagtcgccggactacgccaaggcgggcgacaggggcacggtcaccggcacgctcctggtcagggacgcgttcgggagcaacggcggcggcggtggcactgacgtgcctgctgcagcggcgttcgtcgggctcgcggcgcccggcgggcagcctggctcctgggcgacgcagtgcaagggctaccagttctggacgagggcggcggccgacggccggttcagcatcgccggcgtccgggccggcacgcgctacggcctctacgcatgggtccccgggttcctcggagactacgcgcacgcctccacggtggccgtggcgccaggcggcgccgtggaccttggcagcctcctgttcgcgccgccgcggtcgggcccgacgctgtgggagatgggcgtcccggaccggacggcggcggagttcttcgtccccgacgccgaccccaggtacgccagcaagctcttcctcggcgagcacaagtacaggcagtacggcctgtgggagaggtacgccgagctgcatcctgctggaagtgatctggttttcaccgttggtcagagcgactactccaagaactggttcttcgcacatgtcacaaggatggttggcaacgtcagtacgccgacgacacggcagatacgcttcagcctcgaccatgtcgtggcaaacggcacctacaccctgcgcattgctcttgcagctgcccagatgtccaggctcatggtgcgcgtgaacggtagggcgagcagggaagccgtgttcaggacgcccgagttcggcgacggcaacgccatcgcgcggcacggcatccacggcggcgtgcagtggatcttcgagttccccatcagaggctacctgctgcggggaggcgagaacagcatcagcatcacacagacaatggcgttcgggccattcttgggggtcatgtacgactacatcaggatggaagggccaccgccggcatga

SEQ ID NO: 120335 - DNA, 1599 bp, Zea Mays
gagcctcgcgtccgtttctgaccttggtgaagcatgcccccgcccgtcctcgccccacactcctctctccctgcaatccctgctctctctcgccccggatcgccgcaatccctctgatccgcgttcgcaatccctgctctcctccgcccggatcgcgcgcccccgccttcatacgcacccgcacaaccccctgcaagccctgtgcggtccccttcaagccccgcgtgtcccacctgcacgcgcaccggcgccgcccccgcctggacgcgacccgcgccctcgcctgacccctactcgtgccgtcgctcgacccctgacgtgcgtgcaggcgggggctatgtggatcaccttccaaactcggagcaggcgcgacacacggcgaccttccatggttggtcgcccccttccatggaaggcgagatcagcgaccatggtatacgcgtcccattccatacttagcggccatggcatgcaccgcgccccattccttccgtgcccctgcccccgtcctctccggtgcgaccacccctgtcccacagccctcggcatccatgcccaccttccatctgcgtccacaaacgagcccgtgaccctgcctctgttctcatcgcatccttggcgccccagcgtgttccccatcccgcagccgtagcccccgcccccaccgtgcgcgaatgccgggctaaaggcgggggaggtgatggtggagcacctggtccacgtggtctgccggtgctgggcagcggagaccggctcgaggccgggcgtacttacctcatcgtacccgtcgaccgcctcccctgcggcgagatgggcggggtcatcaccgcgacgtctcgtgcagtagggacgacagcggggagatgtcaagaggggttacctcaagacggacgaggagttccccaagagggacgagagcaggggcacgtgctgcgtcgtagcccttctccgaaagggtggactgatcgtctccaacgctggagactgtcatgcggtgctcagccgagcagggaaggcagaggtgctcacctctgaccatcggacctcccaggaggatgagaagcatagaattgagaatttgatgaaaaaatgtttctacctttgctaccttctcatcggtggagtgttgtgcacctttcatcctacttctcatcggtgtcctcgccttctccatctaactattctatgtgatcaaatacataagcgtcatccatgggttcggtccctacttcaattatcgtgttaccaagattttttttccatggtgcctctgtgtttgtccacagtctgttattgccttattgggatgcatcacgattccagagttgagttcgcttagcagtcatgttctccttaatgagttatggggttagggacttggataggcatgtctagacttgctatgcattgccactatatttggcatgcttagaaccgctacacaaaacttgctatgtattttgtctaaaaatactatattagtgatatgcttgctagacctatatttttttctcttctattcttgtatgggtctatcaagaatgatgcaattagatagggatacatgctttgtcaatattgtatgagtctttgagtgta

SEQ ID NO: 120336 - DNA, 101 bp, Zea Mays
gacaccaagatcaccgagccatcccttcccttgcacatttgccgccacctccctctttccacccattccctattaccagagtcagcacagcacctattttc

SEQ ID NO: 120337 - DNA, 558 bp, Zea Mays
atggccatggcagccgccaccgcgaatgccatcttgctcttggctctcttcttcgccggcgctcacgcgaatgtcccatgcatactccccgtatgcaagacggtgggtggcgggagccggttcttcgacgtgcagttctgcctggcggcactcggctccgatggccggagcgtcgaccactgcctcgactaccaggtctactccgccattgccgctgacctcctcgcggccaacctcaccgctacggcggccaagatcaacggcctgctccggaagagcggcggctccgccgacgaggccacgacgcgctgtctccggtcctgtcaagcgttgtacggcgacatggaacggaggcagactggctgcgcggctgccgtccggggcgtcaggaagggtgaggccaccaggtgcttggaggaagtcgcgtcagctgctgaggagtgcgaggacgggttccagaggagcaaggtggcgtcgccggtgatggcggagaaccagcaagtgttcaagctcgccaagctcgctgtcgcgctgttgcgcacggtgtatgctagatga

SEQ ID NO: 120338 - DNA, 1979 bp, Zea Mays
gcccttcctcgacgtttctttctttccttccacgtctctccacctcctcctcctcctttctctctcagtctctctccagcctccgcccgcttccttcttctcctgagagtcctgttgctgtctatctcccccgcgcgctattcctccgcctcgcgatagcaatccgcgcattggacgtcgccgcctcaccggacggagccggtcgaaatggaggaggcggcgcccgcaggaactaataaggtgtactacgacgggtgccccggctgcgccatggaccggaggaaggagagccgcgccggcgtcccctacaaggagctgctgttcgtcgccgccgccaccttcgcatccgctctgccaatcacgtccctgttccccttcctctacttcatgataagggacctgcgcgtcgctgagagggaggaagacattggattctacgctggtttcctcggcgcagcatacatgatcggcagaggcgtcgcgtcggtcttctggggcgtggtggcggaccgcgttggccggaagcccgtcatcgcgttctccgtcctctcggtcgtggtgttcaacaccctgttcgggctgagcgccaagtactggatggctatcgctacgaggtttctcctgggcgccctcaacggcttccttgcgccagcgaaggtgcgtgcgtgcacaatacaatacaatacatactccatcgaagcgtactccatcgaggtctgccggcctgagcagcaggctctgggtatatcggtcgtaagcacagcgtgggggatgggcgtcataatcggcccggccatcggtggctacctcgcgcagcctgccaaacagtatccgcacctgttccatgagaaatcagtgtttggaaggttcccgtacctgttgccatgcctgtgcatctcgttcttcgccgccttggttgtcataagctgcgcatggctcccggagaccctacacaagcacagaggcctggagagagcagcagctgaagtggcagaaggcacgacagcagcagcagcagctcaagaaagcaccccggagccggagccggagccacctaagagcagcctgctcaggaaccggccactcatgtcctccatcgtcacgtactgcgtcttctccctccacgacaccgcgtacgtcgagatattttctctgtggaccgtgagtggcagagatcacggcggcctcagcttcgcgtccaaggacgtcggccaagtcctcaccgtcgctggcgccagtctcctggtgtaccaaatcttcgcctaccgttgggtcaacaagatcctcggcccagtcaactcaacccgagtttcgtcggcgctatccataccgataatcgccgcttaccccttcatgacgcgcttgtcgggaataaggcttggtgtgcctctctacgtcgcggcgatgctcaaaagcgtcctcgccatcaccagagtcaccggcacatcgctcctgcagaacaacgctgtgccacaggagcagaggggcgctgcgaacgggatagctacgacggcgatgtctctgtccaaggcgttcgctccggccgtggccggcatcttgttctcgtgggcacagaagcgccagcatgccgcgttctttccaggtgaccagatggtgtttctgctcctgaatctgacggaggtcatcgggctcgtgctcaccttcaagcctttcctcgcggttccccagcagtacaaacagtgaaagcggtgctgcgtgcgtgcgtgctctgcatggatactatagagaggtagctagctgctagccagtgtgtgtgggcgagagcgagacgagggagatggacatgtcaagtagaagcagaggatatgatgtcattatacatatttactttgcgagatatgtagttcctcatgagtcttcgctgtgcggttttctaaaaaaaaattgagataaagttggtctctcaattatatggtgcattccggacatcattgttacatggaaagtgtacttcctct

SEQ ID NO: 120339 - DNA, 1908 bp, Zea Mays
gcccttcctcgacgtttctttctttccttccacgtctctccacctcctcctcctcctttctctctcagtctctctccagcctccgcccgcttccttcttctcctgagagtcctgttgctgtctatctcccccgcgcgctattcctccgcctcgcgatagcaatccgcgcattggacgtcgccgcctcaccggacggagccggtcgaaatggaggaggcggcgcccgcaggaactaataaggtgtactacgacgggtgccccggctgcgccatggaccggaggaaggagagccgcgccggcgtcccctacaaggagctgctgttcgtcgccgccgccaccttcgcatccgctctgccaatcacgtccctgttccccttcctctacttcatgataagggacctgcgcgtcgctgagagggaggaagacattggattctacgctggtttcctcggcgcagcatacatgatcggcagaggcgtcgcgtcggtcttctggggcgtggtggcggaccgcgttggccggaagcccgtcatcgcgttctccgtcctctcggtcgtggtgttcaacaccctgttcgggctgagcgccaagtactggatggctatcgctacgaggtttctcctgggcgccctcaacggcttccttgcgccagcgaaggcgtactccatcgaggtctgccggcctgagcagcaggctctgggtatatcggtcgtaagcacagcgtgggggatgggcgtcataatcggcccggccatcggtggctacctcgcgcagcctgccaaacagtatccgcacctgttccatgagaaatcagtgtttggaaggttcccgtacctgttgccatgcctgtgcatctcgttcttcgccgccttggttgtcataagctgcgcatggctcccggagaccctacacaagcacagaggcctggagagagcagcagctgaagtggcagaaggcacgacagcagcagcagcagctcaagaaagcaccccggagccggagccggagccacctaagagcagcctgctcaggaaccggccactcatgtcctccatcgtcacgtactgcgtcttctccctccacgacaccgcgtacgtcgagagatcacggcggcctcagcttcgcgtccaaggacgtcggccaagtcctcaccgtcgctggcgccagtctcctggtgtaccaaatcttcgcctaccgttgggtcaacaagatcctcggcccagtcaactcaacccgagtttcgtcggcgctatccataccgataatcgccgcttaccccttcatgacgcgcttgtcgggaataaggcttggtgtgcctctctacgtcgcggcgatgctcaaaagcgtcctcgccatcaccagagtcaccggcacatcgctcctgcagaacaacgctgtgccacaggagcagaggggcgctgcgaacgggatagctacgacggcgatgtctctgtccaaggcgttcgctccggccgtggccggcatcttgttctcgtgggcacagaagcgccagcatgccgcgttctttccaggtgaccagatggtgtttctgctcctgaatctgacggaggtcatcgggctcgtgctcaccttcaagcctttcctcgcggttccccagcagtacaaacagtgaaagcggtgctgcgtgcgtgcgtgctctgcatggatactatagagaggtagctagctgctagccagtgtgtgtgggcgagagcgagacgagggagatggacatgtcaagtagaagcagaggatatgatgtcattatacatatttactttgcgagatatgtagttcctcatgagtcttcgctgtgcggttttctaaaaaaaaattgagataaagttggtctctcaattatatggtgcattccggacatcattgttacatggaaagtgtacttcctct

SEQ ID NO: 120340 - DNA, 1644 bp, Zea Mays
gttgctctgaaatcatccgtgcattttctttctttttatttggcaagggactttccttctcttttctttctcctaatttatagtggtgaccaaacagataagggacctgcgcgtcgctgagagggaggaagacattggattctacgctggtttcctcggcgcagcatacatgatcggcagaggcgtcgcgtcggtcttctggggcgtggtggcggaccgcgttggccggaagcccgtcatcgcgttctccgtcctctcggtcgtggtgttcaacaccctgttcgggctgagcgccaagtactggatggctatcgctacgaggtttctcctgggcgccctcaacggcttccttgcgccagcgaaggcgtactccatcgaggtctgccggcctgagcagcaggctctgggtatatcggtcgtaagcacagcgtgggggatgggcgtcataatcggcccggccatcggtggctacctcgcgcagcctgccaaacagtatccgcacctgttccatgagaaatcagtgtttggaaggttcccgtacctgttgccatgcctgtgcatctcgttcttcgccgccttggttgtcataagctgcgcatggctcccggagaccctacacaagcacagaggcctggagagagcagcagctgaagtggcagaaggcacgacagcagcagcagcagctcaagaaagcaccccggagccggagccggagccacctaagagcagcctgctcaggaaccggccactcatgtcctccatcgtcacgtactgcgtcttctccctccacgacaccgcgtacgtcgagatattttctctgtggaccgtgagtggcagagatcacggcggcctcagcttcgcgtccaaggacgtcggccaagtcctcaccgtcgctggcgccagtctcctggtgtaccaaatcttcgcctaccgttgggtcaacaagatcctcggcccagtcaactcaacccgagtttcgtcggcgctatccataccgataatcgccgcttaccccttcatgacgcgcttgtcgggaataaggcttggtgtgcctctctacgtcgcggcgatgctcaaaagcgtcctcgccatcaccagagtcaccggcacatcgctcctgcagaacaacgctgtgccacaggagcagaggggcgctgcgaacgggatagctacgacggcgatgtctctgtccaaggcgttcgctccggccgtggccggcatcttgttctcgtgggcacagaagcgccagcatgccgcgttctttccaggtgaccagatggtgtttctgctcctgaatctgacggaggtcatcgggctcgtgctcaccttcaagcctttcctcgcggttccccagcagtacaaacagtgaaagcggtgctgcgtgcgtgcgtgctctgcatggatactatagagaggtagctagctgctagccagtgtgtgtgggcgagagcgagacgagggagatggacatgtcaagtagaagcagaggatatgatgtcattatacatatttactttgcgagatatgtagttcctcatgagtcttcgctgtgcggttttctaaaaaaaaattgagataaagttggtctctcaattatatggtgcattccggacatcattgttacatggaaagtgtacttcctct

SEQ ID NO: 120341 - DNA, 1382 bp, Zea Mays
ggagatccatctctcactcaaccgcgcgcgaagcacacgagatagagctgctagaggctagagcagtagagctagaagaggaggacaacaaccatggatgcggcggcggcggcggcggcgaggggagatacgaagaagaagaagatgcttgccaccctggtgggctgcaactacgccggcacgccgtacgagctgcagggctgcatcaacgacgtccacgccatgcgcgccgtcctcctcgcccgcttcggcttcgcgcctgccgacgtcaccgtgctcaccgacgaccagcacgggcgcggcggcggcggcggcgtgctcccgaccggagcagccgtcaggcgcgcgctggatgacatggtggcgcgcgcggcgcccggggacgtgctcttcttccacttcagcggccacggcacgctcgtcccgcccgtcggcggcggcggcggcgggccgcgccgccgccgcgacgacgaggccatcgtgccgtgcgacttcaacctcatcacagacgtggacttccgggagctggtggaccgcgtgccgcggggcgccaccttcaccatggcgtccgactcgtgccacagcggcggcctcatcgaccaggagaaggagcagatcgggcccaccgccggcggcgccgaccgcccgagcctccccctccccctcggcgcacgcggccggttcctcccgtacgccgcggtgctcggccacctgtccgcggcgtcgggcgtggcggccacgcaccatcaccacctgcacgtcgccgaccacctcctggcgctcttcggcgccgacgccagcgccaagttccaactccaggtcctccaccgccacggccaccacggcgccggcgccgacgccgggatcctgctgagcgggtgtcagacggacgagacgtcggcggacgtggcgcaggatgacgacgcggcgctcggcggcagggcgtgtggggcgttcagcgccgcgctgcaggtcgtgctggcggcgcacccggcgccgttgacaaaccgcgaggtggtgtgccgcgccagggtggtgttgagcgaccaggggttccaacaacacccctgcctctactgcagcgacgccaacgctgacgcaccgttcctgggacaggacggcaccaaggccaagagcaaatgagcaaggagaggggttccatgcatgcatgatccacacgctcgacactcgcttgcttgatccgctgcaatttatgcgtacgattattattattatttattaataaaataactacatatgcgtgtgcgtatgcagagagaaatatgagccatgaatgcagcatgattatgccatgacaaatttatccttttattgtctactatatatcgactgtacgtaattctacgtgcaactctatcatc

SEQ ID NO: 120342 - DNA, 103 bp, Zea Mays
gagaccttggttagagtgaggacaagagccttaataatattgatacatagtaataggagcttagtacatttcctcatacttttaatacatgaaaatatagttg

SEQ ID NO: 120343 - DNA, 1594 bp, Zea Mays
gggatattttaaacgctaaaatgtgacagtcgccctcccggcgacggagtccggcgaggcggggagctcaccgtcggcgagcgggggcagatcgcgcggcgcggaagtccgggcgagcgaagccaacagaaggtcctccggcaagcgatcgatctcgcagcaagcgggctccgtggctgccgtcgattccatcggttcccccgcctcctcggctcctcgattttcacgattcttccgctgtcggtcttggggtgggggatgacggagggggagagcggggtgcggcggtggctcgtagacatcagccgctggcgcccttcccccgcccagttcgacgctgcagccgccctcctaccgccgcacgagcgccccgccatctccaggttcgtgaaggaggacgacaggaagcgggcgctcgtcagtcgtctgctgcagtactccctcgtgcaccacctcctccgcatcccgtttcacctgatcaacatacgccgcacaaccgaggggaaaccgtacctacagaataattcttcagccttcccgaacttcaacttcagcacctcgcaccatggggactacgtcggtattgcatccgagccactttgccttgtcggcctggacatcgtgtccgtttccgagccccatggagaaaccgccgccgagttcgtcagcaacttctcttcgtgccttactgaccatgagtggagctgcatcgttcgtgctggcactcccagggacgtgctgacagagttctacaggtattggtgtctcaaagaagcatttgtcaaggccataggtgctggcgtcggatttgggttgcgccgactggaattccaccacgaaggctggactaacatttctattcgcatcgatggagaagtgtctaagaaatggagattctggcttttcaaacttgatgagacacacttggcatctatagcaaaaggggatccagaggatgctataaacaccttcaagaaaacactgtccaatgtgatcattgcagagaaccagttatcttctgcgctagacagtccagaagaaggtttcactctacagacagtggaagagcttacacgatctcaggggtaactggccaacagatgctaggcattcttgaaacctacagtgacctacaacagctggagcgtgtgtctgaatcctagaggactccagcctccgataatctaaatatacaggcacatgtgaatcatggaagggcttctattgcagaaagtggctttatatcctttgattttctatgacacaaggccataccaggggattttgaatcgtctactttctctataccaagtgatgctgtatggatgttgttttgatatatctagtatacgtgagtgattgcatttttttctaacatttaggatgcttatgtttaagagtttttaaaatgggaaatatagatcatttcgacgtatggatcatttgccgggggaaaaaaagcggttcttgaacgcgtccttttcatcagtgggatagatagtcaaccatgtgcgtggataaacaaatacaaataaccatgtgcgtgattaattaaaactaatgaccattggtatatatagctaaataacatgtt

SEQ ID NO: 120344 - DNA, 1591 bp, Zea Mays
gggatattttaaacgctaaaatgtgacagtcgccctcccggcgacggagtccggcgaggcggggagctcaccgtcggcgagcgggggcagatcgcgcggcgcggaagtccgggcgagcgaagccaacagaaggtcctccggcaagcgatcgatctcgcagcaagcgggctccgtggctgccgtcgattccatcggttcccccgcctcctcggctcctcgattttcacgattcttccgctgtcggtcttggggtgggggatgacggagggggagagcggggtgcggcggtggctcgtagacatcagccgctggcgcccttcccccgcccagttcgacgctgcagccgccctcctaccgccgcacgagcgccccgccatctccaggttcgtgaaggaggacgacaggaagcgggcgctcgtcagtcgtctgctgcagtactccctcgtgcaccacctcctccgcatcccgtttcacctgatcaacatacgccgcacaaccgaggggaaaccgtacctaaataattcttcagccttcccgaacttcaacttcagcacctcgcaccatggggactacgtcggtattgcatccgagccactttgccttgtcggcctggacatcgtgtccgtttccgagccccatggagaaaccgccgccgagttcgtcagcaacttctcttcgtgccttactgaccatgagtggagctgcatcgttcgtgctggcactcccagggacgtgctgacagagttctacaggtattggtgtctcaaagaagcatttgtcaaggccataggtgctggcgtcggatttgggttgcgccgactggaattccaccacgaaggctggactaacatttctattcgcatcgatggagaagtgtctaagaaatggagattctggcttttcaaacttgatgagacacacttggcatctatagcaaaaggggatccagaggatgctataaacaccttcaagaaaacactgtccaatgtgatcattgcagagaaccagttatcttctgcgctagacagtccagaagaaggtttcactctacagacagtggaagagcttacacgatctcaggggtaactggccaacagatgctaggcattcttgaaacctacagtgacctacaacagctggagcgtgtgtctgaatcctagaggactccagcctccgataatctaaatatacaggcacatgtgaatcatggaagggcttctattgcagaaagtggctttatatcctttgattttctatgacacaaggccataccaggggattttgaatcgtctactttctctataccaagtgatgctgtatggatgttgttttgatatatctagtatacgtgagtgattgcatttttttctaacatttaggatgcttatgtttaagagtttttaaaatgggaaatatagatcatttcgacgtatggatcatttgccgggggaaaaaaagcggttcttgaacgcgtccttttcatcagtgggatagatagtcaaccatgtgcgtggataaacaaatacaaataaccatgtgcgtgattaattaaaactaatgaccattggtatatatagctaaataacatgtt

SEQ ID NO: 120345 - DNA, 1746 bp, Zea Mays
atgggccagtgctgctccaagggccagtgctgctccaagggcgccgaggcggcggcggcagcaaaggcgaacgcaccaatccgcggcgcgtccgcgagcaacgccgacggccaacgtccgtcgtcatcgtgcgcggcgcctggcggtggcggtggaggcggaggcggcgcgacgaagccggcctcacccaccggcggcgccagggccagcaaaccggcggcggccgccgtgggcacggtgctgggccggcccatggaagacgtgcgcgcgacctacacgatgggcaaggagctggggcgcgggcagttcggcgtgacgcacctgtgcacgcaccgggcgagcggcgagaagctggcgtgcaagacgatcgcgaagcggaagctggcgggcaaggaggacgtggaggacgtgcggcgggaggtgcagatcatgcaccacctctcgggccagcccggcgtggtgtgcctccgcggcgcgtacgaggacaggcacggcgtgcacctggtcatggagctctgcgcgggcggcgagctcttcgaccgcatcatcgcccggggccactacacggagcgcggcgccgcggcgcttctgcgcgccatcgtgcagaccgtgcacacctgccactccatgggggtcatgcaccgcgacatcaagcccgagaacttcctgctgctcagcagggacgaggacgcgccgctcaaggccaccgacttcggcctctccgtcttcttcaaggagggcgagccgctcagggacatcgtcggcagcgcctactacatcgcgcccgaggtgctcaggaggaggtacggccccgaggccgacatctggagcgtcggcgtcatgctctacatcttcctcgccggcgtgcctcccttctgggcagagaacgagaacggcatcttcaccgccatcctgcgagggaagcttgacctctccggcgagccatggccgcacatctcgccgggagccaaggacctcgtcaagaagatgctcaacagcaaccccaaggagcgcctcacggcgttccaggtcctcaaacttgtagatcacccatggatcaaagaagacggagacgcaccagacacgccacttgacaacgttgttctcgacaggctcaagcagttcagggccatgaaccagttcaagaaagctgcactgaggatcatagctgggtgcctatccgaagaggagatcacagggctgaaggagatgttcaagaacatcgacaaggataacagtggcaccatcacgcttgacgagctcaaacaagggttggcaaagcatggacccaagctgtccgacagcgaaatggagcagctaatggaagcagaaagaaactttgattctattgaaagtgaagatgtagctaatttgcaaacatccatcccttctgaaacgttttacacacaattccaggccgatgctgacggcaacgggttaatcgactacgacgagttcgtcaccgcaacggtgcacatgaacaagctggaccgagaagagcacctctacacagcattccagtactttgacaaggacaacagcgggtacattactaaagaagagcttgagcatgccttgaaggagcaagggttgtacgacgccgacaaaatcaaagaggtcatcgcagatgcggactccgacaacgacggaaggatagattattcagagtttgtggcaatgatgaggaaagggacagctggtgcggagccaatgaacaacaagaagaggcgagacatagtcctatag

SEQ ID NO: 120346 - DNA, 1173 bp, Zea Mays
aagataaaactgcaatgatgtcttaccattacctctagctgttaaataattgatcgttaaagagatcatgcagctgcagtgcaataggttagaaaataatactatccctattatgactcgacgcataataccaggtgttttgtctgtgtatagggaaagatcatgcattgcatataaaaagtaggcaaaggaaactacttttatctgatactaacattttactatgtgttttggtgttgtcagaactcagaacatagaggttgttgttcaaatatgcacttgagttatactaggactgatataacattgttcgagagaccatatcgtttaattattttagtgggcatgccaatgttgattgctccaatttcacatatgcccatcatgtacgtactctgcttttgcatcgaaacttttattagaaatattgtttttaactttttattaatttcatttggtagcaccgcccatttatactggtctctgtaaagtgggggagaagtacttgttctgtgctgtgtgaggttagaatagataataatggcaccaagaatgttcgatttagcatctatccttgaatgccattccccttctatcttctccaacttttatcctacggttaagttcagtaattcattttatacttggtcttagtggaaagatcagacctctctggaggcattacttccagaacacacagggtcttatctttgttgtggatagcaatgaccgtgaccgtgttgttgaagccagagatgagctgcacaggatgctgaacgaggatgagctacgtgatgctgtgctgcttgttttcgccaacaagcaagatcttcctaatgccatgaatgctgctgagatcactgacaagcttggattacactccctgcgccagcgacactggtacatccagagcacttgtgccacaactggcgagggtctgtacgaggcctggactggctgtccagcaacattgcgagcaaggtatacatatggcttgcttgaatatcaaatgcgaactgactaggagctccggatgtatcatggaaacttaggacagaatcgcctctgcaacctgttaggtgtcttctaccggcacaatatatcttccaaacccacacagtcgtgcaacctgaatgtatgtcatgttccacaatttgtaaatgctggattttt

SEQ ID NO: 120347 - DNA, 2836 bp, Zea Mays
cccacgacgccgtggggccctgtcggtggaccaggcccacggttggctcttcctcgcttcctcctccattcctctccctctctctctcgtcggtgggaccgtgggatacgctgacggacggacgggctgaggcaaggccgcctgcgggcgggaggaagaaaagcgaagctgctgcgccctcccctcccccatctccgccccccgcctcacccaccagacgagagagcgagcgcagttcggccgccggtcgcgtccgactccagcaaagccgagcgcccaccccctcaccctattaccttcctctcgggtccaattcggtgcctggctgactccgcacgtcttccccccttttccctccctcgaccgacgaccgtccgtccaccaccggatccaggagcgaccctccctcgtgctcgtcgacgatcgaccggccgccgatcgtccaggaaggatgtcgagcctcgaggagccgctgggtctcggagacctgcctaagttgagtattaacagactcgggcggttcgtgtcgctgggcgctcggaggccaccggccgacgacgacgaccacagcactggcaaatacagcagcagctcctgcaacaatggcagccatcagatggccttccatcatggcagcaactcctcctatccctggcacccgcagtgccgccaggccgccgatccatcacgcgatgcagtggagcttagagatctccctcgcaaggtcatgtgggagctgccgaggttcgtgaagatagtggaggtggggcctcgggacggcctgcagaacgagaagggcaacgtcccggcgtccgtgaagatccagctgatacacaagctggtcggcgcgggcctgtcggttgtcgaggccaccagcttcgtctccccaaagtgggtgccgcagctagccgacgcagaggaggtgctgaagggtataaagcaggagccaggcgtgcggtacccggtgctaacacctaacctcagagggttcgaggctgccatcgcagccggcgcgaaggaaatcgcggtcttcgcgtccgcgtctgaatccttctccaggtccaacatcaactgcaccatcgaggagagccttgctcggtaccgcggcgtcacagcggctgccaagaaacacgggctaagcatccgggggtacgtgtcatgtgtgattgcttgccccgttggaggcgcaaccgatccggcgaaggtggcgtacgtagctaaggagctgtataccatgggctgctcggagatctcgctcggcgacacgactggtgtcgggacaccaggtagcgtggttgctatgcttcaagctgtcatgtcgtttgtcccggtggacaagattgccgttcatttccacgatacgtacgggcaggcccttgccaacatcctcgtctcccttcaaatggggatcaacatagtggactcgtcggtgtcgggccttggaggctgcccgtatgccaagggcgccactggcaacgtcgccacggaggatgtcgtgtacatgctccatggcctggggatcgagaccaacgtcgacctcaacaagctcatggaggctggtgactacatctccaagcatctgggcaggccgctgggttccaagaccgccactgctctccgcaagctgaccgcctgaaaaaaccttttcaagcactcccaagagaaatgtatcggttcgaggtcccatctctcagtcatatgaatgtcctgtagttttactttatgctttttttccgctcagacattgcctactctgagcattttattcacacactttgtacccgccgttggatgattctgaataatcttggtgttcctggacgcgagttatgtttgcggaaacgagtgtacggacaaatgtatcagaatatctcggttaacgatctaaacaacaaatgctgctgcaacagtttcttgctgccggacaatctcgtgtttcttacatgcacatgtatcagaatatcacggttaaggataaggatctaggcagtaaattagcaaaactaatggaagcatgcgcctatctcccctgccatatgacacaaaacggagggagaactatgccgtattctgtaccacatgcatacatccgaatgagtttcgaatcaccaagagaactttactatgtatcggaacgagtttacaatcaccatgagaactttgcgtgttccctcttctggtttctaatccgtcgtcatggttactccagggagagctttaagaatggccaggcattccttcagaatcgcctttgcttgttcgcttttttcagactcgcagagctctgtgagttcatcctcgaacttggcctctgttctgttcgacagcgggaagtctctgtacagtttgctcaaatcaagaaggcactccgatgcagcaacgtgaacctgcaaaaacacaggtgatcaattgtggctcgtgagggtaaggtttgctctggacactaacagctaatggcaaactcaacaaccgcttctaaaaccactggtttaagaaacaaccatgtgtctgttttattatttagcatttacatggactacttatgggcttatggcaattccggacaaccctcgcaccattcgtgttagcatgcatgacagtatgagaatgaatgatgttagtgttgtgaaacaggaacactggggttctgttggccagcacttattccagtaacttcactggtagcagccatgacatctgaccagcgaacgggaaaaccaaagtaacttagcatccaagatttattacatatcaggactaattaattaagatctgccatactccaagacttgttacatgccaggggtatttacttaagaactgagcagactaaaaa

SEQ ID NO: 120348 - DNA, 1832 bp, Zea Mays
ctcctccattcctctccctctctctctcgtcggtgggaccgtgggatacgctgacggacggacgggctgaggcaaggccgcctgcgggcgggaggaagaaaagcgaagctgctgcgccctcccctcccccatctccgccccccgcctcacccaccagacgagagagcgagcgcagttcggccgccggtcgcgtccgactccagcaaagccgagcgcccaccccctcaccctattaccttcctctcgggtccaattcggtgcctggctgactccgcacgtcttccccccttttccctccctcgaccgacgaccgtccgtccaccaccggatccaggagcgaccctccctcgtgctcgtcgacgatcgaccggccgccgatcgtccaggatgtcgagcctcgaggagccgctgggtctcggagacctgcctaagttgagtattaacagactcgggcggttcgtgtcgctgggcgctcggaggccaccggccgacgacgacgaccacagcactggcaaatacagcagcagctcctgcaacaatggcagccatcagatggccttccatcatggcagcaactcctcctatccctggcacccgcagtgccgccaggccgccgatccatcacgcgatgcagtggagcttagagatctccctcgcaaggtcatgtgggagctgccgaggttcgtgaagatagtggaggtggggcctcgggacggcctgcagaacgagaagggcaacgtcccggcgtccgtgaagatccagctgatacacaagctggtcggcgcgggcctgtcggttgtcgaggccaccagcttcgtctccccaaagtgggtgccgcagctagccgacgcagaggaggtgctgaagggtataaagcaggagccaggcgtgcggtacccggtgctaacacctaacctcagagggttcgaggctgccatcgcagccggcgcgaaggaaatcgcggtcttcgcgtccgcgtctgaatccttctccaggtccaacatcaactgcaccatcgaggagagccttgctcggtaccgcggcgtcacagcggctgccaagaaacacgggctaagcatccgggggtacgtgtcatgtgtgattgcttgccccgttggaggcgcaaccgatccggcgaaggtggcgtacgtagctaaggagctgtataccatgggctgctcggagatctcgctcggcgacacgactggtgtcgggacaccaggtagcgtggttgctatgcttcaagctgtcatgtcgtttgtcccggtggacaagattgccgttcatttccacgatacgtacgggcaggcccttgccaacatcctcgtctcccttcaaatggggatcaacatagtggactcgtcggtgtcgggccttggaggctgcccgtatgccaagggcgccactggcaacgtcgccacggaggatgtcgtgtacatgctccatggcctggggatcgagaccaacgtcgacctcaacaagctcatggaggctggtgactacatctccaagcatctgggcaggccgctgggttccaagaccgccactgctctccgcaagctgaccgcctgaaaaaaccttttcaagcactcccaagagaaatgtatcggttcgaggtcccatctctcagtcatatgaatgtcctgtagttttactttatgctttttttccgctcagacattgcctactctgagcattttattcacacactttgtacccgccgttggatgattctgaataatcttggtgttcctggacgcgagttatgtttgcggaaacgagtgtacggacaaatgtatcagaatatctcggttaacgatctaaacaacaaa

SEQ ID NO: 120349 - DNA, 2099 bp, Zea Mays
ctcctccattcctctccctctctctctcgtcggtgggaccgtgggatacgctgacggacggacgggctgaggcaaggccgcctgcgggcgggaggaagaaaagcgaagctgctgcgccctcccctcccccatctccgccccccgcctcacccaccagacgagagagcgagcgcagttcggccgccggtcgcgtccgactccagcaaagccgagcgcccaccccctcaccctattaccttcctctcgggtccaattcggtgcctggctgactccgcacgtcttccccccttttccctccctcgaccgacgaccgtccgtccaccaccggatccaggagcgaccctccctcgtgctcgtcgacgatcgaccggccgccgatcgtccaggaaggatgtcgagcctcgaggagccgctgggtctcggagacctgcctaagttgagtattaacagactcgggcggttcgtgtcgctgggcgctcggaggccaccggccgacgacgacgaccacagcactggcaaatacagcagcagctcctgcaacaatggcagccatcagatggccttccatcatggcagcaactcctcctatccctggcacccgcagtgccgccaggccgccgatccatcacgcgatgcagtggagcttagagatctccctcgcaaggtcatgtgggagctgccgaggttcgtgaagatagtggaggtggggcctcgggacggcctgcagaacgagaagggcaacgtcccggcgtccgtgaagatccagctgatacacaagctggtcggcgcgggcctgtcggttgtcgaggccaccagcttcgtctccccaaagtgggtgccgcagctagccgacgcagaggaggtgctgaagggtataaagcaggagccaggcgtgcggtacccggtgctaacacctaacctcagagggttcgaggctgccatcgcagccggcgcgaaggaaatcgcggtcttcgcgtccgcgtctgaatccttctccaggtccaacatcaactgcaccatcgaggagagccttgctcggtaccgcggcgtcacagcggctgccaagaaacacgggctaagcatccgggggtacgtgtcatgtgtgattgcttgccccgttggaggcgcaaccgatccggcgaaggtggcgtacgtagctaaggagctgtataccatgggctgctcggagatctcgctcggcgacacgactggtgtcgggacaccaggtagcgtggttgctatgcttcaagctgtcatgtcgtttgtcccggtggacaagattgccgttcatttccacgatacgtacgggcaggcccttgccaacatcctcgtctcccttcaagtaagcaaagcaacgatggggatcaacatagtggactcgtcggtgtcgggccttggaggctgcccgtatgccaagggcgccactggcaacgtcgccacggaggatgtcgtgtacatgctccatggcctggggatcgagaccaacgtcgacctcaacaagctcatggaggctggtgactacatctccaagcatctgggcaggccgctgggttccaagaccgccactgctctccgcaagctgaccgcctgaaaaaaccttttcaagcactcccaagagaaatgtatcggttcgaggtcccatctctcagtcatatgaatgtcctgtagttttactttatgctttttttccgctcagacattgcctactctgagcattttattcacacactttgtacccgccgttggatgattctgaataatcttggtgttcctggacgcgagttatgtttgcggaaacgagtgtacggacaaatgtatcagaatatctcggttaacgatctaaacaacaaatgctgctgcaacagtttcttgctgccggacaatctcgtgtttcttacatgcacatgtatcagaatatcacggttaaggataaggatctaggcagtaaattagcaaaactaatggaagcatgcgcctatctcccctgccatatgacacaaaacggagggagaactatgccgtattctgtaccacatgcatacatccgaatgagtttcgaatcaccaagagaactttactatgtatcggaacgagtttac

SEQ ID NO: 120350 - DNA, 2086 bp, Zea Mays
ctcctccattcctctccctctctctctcgtcggtgggaccgtgggatacgctgacggacggacgggctgaggcaaggccgcctgcgggcgggaggaagaaaagcgaagctgctgcgccctcccctcccccatctccgccccccgcctcacccaccagacgagagagcgagcgcagttcggccgccggtcgcgtccgactccagcaaagccgagcgcccaccccctcaccctattaccttcctctcgggtccaattcggtgcctggctgactccgcacgtcttccccccttttccctccctcgaccgacgaccgtccgtccaccaccggatccaggagcgaccctccctcgtgctcgtcgacgatcgaccggccgccgatcgtccaggaaggatgtcgagcctcgaggagccgctgggtctcggagacctgcctaagttgagtattaacagactcgggcggttcgtgtcgctgggcgctcggaggccaccggccgacgacgacgaccacagcactggcaaatacagcagcagctcctgcaacaatggcagccatcagatggccttccatcatggcagcaactcctcctatccctggcacccgcagtgccgccaggccgccgatccatcacgcgatgcagtggagcttagagatctccctcgcaaggtcatgtgggagctgccgaggttcgtgaagatagtggaggtggggcctcgggacggcctgcagaacgagaagggcaacgtcccggcgtccgtgaagatccagctgatacacaagctggtcggcgcgggcctgtcggttgtcgaggccaccagcttcgtctccccaaagtgggtgccgcagctagccgacgcagaggaggtgctgaagggtataaagcaggagccaggcgtgcggtacccggtgctaacacctaacctcagagggttcgaggctgccatcgcagccggcgcgaaggaaatcgcggtcttcgcgtccgcgtctgaatccttctccaggtccaacatcaactgcaccatcgaggagagccttgctcggtaccgcggcgtcacagcggctgccaagaaacacgggctaagcatccgggggtacgtgtcatgtgtgattgcttgccccgttggaggcgcaaccgatccggcgaaggtggcgtacgtagctaaggagctgtataccatgggctgctcggagatctcgctcggcgacacgactggtgtcgggacaccaggtgtagcgtggttgctatgcttcaagctgtcatgtcgtttgtcccggtggacaagattgccgttcatttccacgatacgtacgggcaggcccttgccaacatcctcgtctcccttcaaatggggatcaacatagtggactcgtcggtgtcgggccttggaggctgcccgtatgccaagggcgccactggcaacgtcgccacggaggatgtcgtgtacatgctccatggcctggggatcgagaccaacgtcgacctcaacaagctcatggaggctggtgactacatctccaagcatctgggcaggccgctgggttccaagaccgccactgctctccgcaagctgaccgcctgaaaaaaccttttcaagcactcccaagagaaatgtatcggttcgaggtcccatctctcagtcatatgaatgtcctgtagttttactttatgctttttttccgctcagacattgcctactctgagcattttattcacacactttgtacccgccgttggatgattctgaataatcttggtgttcctggacgcgagttatgtttgcggaaacgagtgtacggacaaatgtatcagaatatctcggttaacgatctaaacaacaaatgctgctgcaacagtttcttgctgccggacaatctcgtgtttcttacatgcacatgtatcagaatatcacggttaaggataaggatctaggcagtaaattagcaaaactaatggaagcatgcgcctatctcccctgccatatgacacaaaacggagggagaactatgccgtattctgtaccacatgcatacatccgaatgagtttcgaatcaccaagagaactttactatgtatcggaacgagtttac

SEQ ID NO: 120351 - DNA, 2084 bp, Zea Mays
ctcctccattcctctccctctctctctcgtcggtgggaccgtgggatacgctgacggacggacgggctgaggcaaggccgcctgcgggcgggaggaagaaaagcgaagctgctgcgccctcccctcccccatctccgccccccgcctcacccaccagacgagagagcgagcgcagttcggccgccggtcgcgtccgactccagcaaagccgagcgcccaccccctcaccctattaccttcctctcgggtccaattcggtgcctggctgactccgcacgtcttccccccttttccctccctcgaccgacgaccgtccgtccaccaccggatccaggagcgaccctccctcgtgctcgtcgacgatcgaccggccgccgatcgtccaggaaggatgtcgagcctcgaggagccgctgggtctcggagacctgcctaagttgagtattaacagactcgggcggttcgtgtcgctgggcgctcggaggccaccggccgacgacgacgaccacagcactggcaaatacagcagcagctcctgcaacaatggcagccatcagatggccttccatcatggcagcaactcctcctatccctggcacccgcagtgccgccaggccgccgatccatcacgcgatgcagtggagcttagagatctccctcgcaaggtcatgtgggagctgccgaggttcgtgaagatagtggaggtggggcctcgggacggcctgcagaacgagaagggcaacgtcccggcgtccgtgaagatccagctgatacacaagctggtcggcgcgggcctgtcggttgtcgaggccaccagcttcgtctccccaaagtgggtgccgcagctagccgacgcagaggaggtgctgaagggtataaagcaggagccaggcgtgcggtacccggtgctaacacctaacctcagagggttcgaggctgccatcgcagccggcgcgaaggaaatcgcggtcttcgcgtccgcgtctgaatccttctccaggtccaacatcaactgcaccatcgaggagagccttgctcggtaccgcggcgtcacagcggctgccaagaaacacgggctaagcatccgggggtacgtgtcatgtgtgattgcttgccccgttggaggcgcaaccgatccggcgaaggtggcgtacgtagctaaggagctgtataccatgggctgctcggagatctcgctcggcgacacgactggtgtcgggacaccaggtagcgtggttgctatgcttcaagctgtcatgtcgtttgtcccggtggacaagattgccgttcatttccacgatacgtacgggcaggcccttgccaacatcctcgtctcccttcaaatggggatcaacatagtggactcgtcggtgtcgggccttggaggctgcccgtatgccaagggcgccactggcaacgtcgccacggaggatgtcgtgtacatgctccatggcctggggatcgagaccaacgtcgacctcaacaagctcatggaggctggtgactacatctccaagcatctgggcaggccgctgggttccaagaccgccactgctctccgcaagctgaccgcctgaaaaaaccttttcaagcactcccaagagaaatgtatcggttcgaggtcccatctctcagtcatatgaatgtcctgtagttttactttatgctttttttccgctcagacattgcctactctgagcattttattcacacactttgtacccgccgttggatgattctgaataatcttggtgttcctggacgcgagttatgtttgcggaaacgagtgtacggacaaatgtatcagaatatctcggttaacgatctaaacaacaaatgctgctgcaacagtttcttgctgccggacaatctcgtgtttcttacatgcacatgtatcagaatatcacggttaaggataaggatctaggcagtaaattagcaaaactaatggaagcatgcgcctatctcccctgccatatgacacaaaacggagggagaactatgccgtattctgtaccacatgcatacatccgaatgagtttcgaatcaccaagagaactttactatgtatcggaacgagtttac

SEQ ID NO: 120352 - DNA, 2597 bp, Zea Mays
ctcctccattcctctccctctctctctcgtcggtgggaccgtgggatacgctgacggacggacgggctgaggcaaggccgcctgcgggcgggaggaagaaaagcgaagctgctgcgccctcccctcccccatctccgccccccgcctcacccaccagacgagagagcgagcgcagttcggccgccggtcgcgtccgactccagcaaagccgagcgcccaccccctcaccctattaccttcctctcgggtccaattcggtgcctggctgactccgcacgtcttccccccttttccctccctcgaccgacgaccgtccgtccaccaccggatccaggagcgaccctccctcgtgctcgtcgacgatcgaccggccgccgatcgtccaggtactgcgcaagctcatcaccgccgcagcttcgctgctcgcttcttactgcctagctggggtttgtggttctgtttcgtaccgcaactgattcatcatcgaaacggaagccgacaccaccaaggccgagcgacttgctgagacggacaaggtactctagtccacgacgaacgaaattgagcttatggattccctgttcttctcaggaaggatgtcgagcctcgaggagccgctgggtctcggagacctgcctaagttgagtattaacagactcgggcggttcgtgtcgctgggcgctcggaggccaccggccgacgacgacgaccacagcactggcaaatacagcagcagctcctgcaacaatggcagccatcagatggccttccatcatggcagcaactcctcctatccctggcacccgcagtgccgccaggccgccgatccatcacgcgatgcagtggagcttagagatctccctcgcaaggtcatgtgggagctgccgaggttcgtgaagatagtggaggtggggcctcgggacggcctgcagaacgagaagggcaacgtcccggcgtccgtgaagatccagctgatacacaagctggtcggcgcgggcctgtcggttgtcgaggccaccagcttcgtctccccaaagtgggtgccgcagctagccgacgcagaggaggtgctgaagggtataaagcaggagccaggcgtgcggtacccggtgctaacacctaacctcagagtgagatctactccgccaccgttttcctttttcctctaagaaacctacgtgtattctgctactactagtagagtcgagaagaaggtgtgggtacggtctgtgcatgatgaatcatgagtcgagcgcttttccaggggttcgaggctgccatcgcagccggcgcgaaggaaatcgcggtcttcgcgtccgcgtctgaatccttctccaggtccaacatcaactgcaccatcgaggagagccttgctcggtaccgcggcgtcacagcggctgccaagaaacacgggctaagcatccgggggtacgtgtcatgtgtgattgcttgccccgttggaggcgcaaccgatccggcgaaggtggcgtacgtagctaaggagctgtataccatgggctgctcggagatctcgctcggcgacacgactggtgtcgggacaccaggtagcgtggttgctatgcttcaagctgtcatgtcgtttgtcccggtggacaagattgccgttcatttccacgatacgtacgggcaggcccttgccaacatcctcgtctcccttcaaatggggatcaacatagtggactcgtcggtgtcgggccttggaggctgcccgtatgccaagggcgccactggcaacgtcgccacggaggatgtcgtgtacatgctccatggcctggggatcgagaccaacgtcgacctcaacaagctcatggaggctggtgactacatctccaagcatctgggcaggccgctgggttccaagaccgccactgctctccgcaagctgaccgcctgaaaaaaccttttcaagcactcccaagagaaatgtatcggttcgaggtcccatctctcagtcatatgaatgtcctgtagttttactttatgctttttttccgctcagacattgcctactctgagcattttattcacacactttgtacccgccgttggatgattctgaataatcttggtgttcctggacgcgagttatgtttgcggaaacgagtgtacggacaaatgtatcagaatatctcggttaacgatctaaacaacaaatgctgctgcaacagtttcttgctgccggacaatctcgtgtttcttacatgcacatgtatcagaatatcacggttaaggataaggatctaggcagtaaattagcaaaactaatggaagcatgcgcctatctcccctgccatatgacacaaaacggagggagaactatgccgtattctgtaccacatgcatacatccgaatgagtttcgaatcaccaagagaactttactatgtatcggaacgagtttacaatcaccatgagaactttgcgtgttccctcttctggtttctaatccgtcgtcatggttactccagggagagctttaagaatggccaggcattccttcagaatcgcctttgcttgttcgcttttttcagactcgcagagctctgtgagttcatcctcgaacttggcctctgttct

SEQ ID NO: 120353 - DNA, 438 bp, Zea Mays
atgcccatgttgtggccaatgaatgtatcctttggtgtgctgcgggtgcctctgctcttcaggagctcctcactcgccaactcgctaaaaaaagggcgtacccagtgtcgtaggcttcccgcactgtgcggggtcggtctggggaagggtactttaagcgtcaagccttacccgcataatatgcagaggctggggctcgaacccgggaccttccggttacagacgttgcaaatcctgctttatcgttgcctagagttattagcccttccaaagttgacaagaggcagaaaaacaatgaggcaacaaatgatgattgccctaaagaagcagaggacagctcaagtgatgacagtgattttgttgactgattatgacttcgagaatgatgatggcctttttgttgacaatgttgatgagcatgggatagatgaaagatga

SEQ ID NO: 120354 - DNA, 375 bp, Zea Mays
gatgtggtccttttcataaagccaattgaagcatacctgaattgtgctaagataatactaaactgttttggttcggcttccgatctggtaaccaatatgctcaagagcagtgctattccaattagatgtgatgatcagcaggtgcttgctggctgcagagtactgcattgcaatcccgctgcgtttccttgcaggtatctggggttgcccatctctgataaaaaattgaggaaatgtgaccttaagttatggattgagaagattgcagaccgtctacctaactggaaggctcggctgctcaacctggctgggcggactgcgctggtgaagtctgttctatcggccattccgacttatcttcttattgcaatctga

SEQ ID NO: 120355 - DNA, 100 bp, Zea Mays
gtaataatatcagaaacaagttaattttaccgaatttgtggaatagactcatgatgcaccatctcatctatctcatttataatggattcactgttcaaac

SEQ ID NO: 120356 - DNA, 678 bp, Zea Mays
atggccgcggagagctgccacccgcgcggtctctcgtggttcgcgaggtcgtgcatccccgccgaccccgcccgccacaccgccgtcccggtccccgtcccagtccccttctcagtccccgacgccgaggatcccgagcccgaaccccccatcgcggggctccccgacgagctcctgctggagatcctcgcccgcgtgccccgcgcctcgctcccgccgctccccgccgtctgccgccgcttcgcctcgctcctcgcgtcccaggcattcctccagctccgccgcgcgcccgacctgccgcccgggttccggcgggccgctgctgctagagcacatgactgccagcatttcaggagcctttggcctcccaagggccggtatcttcgcgtctgcaagccggcacaagggaccagggaagagtttcaattcacaaaactggacccatacatgcaattagcagcatacatatacacacccaactgcctgtccaacaatggaggatgctatggtgaatgccgttgcactttcttgcgtatcgcaacagacttgctcagcattgcaatgaggagaggccgagagggcatgaagataccatctttgaaggcaagggctgcggttggagggattggtttcacaagagcggctgctaggtcgacatggtggggatgtgaacgttaa

SEQ ID NO: 120357 - DNA, 2144 bp, Zea Mays
aatagtcatgtgcgctcgacgcgtcgcgtgcctctctctccgctccctctgacttgttcgcttgccgtcctcgctcgcggcaaagctgcagcgtgtctcggctccggcgcgccaccgctcgggacgcccgacggatccgctcccgcgtgcgctcgatatcccttgcttcaacggtccaagtcaacccccccaccaaatcgccgtccgtccggccgctgccgcaccctagcaggatcgcagcgtgcacagctcttcttcaatctgcaggattgcagccacgcacaagtcgtagctgctcgctcaattgtacttcagatagcatcttctttgattgtcctcttctgcatactcttgttgatgtttccttggaactttgagctttggaagatgccaaggagaacaggaaatgctgcttcgaccaaatcagttgaattggtcaaacaagaccaaatggagtttgatcatcctgatgaggtagatgaagaggaagaagttgagtatgaagaaattgaggaggaggttgagtatgaagaggtagaggtagaggaggaggaggaggaggaggaggaggatgaaattgaaggtgtgcgtgaagttgatgctaatcatgacagtaaaatagtggatgatgatcccaaggatgggaatgaaaaagaaaagcatgctgagcttcttgctcttcctcctcatggagctgaagtttatgttggggggctttcctctgatgtatcttctgaagatctcaaacaactatttgaatctgttggagaagttgcagaagtgcgaatgcgaggaaagggggataacaagacatatgcttttattaatttcagaactaaagagatggctttaaaggccatccaaaagttgagcaataaagacctaaagggaaaaaagataaaagtttcatcctctcaggctaagaataggctttttattgggaatgtaccccatgattggacacctgatgatttcaaaaccgcagtggaagaagttggtcctggagttttaaaagttgatctcatgaaggcaccaggctcaggtcgcaataagggttatggctttattgaatactacaaccaggcatgtgcagagtatgctaagcagaagatgtctactccagaattcaaactagatacaaatgctcctactgtcagctgggcagatcataagaatgctagtgaagctacatctacttcacaggttaaatctctatatgtcaaaaacctccccaagactgttactcaagagcagctgaaaaagctgtttgagcatgttggagaaatcacaaaagttgttattccacctgcaaaatctgggcatgaaaatcggtacggttttgttcattttaaggaacggtccatggttatgaaggctctgaagaacactgagagatatgaacttgatggtcagctgctggattgttcacctgcgaaacctcctgctgataagaaggatgatactggatcatctcctactgcaaaaggacgtccattacccccaagttatgccccacttggatatggactagcgggagcttataatccacttggaaaaggactggcaggtgcttacaattcccctggaaacggactggcaggtgcttatggcgtgctttctgctcatgccgcacagccaatgttgtatgctccaggtgcttctccaggttcaacaatgatcccaatggtcctaccagacggccgtcttgtatacgtaccacagactgcagggcagcagcctctgcatgtgacttcgcctctgcctcagcaaggcggtcgtcgattcggcggcggtggcggatccagctccggcggaaagcgacagaggggagatgaccgtggcagtaacagcaacagtagccgcaggggctggcaccgtccgtattgatgtttgcaatgccgctgatttgcaattagaagttagaacccagcaattagcatatttatcgcagtaccatgctggaaactgtactttgaattatttgtttttcctgtgtgcttcgtagcaggcctgccctaaaaagaacgatagtaccggaaggggcaaatgtagtggtaatatactctatacatttgtaaccatctccatcctgccgttgaccgtcttaggttattaaaataaatatatttcttccgttctttttt

SEQ ID NO: 120358 - DNA, 2080 bp, Zea Mays
aatagtcatgtgcgctcgacgcgtcgcgtgcctctctctccgctccctctgacttgttcgcttgccgtcctcgctcgcggcaaagctgcagcgtgtctcggctccggcgcgccaccgctcgggacgcccgacggatccgctcccgcgtgcgctcgatatcccttgcttcaacggtccaagtcaacccccccaccaaatcgccgtccgtccggccgctgccgcaccctagcaggatcgcagcgtgcacagctcttcttcaatctgcaggattgcagccacgcacaagtcgtagctgtttccttggaactttgagctttggaagatgccaaggagaacaggaaatgctgcttcgaccaaatcagttgaattggtcaaacaagaccaaatggagtttgatcatcctgatgaggtagatgaagaggaagaagttgagtatgaagaaattgaggaggaggttgagtatgaagaggtagaggtagaggaggaggaggaggaggaggaggaggatgaaattgaaggtgtgcgtgaagttgatgctaatcatgacagtaaaatagtggatgatgatcccaaggatgggaatgaaaaagaaaagcatgctgagcttcttgctcttcctcctcatggagctgaagtttatgttggggggctttcctctgatgtatcttctgaagatctcaaacaactatttgaatctgttggagaagttgcagaagtgcgaatgcgaggaaagggggataacaagacatatgcttttattaatttcagaactaaagagatggctttaaaggccatccaaaagttgagcaataaagacctaaagggaaaaaagataaaagtttcatcctctcaggctaagaataggctttttattgggaatgtaccccatgattggacacctgatgatttcaaaaccgcagtggaagaagttggtcctggagttttaaaagttgatctcatgaaggcaccaggctcaggtcgcaataagggttatggctttattgaatactacaaccaggcatgtgcagagtatgctaagcagaagatgtctactccagaattcaaactagatacaaatgctcctactgtcagctgggcagatcataagaatgctagtgaagctacatctacttcacaggttaaatctctatatgtcaaaaacctccccaagactgttactcaagagcagctgaaaaagctgtttgagcatgttggagaaatcacaaaagttgttattccacctgcaaaatctgggcatgaaaatcggtacggttttgttcattttaaggaacggtccatggttatgaaggctctgaagaacactgagagatatgaacttgatggtcagctgctggattgttcacctgcgaaacctcctgctgataagaaggatgatactggatcatctcctactgcaaaaggacgtccattacccccaagttatgccccacttggatatggactagcgggagcttataatccacttggaaaaggactggcaggtgcttacaattcccctggaaacggactggcaggtgcttatggcgtgctttctgctcatgccgcacagccaatgttgtatgctccaggtgcttctccaggttcaacaatgatcccaatggtcctaccagacggccgtcttgtatacgtaccacagactgcagggcagcagcctctgcatgtgacttcgcctctgcctcagcaaggcggtcgtcgattcggcggcggtggcggatccagctccggcggaaagcgacagaggggagatgaccgtggcagtaacagcaacagtagccgcaggggctggcaccgtccgtattgatgtttgcaatgccgctgatttgcaattagaagttagaacccagcaattagcatatttatcgcagtaccatgctggaaactgtactttgaattatttgtttttcctgtgtgcttcgtagcaggcctgccctaaaaagaacgatagtaccggaaggggcaaatgtagtggtaatatactctatacatttgtaaccatctccatcctgccgttgaccgtcttaggttattaaaataaatatatttcttccgttctttttta

SEQ ID NO: 120359 - DNA, 3377 bp, Zea Mays
cgcggcctgggcgtgcgaccgagactgcgcgaagggagcgatggagaggctggagagctacctgaaggagcacttcgacgtgccgcccaagaacccctctgaggaggcgcagcggcgatggcggtccgccgttggcgcgctcgtcaagaaccgccgccgccgcttccgcatggtgccggacctccaccgccgcagcctggacgaggcccagcggcggtccacccaggaaaaaatccggcttgccctctatgtgcagaaggctgccatgaccttcattgatggtgccaagcacaaagactaccggatcacagaggatatcagaaacgctgggttctccataaacccagacgagctggcatcgatcacaagcaagcacgacgcgaaagccttaaagatgcacggcggggtggacggggtgtcgaagaagatccggtcggcgttggaccatggcatatctgccagcgacctagacacgaggcaaagcatctacggcgtcaaccggtacgcggagaagccttcgagaacgttctggatgtttgtgtgggacgcgttgcaggacatgactctgatcatcctgatggtgtgcgctctgctgtctgctgccgtcggtctggcgtctgaaggctggcccaggggcatgtacgatggcctggggatcatgctcagcatcctgctggttgtcatggtcactgctgtcagtgactacaggcagtcgctccagttcaaggagcttgacaatgagaagaagaagatattcatccatgtgaccagagacggatcccggcagaaggtctctatctatgacttggcggtcggtgacatcgtgcatctgtccatcggagaccaggtgcctgccgacgggctgtacgtgcatggatactcccttttgatcgacgagtccagcttgtcaggcgagagcgagccggtctatgtttctcaggacaagccattcatcttggcggggactaaggttcaggatgggtcagctaagatgatggtgaccgccgtcggcatgcgcaccgagtggggaaggttgatgagcacgctgagcgagggaggagaggacgagacgccgctgcaggtcaagctgaacggagttgcaaccatcattggcaagatcggcctgttgtttgccacattgacatttgttgtcctgatggttaggttcctcattgagaaaggtttgacggttggtctgtccaaatggtactctactgatgcgctgactatagtgaactacttcgcgactgctgtcactattatcgtcgtcgctgttcctgaagggctgcctcttgctgttactctgagccttgcatttgcgatgaagaagctaatgaatgataaggcacttgtccggcacctttcagcgtgtgagactatgggatctgccggaaccatctgcacggataaaacgggaactttgactactaaccatatggtggtcgacaagatatgggcatccgaggtctcaaaatcggttaccgatagcagtagtttggaagatctggcttctgccgtttctccagccacattgagcctgcttctgcaaggaatttttgagaacaccagcgcagaggtagtcaatgagaaggatggcaagcagactgtcttgggaactccgacagagagggcaatatttgagtttggcttgaaactggaaggtcttggtgctgaggataggacctgcaccaaggtcaaggtcgagccgttcaattcggttaagaagaagatggcggtgctggtctcgttgcacgatggcggctcgtaccgctggttcaccaaaggcgcgtcggagatcgttgtggagatgtgcgacatgatgatagatggcgatgggaacagcgtccccttgtcagaagctcagagaaagatcgtcttggatactatcaactcctttgcttcagatgctttgaggacactgtgcttggcgtataaggatgtggatggtctcgaggacgacgacgacgatgcagatagcccaacaagtggtttcactctaatctgcatttttggcatcaaggatcccttgcgcccaggagtcaaggacgctgtggaggcctgtaagtctgctggcatcgtcgtgagaatggtgaccggtgacaacatcaatacagccaaagctatagccaaagagtgtgggatactaactgatggtgacctagcaatagaagggccagaattccgcagcaagagcccagaagagatgagggacataatacctaagattcgggtcatggctcgttctttaccgttggacaagcatacccttgtgacgaacttgcgaggtatgtttcgcgaggtggttgctgtgacaggtgacggcacgaatgatgctccagcgttgcatgaagcagatatcggccttgctatgggcatagcaggaacagaggttgccaaggagagtgctgatgtgatagtgcttgatgacaatttcacaactataataaatgtcgcgaggtggggtcgtgcggtttacataaacatccaaaagttcgtgcagttccagctgactgtcaacattgttgctttggtcatcaacttcgtctcagcatgcattacagggagcgctccgctcacagcggtgcaactgttgtgggtgaatatgattatggatacattaggagctctagctctagcaacggagcctccaaacgatgacatgatgaagagaccacctgtcgggcgaggggaaagcttcatcaccaaggtcatgtggagaaatatcattgggcaaagtttgtaccagttggttgtgctcggagccctcatgtttggcggggaacagtttctgaacatcaagggcgcggattccaaatctgttgtcaatactctcatattcaactccttcgtgttctgccaggtgttcaacgaaataaacagcagagaaatggagaagatcaacgtgttccgcggcatggtcaccaactggatcttcatcgcgatcatagccgcgacggtcctgttccaagtggtgatcgtagagctgctcggcacctttgccagcaccgtcccactcgactggcggctttggctgcttagcgtcggcctcggatcggttagcttggtcgtcggtgccgtcctcaagtgcataccagttgccaaatcgaacggagctcctgcgagtcccaacggctacgccccgctccccagcggtcctgacgacatttagctgaagaagaggggatgcatggagaaaagaagttgcatccgatttttgcgtcttgtttggaataagtaatgaaccactggctaggctcagctttagcagattgttctatatatatatatatatatatattgtcctgcaattacacgatcttcctgtttgctgattgttctatatatgaatgaacgcaatgcaaggcaccattatttcc

SEQ ID NO: 120360 - DNA, 1686 bp, Zea Mays
gtggtctatcggagaaacaaaattttgtatacaactccaaatagctagatagaagtaatccaaaaaatacgtttctttgttgcagataaccgtctcttcatcttcctcgtgcgcttccagtcaggcaaaggcggcggcacgcccccacgatcttgcgcgcgcgctggactcgcagcctcgcatcgcaagctagttctttgggggcggattccccgattgcctgccattattctggcttggttcttgcctctgtttgggtactccggcgaatcgtctgagttggggactggtcctcctcctcctcccgatggggggctggaaccggtcgcggcatgtgagatggcagcgtgaccgcccgcggcgccctccgctccctccgcctgattacggaccggagcactgctcagtcccattatgggaaagggaattctgcagctacgtcggcaacatttcttggcaaaggttctgtgaaaacaagcggtatgcttcagtagacaataccctcgagcactgggacgattcaggagctcttgagaatttccagaactcaaaggcgaggttctgggctcactaccatggccaaccttcggatattcctttgccggaccctgatatgtacatcgacaaggtcgaccaccgctgcagagtcgaccctgagctggtagctgatctggataaggtacgggtaccatttgaaacggattacagttctggcctggctactggatcgaccgatgccggggcggataacaagcgcgcccagaaccagtgcgggaactgggatatctatgtggaaaaaccatctgaagtcaacaggtgggaatgggaggctagttcaaaacccgacttgagctggggagcgaagaatgaaacttcgggtgtatggggtaatggcaactcaggttggggtgatgctctggagaaacccaactggcgtggctcgagcaacgaccattactcgtcgaacaatagaaacagcggcttttttggtggatccagcaataggcaccagcaggaggatccaacccatgcatctggaaggaaacggaacagcggggagtactcacagcagtggaacagcaagcataggagacaggatgggcggtatcaaattagcagttgccggggacgaaatgacgaatggcgtccatggcactagatgacttgcagataaatggttaccaggggaaaaatggctcttggttttgtggcagaagcgtgaaggtcttattccgttcagcggggattggaccggattgagaggggattttgtcctaaaatccacctcaaccctcttcaacctcttccaatccgcttggatcgctggttaaccgaacaagaccggaagaaattttggtgaaagacgagtaggttgtagcttttgttttctcttggttgtaatggaggagcatgactgctatcttgctaccgtttcagtgcaaagaaatgttctccacctggctgtacttctccattaacgcaatggtctgaatcttctggactgttatgtgctgtggcgcagatatcaacaaaggaaaaaaaaatggatgtcttctgaatcttctccgtttgaatatttgtctatttgatatacctaaactgattactctgcgttaacaattcttacctcatggctcatgcattccagcctatatatacaatggcaacgcaagttgtatttgttcc

SEQ ID NO: 120361 - DNA, 1857 bp, Zea Mays
tgaataccagtatccgcagtgtaaaagcttcattttattacaaaaaaaaaaatcttcgtcctccccgcgaagacgcttcccgagcttctccttcgttcctcctcttccccgcggctctcctctgccccgcaccggcaccgctagggttttgccgccgacctctcgctcgcttccgggctccgcgaggcaaccgtccggaccggccggtcgaaatggtggatgtggaggaggtcgggaacaagatgcaatcgcagatgcgcctgcacgcggagccggatgacgccgccgccgacctccccctcccggcgctcttcgacagggcgtcgcggcttcacgccctggcctccagctccgccctcgaccaggatgggatccgcaccggggttgagctgctgcggcgctgcgacgagatggtcggcaggctcggtcttttctcccccaacgagaccaaggacgacgtctccaccgcaaacctcaagtacctactcgtcccatattaccttgcggaaatgaccgagaagatggcgcaggaggatcggatcccggttcttaaggcgtcgcaggaccatttgaaggagttcattgctctatgcgaagtactagagcttattccagaggatgagctagaattgtctaggcagaagcagtctgatactatggcaaacagaagagcacagaaggttgcccggttcaaacgtcaaaaggctgcagaaacaaagctccaagagatcagagagagaaaagaaaggcgtggacgctcattgagagcaactgctttgtctgccccagttgaagctggagaggaagatgacctggaggatgacggggaggaagaaagggaggcttggttagctaccatctcattggctatctgcaaggcttttgatcttctcgacatgttaaagaaggaagaagaaatgcttctagctgtaaaggaaaggaaggcaaaggacgggaatgcatttgctcgtgaaatgctcgacgaacggacaaagaaggctgaagcatggcaccacaaagctgccagtcgtgtggcgtattccaaaccagccgatccgatcacctgtgcaacatttgctcaggatgtcattgaagggagagcgagcgtttcacaggcccacgagcacaaacaccagcccctgatatttggacctgcaagccttgttggcggcggtctgaccagtgaaagggaaagaatggcagcgcaagtttttcagcccagttacaggatgccaacaatgagcatagaagaggctggcttgcgcgagatgaagatgatggagaggtggcaagagaggaccgccgagatgatgagagaagcaaactccgcgtggcacaagggcggcgacagcagcagcagctcgatgccgcaaggggagggcggggacgaggatgccgaggaggccaaggcacgagcgtgggacgactggaaggacgacaaccctcgcggcgctggcaacaagaagctcacgccctgtggctagactgcaaatcgaagcacgctcgctgtgtgatcgtacggtgtttgactcgaccagtatttagtttgtatctgacgatcagtgtatttattatataggctgcttctgtaacagtgtgtttatacaccatccactgcagcttcttcacacaggtgtttccgaagttaactgggttagacaaactgtgttgtccaagcaagagtatctaacaaatagctacgtaactacttcatccgtttctttttagttgtcgttgatagttcaaaccgtttctttttagttgtcgttggatagttcaattttgcactatccagagacaactaaaacgaaacagagggagtattaactaatttactaaaaatagataatagttaaa

SEQ ID NO: 120362 - DNA, 2037 bp, Zea Mays
atggagcgagaagaagtagtgcacggggttgagcttgaccgctgcgacatcgcgggccagcggccactggacgggctcctgctcggcgccagcgtcagacccatcgctgctgaacaagcggaagaggccgcgacggtggtggggcttctcgtggatcaggcacgtgaggacggcgacagagtggtccccctagcggaggcacatgatggagagcgtgccagtgctgaggtcgacgctgcggtcggggtagatgaggtggagctgcgccccggggacagcgatgatggtctcctctgtggtgggcggtggcggtgtcgcgtcctcttcgaccgtctcggggaagaggttctgtgcgagctcattggggtcgatggtggggtagagggagttgcctgtggtagcgccgatggaggtggtgggtgcggagaagaaagtggtgttgagatcagggtgggactggtccacatccgggtagaggctctacttggcattcgaggaagcgaaagccatggttgcgtagctgtacttgatgatgaggctgtcatgaggaaacaactccacgaggcgagagaacagctggtgagacaaagtagtgacaaagaaataaacccaatgggacaggtcggcagccttgaggaggcagctaaagctaaagaagccgatgtagatgggatcattgatcagggacgtgaggcagggggtcatatcatcgattacgtcgacgtcaaggtgaacaacaccgtccacaaggggatgccacacaagttctaccatggtcgcaccagtcgcgtcaggaacaccaaatgtgccatcggcgtcgagataaacaagcagtgtaatagctatgtttgtggttgtcgtggagttttagctgaagtggcactatatcaggcgtcagagtggcaccacatcctccacgagggaggttactgttgcgggagtcttcagcaggtcacttgtgcctttcagcatgttgtgctcttgcgtctactggttataaacaataaatgctatgatggtgttaagggtgatatgtggtcatgtggagtgattttctttgtcctcatggcggggtacctcccatttgaagattcaaacctaatgtcgctttacaagaagataatagctattgcggagcacattaacaatgagtgcttcaagaagtggacagacaactgttgtgattacccctcgccagccaaacatcatactgtgattgctacagagctgggggaattgtttacctggggatcaaatagagagagtcagcttggttacccttctgttgatacccaaccaacaccaaggcgtgttggttcgctcaagcaaaggataatttcaatagctgctgcaaacaagcactccgctgtagttgctgatactggcgaagtattcacctggggttgcaataaggagggccaactaggatatggcacttcaaactcagcatcaaaatgtatcccaagaatggtggagtacttgaaaggaaaagtacttagaggtgtttctgcagcaaagtatcatacaatagtgttaggagctgatggagaggtgttcacttggggccatcgccttgtcaccccacggcgtgtcgtagtagctcgatgccttaagaagggtggaaatacaaatctgaagtttcatcgtatggaacgacttcaagtgatttcagtggctggaacaacgcacagtactgctttaatagctgatggtgctcttttctactgggtttcatcagatcctgatctaaaatgccagcagatattttcaatgtgtggaaggaatattgtgaacatctcggctggaaagtactggaccgctgtggctacattaactggtgatgttttcatgtgggatgcaaagaaacgtaaggacgaaacgccaattttcactcgggtgcatggtgttaagcgagcaacatttgtttgtgttggtgaaacagacatgcttgtgctctcaagtatataccatcctgagtatccatctttcctgtcttttaccatgtccaagttcagtcatttgctcttggattcctag

SEQ ID NO: 120363 - DNA, 1592 bp, Zea Mays
cgcgctcacgccccggggccgcttccgtttcggctccccctcccctcccctcccgtaaacctctgaaccctcatcgagtttctgtggacgccacgccacgcgaccatacgtgtatagcacgcagcgcggcatcggcgtcgcacgcactcgcgcttgccgctggacggaggagcggagcaccgatcggccgggctcggtgcacgcgcctagcggatgaagatggccgtgctcgcgggcgcggccgtcgttgcggtggcggcggcggcgatggtcgccgcgctcctgtcctccccggacgcgctgcgcgacgtcgcggtgctggagattggcggcggggaaggccgtgtcgagttggtccccgtggacgccggcgccgcggggcccgagagcctggcgttcgacccggccggcggcggcccgtacgcgggcgtgtcggacggccgcgtcctccggtgggtccccggcgagcggcgctgggaagagcactcggcctcctgcgcgcccgaactgctggacagctgcaggggctcccaggacccggggcgcgagcacgagtgcgggcgcccgttgggcctcaagttcaaccccgacacgggggagctctacgtggccgacgcctaccacggcctgcgcatggtcgcgccgggcccgggcggcggcaaggcgtcgaggccggtggcgccggagtggtggcagggcgcgcgcgccttcagcttcgccaacggcgtcgaggtcgacccgggcaccggcgccgtctacttcaccgagacgagcacgaggttccagaggcgggagttcctgcgcatcgtcgtgtccggcgacacgacggggcggctgctgcggtacgacccgaggggcggcggtggggtggaggtgctggccgacggcctggcgttccccaacggcctcgcgatgagcagcgacggcacgcacctgctgctggcggagaccaccacggggaggatcctccggtactggctccgcccgacggctcccaaggcgccggcgctgctggaggaggtggcgcggctgccgtggttcccggacaacatcaggatgagcccccggggcggcttctgggtggggctccacgccaggaggggcaagctcgcccagtactgcatctcctacccctggctccggcgcctggtgctggcgctgccgccgcgccacgtccagcgcgcctcgtcgctgctcagccgcctcgggcggcaggtcatcgcgctgcggctgagcgaggaggacgggagggtggtggagatggccagcgtccacggggatcttcggagggtgttcaggtccgtcagcgaagtggcggagaggaacggcagcatctggattggctctgtcatgtcgccgtttctcggagtctacaagttgcagtagaggcatttacgcttaaatatggattcagtagcttattatagcaaaggaaaacatacatcgcatctatatttgtgtataaaattccttgtgtcgtcgatggacatgttcatctggccagaggttgtgaaaagcgtctatgcatctatgaactgaatgcatgagatggtcctgggccccattcaacttgtgtgaagccttgagcaact

SEQ ID NO: 120364 - DNA, 2674 bp, Zea Mays
cgtgtcagccagctccgctccgtggcgcctacgaaaccaccacccgtccggatccggatatattctccattccctgctgactgactgtgactgacatgtcgtcggactcctctccttttccagatcactcacatacacatttcgcgcatccactgactttaacacaagatccccgccagcgccgccgcgcgaccaccccttcctaaaccccgacgaccaccaaccatggccttcaacgctaaaccctactgctccaccaccgccaaaccgcccacccccgccgcccaccgctcgccgtccggcccgtccccctgcatctccgtccgcgccgccgccgtatccccccgcgcccggcactcagcctatggcctctccgccgccggcaacgcgtcctccagcaccgtccgcctccgcgcgctggcccagcgcacccgggcgcagccgcagcctccccggcggcggcccgagtacgtgccgaaccgcatcgacgaccccaactacgtgcgcatcttcgacaccacgctccgcgacggggagcagtcgccgggcgccaccatgacgagcgccgagaagctcgtcgtcgcgcgccagctggcccgcctcggcgtcgacgtcatcgaggccgggttcccggcctcctcccccgacgacctcgacgccgtgcgctccatcgccatcgaggtcggcaacccgccgccgggggacgacgggggcgcccacgtgcccgtcatctgcggcctctcgcgctgcaacaggagggacatcgacgccgcgtgggaggccgtcaggcacgcgcggaggcccaggatccacaccttcatcgccaccagcgagatccacatgcagcacaagctcaggaagacgcccgaccaggtcgtcgccgttgccagggagatggtggcgtacgcacgcagccttgggtgcgccgatgtcgagttcagccctgaggatgccggcaggtcaaatcgagaattcctgtaccatatactggaggaagtcataaaagctggggcaaccactcttaatatcccagatactgtcggatacactcttccttatgaatttgggaagttaatttctgacataaaggaaaacactcctggaattgaaaatgccattatttccactcattgccagaatgaccttggccttgcaactgccaacacattagcgggtgctcatgcaggagcacgacagttagaggtgactattaatggtattggtgaaagggctggaaatgcttcattggaagaggttgtcatggcaattaaatgtcgtggggagctcttagatggtctatatacgggaataaattcccaacatattactttgacaagcaaaatggtacaagagcacagtggacttcatgtacaaccacataaagctattgttggtgccaatgcctttgcccatgaaagtggaattcatcaggatgggatgcttaaatataaaggaacatatgaaataatatcgcctgatgatattggtttagcacgtgcaaatgaatttggtattgttcttgggaaactcagtggaaggcatgcagtgagatctaagctggtagagcttggatatgaaatcagtgacaaggaatttgaagatttctttaaacgctacaaagaggtcgcagagaagaaaaagcgtgtaactgatgaggacatagaagctttattgtcagatgagatattccagcctaaggttatttggtcccttgctgatgtacaggcaacatgtggaacacttggcttatctacagcaactgtgaaactgatagggccagatggagaggagagaatagcatgttcagttggaacaggtccagttgatgcagcttacaaggctgttgaccaaataatccagattccaaccgtcctccgagaatacggcatgacttcagtcacagaaggcattgacgctattgcgacgactcgagtggttgtcaccggagacgtggccaacaactccaaacacgccttgactggccactctttcaaccgctccttcagcgggagcggggcggcaatggacatcgtcgtgtccagcgtcagagcttacctgagtgccctgaacaagatgtgcagcttcgctggcgctgcgagagccagcagcactgaggtgcctgggagcgcaagtgttcaacgcgcagaatgagctcggcggcgttcgcgttcgtgttagttctcgtatgggatgccaggatggactgtgcgttgtaagagcttgtcaagctgttgaggtgacatttcgtttcagtaacaggctgctcgatattatggggtaccccttgtcagtggggtgacgacaatgctgttctttttctgggaggatagtcccttcagcttagaacatgcaggaaattttggccctatgtagtgtacattttgtatctttaaacatactttcaataatgaaataatattagggtccatctagccacatgggtggccatcggcatgaaaatgatcgaaaataaatatttattcggtttgtcttttttttattacggataaataggatatagaatttacaatgaaaatatatattcttatttttaacattaaactcataaagattcataaaagataaaccttaaaattatcatatatcttctcaataaagtttggatatagattcagatataatttcgaatgttttttcttctttttttggttgt

SEQ ID NO: 120365 - DNA, 489 bp, Zea Mays
aaatgggtcgtatagttgaatgcatgtttcaagcaatgtaaagccctcactagtttgccaatgcagcagcagtgtcactcctccgagcgttcagagccttcgtcgctgtcgttgcaagggaccgtgtagtggatcacgacacaggctccggacgatagcctgcacgaagggttcaaagcacagccctcaataccagccctcgatgccactgcgtcaagacgacgacgaggcaaaaaacaagaaagcatcgatcgagtgcattaccgagcactgacaaagagttcacagtaggttcaggtaaagaaaggccacgggtgacacttaactttccttgatcttgacgagcttctcctccttcctgaacgactcggcccctgtggtcgcggatgcgacagaggcgtcgacgaacctcttgctcccgtcctcagaggccgtgtcgcagtcctgccgggtcgaggagctccgaggaatatgggtgttgctgatttt

SEQ ID NO: 120366 - DNA, 1134 bp, Zea Mays
atccggtcgccgccgtaggatgatggggtatcccttgagggtccgcgtggtggggaagaagacaatcctgtcctcctcggcttcctcccagctgtttgttggtcaagaatccaatccaatcagagcgagcggcatagcatcgttccgacttccgagcacacacacacacagagccgcctcaagagacagccggcgggagagaataaagagaaggacggctcacctaaagcgcgtgacgaggtggtggaggaagacggaaaccaccacccgggcgagctcgtagcccgggcacagccgcggcccgccgccgaacggcgtgaacagactggccccttccgcgctctgcagcttgctcttgccctgcacacgcgaaacgggacgggagccacatgagctctctccttcctagattctcttgtcgatcatatataaatatctatcttctcatagaaaagaagagcatgagcatgccacaacatagcaaattgtgttttctaacgagtgcacctgctgccatctccaagggtcgaaggtccgggcgttctcgtagtggtccaggctaaggtgcacggctcggaacgacgcgaagatcttgcagccctttgggatcacgtagcctagacaacagatcaacagaagataagagaagagaagagactgctgtaaacgaacgggttgggggaggctccaagaagaagaagaagaagacgacagttaacagtttgtgttgtagaagcaaacctttgaagtggatgtcggtgttcgcacgcctgaacaccccgctgatcaggaggaggagagagatgtctactactgcaaaagaatggagatgctagctagatggaaggcgatctgaagaaaaccggggatggactccatccagactgcttacgcattgtgtaaacggcatcgacttgtaatcgctccattccagagcttggcctttgccttttacccctctgatgctgtcgtgctcttcctgcagatccagcaaacgtctggaataaatatatatatttttttccacatgttcgaaagcaagttcttggcatgttgctgttgatgggggtgagaaggaataaagaaaggcactttgttttatggaataaaaattcagcagtagtagtgtgtagc

SEQ ID NO: 120367 - DNA, 109 bp, Zea Mays
aaaaaagtgtgaaaataacagccaagattttcttccaatgctactcaaacaaacccttctcaccatgcaaaattcccttactatggctctgttccactgcatgaattaa

SEQ ID NO: 120368 - DNA, 1124 bp, Zea Mays
gtcacctacgcccgccgctacggggtcttcttctactccaacgccaccgccttcgtggcctccgtcgtcacgatcaacctcctcctcatgcagtccctcagccgccaccgcgggtggctccgagcgctgcaggccgtcatgatcctcaaccagctcggcctcatggccgcctacgccgcgggcagctgcagggagctggccatgtccgcgtacgtcgtcgccctcgtggccatggtcgccttgtacgtctgcgcccacgtcctgctcttcgcgctgtgcgccctgaggaggcgcggcgccgtcgcggcggacgacgcggcggcgccggcgcaggcgccgccggatgaagagcctggggccgtggagcgctcgcgcaagtacctgctcatcttcgcgaccctcgtcgcgacggtgacgtaccaggccgggctgagcacgccgggcgggttcctgtccaacagccaggacgacggcgaccacctcgccgtcgccggggacccagtgctcccgggccgcttcatggggttcttctacttcaacaccacggcgttcgtggcgtctctggtggtcatcatgctgctcatgagccggaccgtgacccgccacgggctccgctcctgcgctctctgggtgtgtaccggcgcggccctcgtcgggctcgtcggcgccttcgccgtggggagcagcagaagcttgaagacgtccgtctacgtcgtcgcgctggttgtcgccgttctgtcatacatcggcctccaggttctggtgttcttctgcaagcctgtggagacctgggtgcacaacgtccaaggcacgctgcaaaggtacctgaaactggagtcgtcatcatcacaggacccccgggcccggcttcgtgcagtgcaggaaaccgccgaggccgaccagcttctccgcaagtctcgcatgtacctgcttctgctcgggatccttgcggcgagcgtcacgtaccaagccgggctcaacccgccgggcggcttctggcaagcaagggccgccgacggtgtgcaccactacctgcccggcgacccagtgcttcacaacacctaccccgggagatacctcgccttcttctactgcaacgccacggcgttcgtcgcgtccttggt

SEQ ID NO: 120369 - DNA, 1209 bp, Zea Mays
atggcggcggcggcggcggctatctccggatcccgcacctgctaccctagcgtcccaatggcgcgcggcggccggcggcgcaccagcggctgcaccgtcaccaggagctccttcgcgccctgcacgccggcgtccacgccctcggcgcagcggatcggaagcaagtgggcggagctccagggcgcgcgcgactgggacggcttgctgagcccgctggacggcgcgctacgaggcgagctggtccggtacggggagttcgtgcgcgcggcctacgcgagcttcgacttcgacggcggcgcgccgtcctacggctcctgccggttcccgagccgctcccttctgcgccgcgccgggatgccgggcacggggtaccgggtcacccgcctcctccacgccgcgtccacctcggcgcccgggtggcttccgtcgtcgccgccctgcggctccagctacatcggcttcgtggcggtgtgcgacgacgagagcgagatcgagcggctcggccgccgcgacgtcgtggtcgcgttccgcggcaccgccacgtgcggcgagtgggtggacaacttcaagtccggcctcacacggctcccgaccactggcactgacgaggaggaggaggaggagccgatggtggagagtgggttctggaggctcttcaccgcgccaggcgaggcgcacagtagcctgcagcagcaggtgcgcgacgaggcgcggcggatcgccaacgagtacggcgggagcggcatgccaccgctgagcatcacggtgacggggcacagcctcggcgcggcgctcgcggtgctcaccgcccacgagatcacgacgcagcagagacaggaacacggcagcggcgagccgatgatggtgacggccgtgtcgttcggcgggccgcgcgtgggcaacgtggcgttccggcgcaggctggaggagagcggcggcaaggtgctccgcgtggtcaactcggacgacatcgtgaccaaggtaccggggttcccggtggtgcacgagcacgacgacgacgacagcggcgcccagccggcgaaggggatgatgaaggcgaggctgccgaggtggctcgtctccaagatggggtgggggtacaccgacgtggggcgcgaactgcggctgagcagccatagccaggccaacgtggtggcctcgcatgacctcgacttgtacctcaagctcgttgcttcctgcacagactag

SEQ ID NO: 120370 - DNA, 103 bp, Zea Mays
atgatatcgaccgtagctatatgtacaccactagcaagcaaacaataataaaatattgtctctctatatttattcgttttatgttattgtcccgctagtagtg

SEQ ID NO: 120371 - DNA, 1050 bp, Zea Mays
ataaatatagcttggagcaaatctttcagccacccgatccccaaccgcccggcccgacattccctccaaccgccgctgcggctgcgccgcccaccgccgacaggcgacagcatcgacaggcgcagcagtcaacaggaaccgagccatggcgagcgcggatctgctgcggagggaggaggagttctactcctccctgtttgattccgccaaaggcgatggcgccaggtcgcgctcacagctgatcgagaggaagatcgaggccctggaggacatggccaccagggtcagtaaccggagatcgcggaagtggtttaacgaccgtttgctgattgaactcgtcccgcgtctttacgttgaagagatcaaaggcctattcgctcctccgccgtggggtgagcaagtgcccttgtcagcattctacagggcaaatgttggtgaatgggattccttcaggagcattgacatggatgctgaggcaagattgatgcagcatatgaaaaaatcattggaaaaacccaggaatcatgtcgatgaaggggaatcgattgcgctgaatgcttggcatcgaatagatcgacacactagagaagcaataaagagaaatttccttcctgatctgcttggaatatatgaagaacgcgttagggccttcattgaagacgctagtgacaaagatgctcttgtgctgaatgttcaggacccatttcagagactactgctccacggtgtttgtgagttctacaacgtgagctcgacaaccaccagcagtgtgagagaagatgggaggccttggaaggcaaccaccatcaagaagaggcagggcaccggcgttccctctagaatcacactagttagctttctgagaatgaagaagaatggatcgcagtaacgttagttagcgttcaagaatacaacaaaattgctttagattccgtttaggctgttgcaagacaagtgagtggtcactggcaatgtgttcttatatcgcatcagcctgctggctacggtttggaacttcctgacagaaagtagaaacttccggttctacaa

SEQ ID NO: 120372 - DNA, 1893 bp, Zea Mays
atcgtgtcacgggccagcctgcacgacttttattcaccttgtcgtgtttggacctaagagccgatacggtaggcatacgactcgtgaactaagcgggcctatgtgggctcgtgcggtcgtgccgagcggacctggcccgcccatttggacacggagtatgcttcctcgctggctcgctgctcacctatttcatgtagggggtaggtcttgggtctcttggctcctccatttcactcgtattctatcagctagctacccactgtcgccaactcgccgcaacaaagaaccaccatcatgcacctgctgatgctcccttggctcgccttcggccacatcgtgccgttcgtgcagctggcgcggaggctgctgtcctccacctcctcctccgtccgcgtcacgttcctcacggccgctggcaacgtcccgcgcgtcgaggccatgctgtcctctccctcgtccaccggcgaggcggccgtcgtcgtgccgctgcgcctgccccacgtgccggggctgcccgaggacgccgccagcacggcggacctctcgcccgagggcgccgagcttcttaaggccgcgctggacgctgcccggccgcaggtggccgcgctgctggccgagctccgcccggacgccgtgctgctcgacttcgccaccccgtgggccgccgaggacgccgcggcgctgggcgccaagtcgctccggttcagcgtcttctccgccgtcgcaggcgcctacctctccgtccccgcgcgccgccccgacgcggcgggccagctgccgtcggcgcgcgacctcatgtccgcccctgccggcttccccggctcctccccgctcgccgccgccggcgtcccggcgtaccaggcagccgacttcacctacatgttcaccagcttcggcggccagccctgcgtccacgaacgcgtggtggccggcatccgggcctgcgacggcctcgtgctcaagacctgcgccgagatggagggtgcctacatcgactacctcgccgcgcagtttcgcaagcccgtgctcgtggcggggccgctggtgcctggcccgccggcgggagatctcgacgaccactgggccacctggttgtccgcgttcccggacggcgccgtcgtcttcgcctcgttcggcagcgagacgttcctgccgccagccgcggccacggagctgctcctggggctcgaggccacgggtcgcccgttcctcgccgtgctcaactccccggacggcgccgtcccgccgccggggttcgcggagaggggtgtcggggagagggctcgttcatgccggggtgggtgccgcagcagcacatcctgcgccaccggagcgtggggtgctacctcacccacgccggcttcagctccgtcgtggagggcctcgtcgccggctgccgcctcgtactgctgcccatgaagggcgaccagttcctcaacgcggcgctgttcgcgcgcgagctccgcgtgggcgtggaggtggcgcgccgcgacgacgacggctggttcgggcgccaggacgtgtgcgacgcgatcgccgcagcggtggcggacgtgggggaaagggacgccaggaagtgggccgactttttgacggacgacggcgtgcaagggaggttcgccgacgagttcgtccggcagctcagggagctcgtcggcgcggcctccagttgatttgagcgctcgacgacgtttctcgtggaacacgcggcaagtgcgattattgaagaaataattccacccacctatttatttgtacattaataacattgcccacccacctgtactgtatcattattgaagaaataattccagccatggatattgcacatttgcacttgttcaaacatcctaattcctacgaatcttgaagatgaggttgcgtgctcttttc

SEQ ID NO: 120373 - DNA, 1510 bp, Zea Mays
gtcatgtggagccgacagatgatggcctcggcaccggcggcgccggcgacatcgaccgatctcctcgtcgtcggccagtaacacgcattctctctccctgcccagatggagggaagggagggtattgcagttggccgcgaatccggccacggcagcatgttcagagcagcagacatcgccatggcggaggcgcaagaagcagcagcgaaaggctaccagtcctctccatcctcgccgtcgacgtcccccacgccgtcgccgccagcggctgcggctggccacgccggggacgccgccgcgactccgcttgcctggagcttgggcggcgagacgccgagtggggccgtggtggtggacaacggcacgcaaacggccgggcagagcgagcacgccagcctgagctccgggcgccgccggggccggccgcgcggttccgggaggcgccagatcctagccactctaggggaatggtacgcgctgtcagccggcgggagcttcacgcctcatgtcatcatcgtgggtactggggaggatgtggcggcgcgcatcatgtcgttttctcagaagggtccacgctcggtctgcatcctctctgccaacgggtcaatctctaatgtaacactgaggcagccggatgcatctgggagcaccttcacctacgagggccgtttcgagatcctgcagctgatgggctccttcacaatggccgaggaaggccggaggagaaccggcgggctgagcgtctctcttgctggccctgacggccgcgtagtcggcggcgtagtggctgggatgctgcgtgctgcaagtcctatacaggtgatcgtcggaagcttcctgcccaacagcctgaagcagcaccagaggaggaggatgagcatgcagcagccttcccccgttccggcgttaccagcacccgtggcacccccgccgccggtgcttaccgcggccaccccgatctcgcaggcaggtcccgggaacgggttccacgcaccgccgccgccgcactccgcagcacctccccagccccacgccaacgccatgaacctgaacgcgacgacgacgggcttcaccatggtcggctggcctgcaagctcgccgcagcccatggcgtacagggcttcacctgacatcaacgtcagcttgactccccaggagtaggatcgctgggctcgtcttcttcctttttctttcttttttttttctttccctgggctgacacgttttgggtgggagagaggaaacagagcgtggctgatgctctgaatgagattatggactaatctggtgttaattttagggtagggcgtgccaacttgtttgggttgctgctttcggccgtcatggctgtggatgttgatttagttctagttctagtcagtcagtcctattcagtttctgtctttctgcgctgcagctatttagcatgtcctgttattggtgaatcttttctgatgatagagggaggaatcatcttctgatgacagaggaatcagttctgttatttgtg

SEQ ID NO: 120374 - DNA, 1760 bp, Zea Mays
cgcagagcagcagaaagcccgccattctcgtgctaaaaatctctcatttatttttatttatctctgccatttgcccgtattcaaaatccaatccctgatgacttgggtataatactggcacgacccagctgctgcttgctggtgcctggtagtaaccggacacagacccaaactagaataggtgtctgttcttgtctgcggttctctgttcgagtccaaggctccaagcaagcaaagaaccgaaccaccgggagcaagaaattttcccagagtaagcaagtcccaggactcaaccaagaagagccctttgcatgcagatggagggaagggagggtattgcagttggccgcgaatccggccacggcagcatgttcagagcagcagacatcgccatggcggaggcgcaagaagcagcagcgaaaggctaccagtcctctccatcctcgccgtcgacgtcccccacgccgtcgccgccagcggctgcggctggccacgccggggacgccgccgcgactccgcttgcctggagcttgggcggcgagacgccgagtggggccgtggtggtggacaacggcacgcaaacggccgggcagagcgagcacgccagcctgagctccgggcgccgccggggccggccgcgcggttccgggaggcgccagatcctagccactctaggggaatggtacgcgctgtcagccggcgggagcttcacgcctcatgtcatcatcgtgggtactggggaggatgtggcggcgcgcatcatgtcgttttctcagaagggtccacgctcggtctgcatcctctctgccaacgggtcaatctctaatgtaacactgaggcagccggatgcatctgggagcaccttcacctacgagggccgtttcgagatcctgcagctgatgggctccttcacaatggccgaggaaggccggaggagaaccggcgggctgagcgtctctcttgctggccctgacggccgcgtagtcggcggcgtagtggctgggatgctgcgtgctgcaagtcctatacaggtgatcgtcggaagcttcctgcccaacagcctgaagcagcaccagaggaggaggatgagcatgcagcagccttcccccgttccggcgttaccagcacccgtggcacccccgccgccggtgcttaccgcggccaccccgatctcgcaggcaggtcccgggaacgggttccacgcaccgccgccgccgcactccgcagcacctccccagccccacgccaacgccatgaacctgaacgcgacgacgacgggcttcaccatggtcggctggcctgcaagctcgccgcagcccatggcgtacagggcttcacctgacatcaacgtcagcttgactccccaggagtaggatcgctgggctcgtcttcttcctttttctttcttttttttttctttccctgggctgacacgttttgggtgggagagaggaaacagagcgtggctgatgctctgaatgagattatggactaatctggtgttaattttagggtagggcgtgccaacttgtttgggttgctgctttcggccgtcatggctgtggatgttgatttagttctagttctagtcagtcagtcctattcagtttctgtctttctgcgctgcagctatttagcatgtcctgttattggtgaatcttttctgatgatagagggaggaatcatcttctgatgacagaggaatcagttctgttatttgtgaaaccgaagaagacgtgcgtcgtgaaaatgttgatttc

SEQ ID NO: 120375 - DNA, 667 bp, Zea Mays
acacacacacactgaacataagcatagatagcagagcaggaaacgttctgtctctgccggttcagttcataaacctttggcatggcaggtgatcgtcggaagcttcctgcccaacagcctgaagcagcaccagaggaggaggatgagcatgcagcagccttcccccgttccggcgttaccagcacccgtggcacccccgccgccggtgcttaccgcggccaccccgatctcgcaggcaggtcccgggaacgggttccacgcaccgccgccgccgcactccgcagcacctccccagccccacgccaacgccatgaacctgaacgcgacgacgacgggcttcaccatggtcggctggcctgcaagctcgccgcagcccatggcgtacagggcttcacctgacatcaacgtcagcttgactccccaggagtaggatcgctgggctcgtcttcttcctttttctttcttttttttttctttccctgggctgacacgttttgggtgggagagaggaaacagagcgtggctgatgctctgaatgagattatggactaatctggtgttaattttagggtagggcgtgccaacttgtttgggttgctgctttcggccgtcatggctgtggatgttgatttagttctagttctagtcagtcagtcctattcagttt

SEQ ID NO: 120376 - DNA, 726 bp, Zea Mays
gttgttcagctgaaggctttcgataggtttgagaacacatctgatgctcaatctgcggcaacccttattattgatagcaggcctagcaagggtctgcacaggttcttgcagaaacattgtgagggtgaaagagttaaagactatactatttgtggcatttcacttatagacattggcagaaacttgatggcgaagcaagacatgtcagagcttgggttcagaactgtggacgaagcggtatttccttcgtcgaaaggttaccatgtgaatgttgattacctgtttgttctaactctcactgctggattggaaggttaccatgtgaatgttgatggacagcatgtgacatcatttccataccgcactggatttgttcttgaggatgctactggcttatcattgaatggggacctggatgtgcaatcagtgttcgcggggactctgccaactacacatcctagcttttctccacagaaacatctagagttgttacccagttggcaggcccatccccttccagacgaaccagttgagattttcatcggtatcctgtcagcaggcaaccattttgctgagcgtatgtctgctgcttagaagtcgacgaatgttgtggcccgtttttttgttgccctgcatggcagaaatgaggttaatgtggagctgaaaaaagaggctgagttttttagtgacattgttattgtcccattcatggataatgatatctaa

SEQ ID NO: 120377 - DNA, 875 bp, Zea Mays
agccaacacacaaacaacacccggcgaccaaaccagccgcgctgactgcttcaccctccctcctgcttcgcttgccttggtggacaccgcagcgcgtatagcttatgctctaacgtttccggaggccgacatggagcgtggccgcagcagcacctcttgccggtccttgctgctcctcctcctggtctgcttctcccacggcgccggggcggcggcggcggctcggctcctgactccactgcaggcagctgctgccgttcctcctcctctggctcttcaccaagcggagagtaatggcgccacggcggcagctgccgacgacggcctcgtgatgactcaggaaggtgacgctgacgccacgagcaatggcaacgacgacgacgagatctcctccgtctcagagtcagagacgatgacgggcgcagaagaaggcgtgtgggacggagggcaacgacgaggaggagtgcctgcagaggcggctgctcggagacgcgcacctcgactacatctacacgcagcacaagggcaagccgtgagccgagcccgtgaccaatgcatctcggcctcggcctcgccggtttgcatggatggcttggtttgttcagagtgcgtacattacatgcatgctgctgggaagaagtcgatgacagacgatccatcaggctgctgggatcgaatctagtgtgtgcgtgttagctgttgcatgacatgaatctctctctttctgtgtttggttgttttctcactgatgactgatgtatataggccggccggtgcgcggtgtgcaagctctgctaatagtttggttggtttggtgtgagcaatgcaagtttaattatatatggccgtcatcgatccatctgtactcctcctcc

SEQ ID NO: 120378 - DNA, 702 bp, Zea Mays
acgcgccacggcgcagtcagcggcgaagaggctggacgtggtgtagttgctgtcccctcccatggtgggcatggaggccttgacatcgaaccggttgacgtagtcggagcggtacgtctggccgaccacgccgtgcacgtcggcggtgagcgcgccgaacttgaaggccaggtcaaggtgcgcgaggcagtcgtcggccgtgacgccgtaccggtgcaccctcgactcctcctcggtgatgggcacggcgttggccctgatggtgaacctgccgtcgagcgagacgagcacgccgttggccgcgctggtgcgggtgacggacagcgccggcacggcgccggacgtccacgcggcgtcggttcccggcaggaggcgcacgggctcgccgtccagggtgagctccatgcggtcgacgtcgtcgtcccacgcggccgtcttcctggcgccgacgtagagctcgtggccgtcgaagagcacggcgatggcctggatccacgtgaagtcccgggacatgccgtcggcgccgcgcttgccgatgaagtgcgcgttgatgtggaggtcgcggtcggagagcacgcagaagtcggcgtcccggcggccgtggaagtagaaggcgttgccgtcgccgccgatgaagcgcgggtcgccgcacgcccccggcacgctgcacactgcatgcgatatacaaacgtacgtaacaaa

SEQ ID NO: 120379 - DNA, 2067 bp, Zea Mays
gagccaagaagcggtaggtggcgccaacgactcgtcgtcgtcgtatccgcggtccggttcctctcctcctgctgcgaatgcgatccctgccctgctccccgttctagattaattgcctttagttattcccttcccctcggctcgcgtgttaatccacggattaaactcgcacctgccctcctcgtccttgacacactgaacgagtgcccgcctgcccggagcagaaccattctcgccctctccctctggcctctgcctccgcctccgcggacgaaaccgccggctgggtccaagtttagcgcgtcggaccctcgctccccaatctcagagcaatggaggtggaggcggcggggccggataagctggcgcctccctcgccggtggagggccccggcgagaatggcgcggccaccaaggtgcagaaggtgtaccgcagctaccggacccgccggaagctcgccgactccgccgtcgtcgtcgaggagctctggtggcaggcgctggactacgcgcgcctggagcacagcaccgtctccttcttcgacgagcccaaaccggagaccgccgcctcgcgctggaaccgcgtcagcctcaacgcatccaaggtgggccagggtttatccagagacggcaaggccctcaagctggctttccagcactggatcgaagcgatcgacccgcggcataggtatgggcacaacctgcacttctactacgatgaatggtgcaaaagccaagcaggccagccattcttctactggcttgatatcggcgagggaaaggatctggaccttcctgaatgtccaagagctttgctgaagcagcaatgcattaggtatcttggtccgcaagagcgtgagcactacgaatacatcattagcgagggaaaggttatccacaaacagtctggggaaccacttgatacaaggcgtcctaaggggactaaatggatatttgttatgagtacagcaaaaaagctttatgctggcaagaaacagagaggcgtgttccagcactccagctttctggcaggaggtgcaactatagctgctgggagattcactgcagaaagtggagtgatcaagtccatctgggcgtacagcggccactacaaacctagcgcagagaacctccacaacttcatgaacttcctcgaagagaacggagtggacctcaaagaagtcgaggtacgctcatctaccaaagaagactacaacgaggacccagtgccagtgccggtacttaacgacacacggagttccacttcagctaccatggaagaggcagaccttccacaggcggcggttcccgtccccgctctaaacagcacagagggcgacgaaggagacagccctccggaagacgaaggacgaggcagggcgaggtaccagaggaccttgtcaggcgggctgcagagccccagagccacccaagtgccccagagggcgatcctcgagaggatgaagtccaagggcgagttgtccaagtcgtaccagctcgggcacaggctgtccctcaaatggagcaccggggctggcccgaggatcgggtgcgtcaaggactacccgatggagctccggatgcaggcgctggagatggtggacctttcgcccagagggttgtcgtcgactccgtcgccgtcgaggagactgcctcctccgtgcttttcccccactaaagtcgcctcgccgacgtctccgctcgcgccagttcaggcgtccctgccgcagccaagctaggagctcgagagtagcagcattatgcatggccacgcgcaaatagcacaagaccggttccattcgagagtagcagcacaactcaatgttgtccaagtgaaacagggtgtgggcagaatctgtcacgtttcagacaccggtagctttgaagcagatatgtgctagtgtagtgtttttttttactaccatggttgaggaacctgctttgtactgtatcatctgcaaacggaataatgggcaaagcattacatgtgtgtgtgtgtgtgtgagagagagagagagagagagtactcagagcccttgcatacaggattacaggttgtgatttgtg

SEQ ID NO: 120380 - DNA, 2152 bp, Zea Mays
gagccaagaagcggtaggtggcgccaacgactcgtcgtcgtcgtatccgcggtccggttcctctcctcctgctgcgaatgcgatccctgccctgctccccgttctagattaattgcctttagttattcccttcccctcggctcgcgtgttaatccacggattaaactcgcacctgccctcctcgtccttgacacactgaacgagtgcccgcctgcccggagcagaaccattctcgccctctccctctggcctctgcctccgcctccgcggacgaaaccgccggctgggtccaagtttagcgcgtcggaccctcgctccccaatctcagagcaatggaggtggaggcggcggggccggataagctggcgcctccctcgccggtggagggccccggcgagaatggcgcggccaccaaggtgcagaaggtgtaccgcagctaccggacccgccggaagctcgccgactccgccgtcgtcgtcgaggagctctggtggcaggcgctggactacgcgcgcctggagcacagcaccgtctccttcttcgacgagcccaaaccggagaccgccgcctcgcgctggaaccgcgtcagcctcaacgcatccaaggtcctcccaactgctacgcatgtcactcatgttcgtctgttgctcatgtcgctggcttgtaacaggtgggccagggtttatccagagacggcaaggccctcaagctggctttccagcactggatcgaagcgatcgacccgcggcataggtatgggcacaacctgcacttctactacgatgaatggtgcaaaagccaagcaggccagccattcttctactggcttgatatcggcgagggaaaggatctggaccttcctgaatgtccaagagctttgctgaagcagcaatgcattaggtatcttggtccgcaagagcgtgagcactacgaatacatcattagcgagggaaaggttatccacaaacagtctggggaaccacttgatacaaggcgtcctaaggggactaaatggatatttgttatgagtacagcaaaaaagctttatgctggcaagaaacagagaggcgtgttccagcactccagctttctggcaggaggtgcaactatagctgctgggagattcactgcagaaagtggagtgatcaagtccatctgggcgtacagcggccactacaaacctagcgcagagaacctccacaacttcatgaacttcctcgaagagaacggagtggacctcaaagaagtcgaggtacgctcatctaccaaagaagactacaacgaggacccagtgccagtgccggtacttaacgacacacggagttccacttcagctaccatggaagaggcagaccttccacaggcggcggttcccgtccccgctctaaacagcacagagggcgacgaaggagacagccctccggaagacgaaggacgaggcagggcgaggtaccagaggaccttgtcaggcgggctgcagagccccagagccacccaagtgccccagagggcgatcctcgagaggatgaagtccaagggcgagttgtccaagtcgtaccagctcgggcacaggctgtccctcaaatggagcaccggggctggcccgaggatcgggtgcgtcaaggactacccgatggagctccggatgcaggcgctggagatggtggacctttcgcccagagggttgtcgtcgactccgtcgccgtcgaggagactgcctcctccgtgcttttcccccactaaagtcgcctcgccgacgtctccgctcgcgccagttcaggcgtccctgccgcagccaagctaggagctcgagagtagcagcattatgcatggccacgcgcaaatagcacaagaccggttccattcgagagtagcagcacaactcaatgttgtccaagtgaaacagggtgtgggcagaatctgtcacgtttcagacaccggtagctttgaagcagatatgtgctagtgtagtgtttttttttactaccatggttgaggaacctgctttgtactgtatcatctgcaaacggaataatgggcaaagcattacatgtgtgtgtgtgtgtgtgagagagagagagagagagagtactcagagcccttgcatacaggattacaggttgtgatttgtgaagatgttgtattttttgcc

SEQ ID NO: 120381 - DNA, 1775 bp, Zea Mays
tcccattccatcgaaacggccctcctttggttcttgcagattttggtgtccctggaaattttttttgcctaaatttggttacagcttactaaagacttttcttttttttccctgttgaggttgagatttgattgagactgatatagatggggtttgtgattggggtcaatgaacgaaggtggcaggcgctggactacgcgcgcctggagcacagcaccgtctccttcttcgacgagcccaaaccggagaccgccgcctcgcgctggaaccgcgtcagcctcaacgcatccaaggtgggccagggtttatccagagacggcaaggccctcaagctggctttccagcactggatcgaagcgatcgacccgcggcataggtatgggcacaacctgcacttctactacgatgaatggtgcaaaagccaagcaggccagccattcttctactggcttgatatcggcgagggaaaggatctggaccttcctgaatgtccaagagctttgctgaagcagcaatgcattaggtatcttggtccgcaagagcgtgagcactacgaatacatcattagcgagggaaaggttatccacaaacagtctggggaaccacttgatacaaggcgtcctaaggggactaaatggatatttgttatgagtacagcaaaaaagctttatgctggcaagaaacagagaggcgtgttccagcactccagctttctggcaggaggtgcaactatagctgctgggagattcactgcagaaagtggagtgatcaagtccatctgggcgtacagcggccactacaaacctagcgcagagaacctccacaacttcatgaacttcctcgaagagaacggagtggacctcaaagaagtcgaggtacgctcatctaccaaagaagactacaacgaggacccagtgccagtgccggtacttaacgacacacggagttccacttcagctaccatggaagaggcagaccttccacaggcggcggttcccgtccccgctctaaacagcacagagggcgacgaaggagacagccctccggaagacgaaggacgaggcagggcgaggtaccagaggaccttgtcaggcgggctgcagagccccagagccacccaagtgccccagagggcgatcctcgagaggatgaagtccaagggcgagttgtccaagtcgtaccagctcgggcacaggctgtccctcaaatggagcaccggggctggcccgaggatcgggtgcgtcaaggactacccgatggagctccggatgcaggcgctggagatggtggacctttcgcccagagggttgtcgtcgactccgtcgccgtcgaggagactgcctcctccgtgcttttcccccactaaagtcgcctcgccgacgtctccgctcgcgccagttcaggcgtccctgccgcagccaagctaggagctcgagagtagcagcattatgcatggccacgcgcaaatagcacaagaccggttccattcgagagtagcagcacaactcaatgttgtccaagtgaaacagggtgtgggcagaatctgtcacgtttcagacaccggtagctttgaagcagatatgtgctagtgtagtgtttttttttactaccatggttgaggaacctgctttgtactgtatcatctgcaaacggaataatgggcaaagcattacatgtgtgtgtgtgtgtgtgagagagagagagagagagagtactcagagcccttgcatacaggattacaggttgtgatttgtgaagatgttgtattttttgcc

SEQ ID NO: 120382 - DNA, 1716 bp, Zea Mays
atgcgtgctgcagccagggacggcagtaagctattattattggtaaagaccgaccgtgaaccggcagccactcgaggcgacagcgcggccctgcctcctgcgcgccacgcgccgtggcccgtccgtccgtcccccaccacgtgcacgcgcctgccccgccggactcggacaagcggaggtggtgcctggcaggggcccgccccggcgagcctaccgaaccgaccgactggcagggccgtggcgtggcgtggctccttgcgcgcgcgcgcacgtacgtacgtacgacggcggccggacacggacgcttctcctccttggcttcttcttcttattcttcttctagtagtactccacgggcgtgccgggacaactgtcgtccgacacgtcgtcgtcgtcgtcgtctttcccgccgcctccaccagcagcagccgccgccttggcgatgctgaacggcggcggcacgtaaggcggcggggcgcagcggagcagggcccagttgacgccggcgaagaaggggtggcgcttgatggcggcggcgccgacggtggcgccgaggcggcgggcggggtccttggcgaggagcgcggtgacgaggtcgcgggcggcgggcgacgcgggcgggtcgcggtcccgggggaactcgagcgcgcgggccacgatgttggccagcgtcatctcgttgtcgtggcccttgaagggcgtagccccgtacagcagctcgaagacgaagacccccagcgtccaccagtccacggcgctgccgtgcccttccccggccacgatctcgggagccaggtactcgtgcgtgcccacgaacgacgtggaccgcagctccaccggctccgccacgagctccagctccagcccgccgttgttgttcggggacggtttcttgcccgcgcgcagccagcggggccggcggcgccggcgcccgcgcccgcggcccgggaagagctggaagcaggaggcggccggcacgatgcaggaggaggagatggcgcaggaggacgtggacgacgcggcgccgcccgaccgccccgccagcgacagcgggtcggagatgacgtgcgccggcgtcggcgccgtcgggtcgcacttgagcgacaggtcgaagtcggtcagcatgatgtggccgtccccgcggaccagcacgttctccggcttcaggtcgcggtacacgatgtccatcatgtggatgtactccagcgccgccaccacctccgccgcgtagaacctgacggcggcctcggagaagcggcggtgcggctggcgctggcggagcacgtggaggtccccgccggggcagaactcggtgaggaggcaggaccatcggtcgccctcggcgacgccgtagaggcggggcaggaatgggtggtcgacggcctcgaggatctcgcgctccgtgcgcgcgcggccctccttgtttcgcccctccagctccttgcggtccatcaccttggcggccaccaccaccgccgccgccgccaaagtcgaggtgtgcttctccttgccggcggccccggcggtgggggtggggcggcggacctcggccaggtacacgctgccgatgtcgccggcgccgagccggcgcaggaagcggatgtcggagagcgagacggcgccgaggcgcgggatctgcgtgggcagggttggggttggcgcgggggagggggaggggttgcggcgcggggccgggagcgagaggtgctggtgtag

SEQ ID NO: 120383 - DNA, 560 bp, Zea Mays
gtgcacccgcataagaataggaccgaactggtcttcatctggcacgactgtcagtgcgggtgcggctcccagcgcagcctgaccccggcgcgactgcaggcgcgggcactgctcctggcgcgactgctagcacggcacgactgtcggcatggcctgcaccggcacgactgccagggccgcgtgactgctggcgtgggtgtggctcctggcgcgacctcgggcctcagctcaggcgcatggccttcggcgcggcgtgagcatctctgatgtgcgggcgagcggtgcagctctggcgcgcggtcgcgacaccaaggcgggcacaaactctggtgctctggcgagatcgagtggagccccaccggatatggtggagcgattacgagattccaccaacattagatctaaaaaaattataccgttcaattacgtagaggagaaaccttagctgtcgcgtaggacagtccggctagaccgagggacctgtcggcttgatggagagttggtgcagatctgattcagcagcaacgtcgaggtagagcgtgctgataacgtgttgagaa

SEQ ID NO: 120384 - DNA, 98 bp, Zea Mays
cgcagattatcacaaagcaactcgtgaaaagctcataaaaaagcgatcggcttcgatctccgacaatgccggcaaaaccaggtgcttgatcccagcag

SEQ ID NO: 120385 - DNA, 1175 bp, Zea Mays
accagtctaactcatattatttcgttccggactatgttatagcctcctgtttttagtccatgctcgtgcttaaaaaaaagcccccatgcatgcataaatctaacggcgcgcctcctataggctatagcactgccgcatgagaagatagcgcccgctgcaatgaaccgcgcttcttggttgctccttgttctggtgcagctctcttgcttgcactgctactcagccacccaccatggcggcggccggaagcacggacgcccactactacccgcgcccgccaacgtcgtcgtcggctccgttgtcgtcgtccactccggcagctccgaggctaccaccaccgccgtttcttcaggcaccctggtcggggtccggtgccacgacgggaacggccggacggtgttccggaaggacggcgtcgtgacggaccgcagcggcaggttccgcgtgcacctcgcgcacgggccaagcagctcaagcagcagcagcagccaccagctccggtccgtcacgtcctgctcggtggcggtgcacctcccgcaggcgtcgccgccgtgcgtcgccaccgccagctccgctcgcgggctccacctcgtcgcccaccacaacaagcacgaccacggcggcggcactcgcgtcttctccgccggcgccttctccgtccgcccggagctctgcagcaacaagggcctgttcttcccgccggtcccgctcgtgccggagccacccaacgtcggcggcgtgcccatcccgcccaacccggtcacgccagccccgccgtccctcgtgccgccgctcctgcctaccccgtctccgccgtccgtcctgccaccgcttgtcccacagccaccgccgtcgtcggtaataccgccgttgttgccgttggttaagccgccgccgccgccaccgccgccccagcttcttccacccctggtgccggttcttcctccgggggtgcctggcgtaccgccggcctccgcttcaacgaatcgccgccccgtgaacgtgaatcatccctgagaaaaaaacttggagctgtactgtgttgtcttttacatttacacgcacgtacgtacgaactgccgtcagctgtaattttcttgttcgtcaatctgagctgtaattttctactctaccaaaaatgaaactattcactatataaagcactaatttccatc

SEQ ID NO: 120386 - DNA, 1166 bp, Zea Mays
aacggcgcgcctcctataggctatagcactgccgcatgagaagatagcgcccgctgcaatgaaccgcgcttcttggttgctccttgttctggtgcagctctcttgcttgcactgctactcagccacccaccatggcggcggccggaagcacggacgcccactactacccgcgcccgccaacgtcgtcgtcggctccgttgtcgtcgtccactccggcagctccgaggctaccaccaccgccgtttcttcaggtgcgcatgcaactattgtgctgcttccaccgtggtgtttattttgggcctcgattgtgtgcctgcctgcttcgaccgtgtacctagctaacacagtctcaggcaccctggtcggggtccggtgccacgacgggaacggccggacggtgttccggaaggacggcgtcgtgacggaccgcagcggcaggttccgcgtgcacctcgcgcacgggccaagcagctcaagcagcagcagcagccaccagctccggtccgtcacgtcctgctcggtggcggtgcacctcccgcaggcgtcgccgccgtgcgtcgccaccgccagctccgctcgcgggctccacctcgtcgcccaccacaacaagcacgaccacggcggcggcactcgcgtcttctccgccggcgccttctccgtccgcccggagctctgcagcaacaagggcctgttcttcccgccggtcccgctcgtgccggagccacccaacgtcggcggcgtgcccatcccgcccaacccggtcacgccagccccgccgtccctcgtgccgccgctcctgcctaccccgtctccgccgtccgtcctgccaccgcttgtcccacagccaccgccgtcgtcggtaataccgccgttgttgccgttggttaagccgccgccgccgccaccgccgccccagcttcttccacccctggtgccggttcttcctccgggggtgcctggcgtaccgccggcctccgcttcaacgaatcgccgccccgtgaacgtgaatcatccctgagaaaaaaacttggagctgtactgtgttgtcttttacatttacacgcacgtacgtacgaactgccgtcagctgtaattttcttgttcgtcaatctgagctgtaattttctactctaccaaaaatgaaactattcactatataaagcact

SEQ ID NO: 120387 - DNA, 267 bp, Zea Mays
attacatcgaaccaaacacgtcattagtttcttttgatagagctgagtatgggaaaagtgacccaaatacaaggagggatgtcaagagcaaagcactggataacaaagagcttgctgaccagctggatcttgggcagaagttacatgtctcgtgggtcttgatgggaggatactcaatttggagacgcctccggtatatacctcacaggcaaacacacagatacaaccaaatacatgttaatgaaatatgcaactcagatttcagag

SEQ ID NO: 120388 - DNA, 2424 bp, Zea Mays
aggtcggtcagcagtcagcacgtctccgtccccgacgatgccggggagcaatgccaatggagggcgcagcctgtacggacacggccgaccggccatcttcatccccctctccttgccgccctcggttccggactctgctcccctgccccatacccccaccgctcctcacgcctcgcctgactgccaaggcaatcccggaagctcctcccgcgcgcgaacatggtgatgttctttccctgtcccgtgttacttgtttcggatcagtatatatatatggacatttcatgtttcatgaatatattgttactgtgatattcttgatccgttatatttgtaatctttggatcttgcccgctgcttggatctaggcatctagttttcccggtttgtcataggctgcgcatggcggagtcacactaagcaacatgctctggaccttagacagatggaccaaatgcgcatgcttgttaattcgattccccctcatcagcgccaacaagctgccggcatgctttaacatatgatgcttcgttgctatttctggaatgaatagacctgatgttccgaggcacacatgttttattttcttcttcagaatgaagtcaaatttcactgctctgctagaaatgacctgctggaacgttggtgcagatttggcctgcaacaacgcagaggaggtgatcttatgtaactacaaaagatagtaatggggatatccaaggtgacaggcattgccgcgacagcttttcttgtcacatctgttagtctgtgccagttgggaatgaggattattatgcttccattcctagccaccggtattgttgcttccattgtcacggttgcatcgcatgatgccatcaacctaccgtggatcttggggaagaactcggttggaagatttcctctttggtcgattatactgtttggtcctttcttgacgcttgctcggacatatgcgatggttaagagatacatgaggaaggaggccgtgtatgacaagatcgtggaaggcctatatctcggaggatggccgtttctcttgaaacatttgccccctggaaacccatctgtcatagattgcacttgtgagcttccaagaagttcattcgttccagcaaacgagtatctttgccttgcaacttgggataccagagctccaacaccgcaccagatcgaaaaggctgcacgttgggcttgtgaaaagagatctgaggggaagccagtttatgtccattgcgcatttggttagtaacccacgttttgttataattacttttaggattgcatcttgatgtttgtattgtgtacataattgtgttccctagtactgtatttgtgcactatattgactgttaggtttgttctttgtgatggacacattaggtcatggaagaagtgcctgtgttgtgtgtgcaattctagtagcgctgggtactgctgagaactggaaagatgctgagaacatcatccgtgaaagaagaaagataaaaatgaacgcccttcaccgtaaaaccttggaagagtggtccaaacaacgagttcgtcagaaaaaggataagtagttgtaagtggaacattttccatagtgatggacttgttttgcggtgttaacgcctgtcataaaatgacatactccctccgttctttgggggtagtatttgcttaggccaagtgtaatttctgtggcattcttatttatgttttaatcagtagtattagtgtttctacctttaaatgtatatgaatttatatgtatccaggttcgggactgttttttgtccacctggttaattgaatgtgagcaggcattagcttaaatgtatttcttcatggaactaaatggatgtatatatgataaagattatataatatagtaaccaaatagtcctagataatggataaacatagtcataaaaattactagatagcctcaaccaacctattcaacatactcaatccagtaatcataggtggaattgttgaatggattcttccatcataggaagagctgttacaagaatttagaccagacaaaagaacacattgtactggagtactcgacatgagattctagcttctctctttccccttcccactgcagtcaatgaagcaatttcaccttcctggaattttcttgtacacacattttcagaaagtgttttttgaaaactaaagaatttccagaaacactccttgttttagagcttcttctatttcccagctttcctctgtagctctcagatatctgctacgtgcatccaaacaatctctcttcccagtcattctcttcccagtcatttttctcttgctcctatgctgagggttagttccacaacatgtgtcagtcagaaggttgaaaattggttttgggatggttgtgctgcgatgcttatctcacaattgccttcatcggtcaccagtatc

SEQ ID NO: 120389 - DNA, 1856 bp, Zea Mays
aggtcggtcagcagtcagcacgtctccgtccccgacgatgccggggagcaatgccaatggagggcgcagcctgtacggacacggccgaccggccatcttcatccccctctccttgccgccctcggttccggactctgctcccctgccccatacccccaccgctcctcacgcctcgcctgactgccaaggcaatcccggaagctcctcccgcgcgcgaacatgatttggcctgcaacaacgcagaggaggtgatcttatgtaactacaaaagatagtaatggggatatccaaggtgacaggcattgccgcgacagcttttcttgtcacatctgttagtctgtgccagttgggaatgaggattattatgcttccattcctagccaccggtattgttgcttccattgtcacggttgcatcgcatgatgccatcaacctaccgtggatcttggggaagaactcggttggaagatttcctctttggtcgattatactgtttggtcctttcttgacgcttgctcggacatatgcgatggttaagagatacatgaggaaggaggccgtgtatgacaagatcgtggaaggcctatatctcggaggatggccgtttctcttgaaacatttgccccctggaaacccatctgtcatagattgcacttgtgagcttccaagaagttcattcgttccagcaaacgagtatctttgccttgcaacttgggataccagagctccaacaccgcaccagatcgaaaaggctgcacgttgggcttgtgaaaagagatctgaggggaagccagtttatgtccattgcgcatttggtcatggaagaagtgcctgtgttgtgtgtgcaattctagtagcgctgggtactgctgagaactggaaagatgctgagaacatcatccgtgaaagaagaaagataaaaatgaacgcccttcaccgtaaaaccttggaagagtggtccaaacaacgagttcgtcagaaaaaggataagtagttgtaagtggaacattttccatagtgatggacttgttttgcggtgttaacgcctgtcataaaatgacatactccctccgttctttgggggtagtatttgcttaggccaagtgtaatttctgtggcattcttatttatgttttaatcagtagtattagtgtttctacctttaaatgtatatgaatttatatgtatccaggttcgggactgttttttgtccacctggttaattgaatgtgagcaggcattagcttaaatgtatttcttcatggaactaaatggatgtatatatgataaagattatataatatagtaaccaaatagtcctagataatggataaacatagtcataaaaattactagatagcctcaaccaacctattcaacatactcaatccagtaatcataggtggaattgttgaatggattcttccatcataggaagagctgttacaagaatttagaccagacaaaagaacacattgtactggagtactcgacatgagattctagcttctctctttccccttcccactgcagtcaatgaagcaatttcaccttcctggaattttcttgtacacacattttcagaaagtgttttttgaaaactaaagaatttccagaaacactccttgttttagagcttcttctatttcccagctttcctctgtagctctcagatatctgctacgtgcatccaaacaatctctcttcccagtcattctcttcccagtcatttttctcttgctcctatgctgagggttagttccacaacatgtgtcagtcagaaggttgaaaattggttttgggatggttgtgctgcgatgcttatctcacaattgccttcatcggtcaccagtatc

SEQ ID NO: 120390 - DNA, 3249 bp, Zea Mays
aggtcggtcagcagtcagcacgtctccgtccccgacgatgccggggagcaatgccaatggagggcgcagcctgtacggacacggccgaccggccatcttcatccccctctccttgccgccctcggttccggactctgctcccctgccccatacccccaccgctcctcacgcctcgcctgactgccaaggcaatcccggaagctcctcccgcgcgcgaacatgatttggcctgcaacaacgcagaggaggtgatcttatgtaactacaaaagatagtaatggggatatccaaggtgacaggcattgccgcgacagcttttcttgtcacatctgttagtctgtgccagttgggaatgaggattattatgcttccattcctagccaccggtattgttgcttccattgtcacggttgcatcgcatgatgccatcaacctaccgtggatcttggggaagaactcggttggaagatttcctctttggtcgattatactgtttggtcctttcttgacgcttgctcggacatatgcgatggttaagagatacatgaggaaggaggccgtgtatgacaagatcgtggaaggcctatatctcggaggatggccgtttctcttgaaacatttgccccctggaaacccatctgtcatagattgcacttgtgagcttccaagaagttcattcgttccagcaaacgagtatctttgccttgcaacttgggataccagagctccaacaccgcaccagatcgaaaaggctgcacgttgggcttgtgaaaagagatctgaggggaagccagtttatgtccattgcgcatttggtcatggaagaagtgcctgtgttgtgtgtgcaattctagtagcgctgggtactgctgagaactggaaagatgctgagaacatcatccgtgaaagaagaaagataaaaatgaacgcccttcaccgtaaaaccttggaagagtggtccaaacaacgagttcgtcagaaaaaggataagtagttgtaagtggaacattttccatagtgatggacttgttttgcggtgttaacgcctgtcataaaatgacatactccctccgttctttgggggtagtatttgcttaggccaagtgtaatttctgtggcattcttatttatgttttaatcagtagtattagtgtttctacctttaaatgtatatgaatttatatgtatccaggttcgggactgttttttgtccacctggttaattgaatgtgagcaggcattagcttaaatgtatttcttcatggaactaaatggatgtatatatgataaagattatataatatagtaaccaaatagtcctagataatggataaacatagtcataaaaattactagatagcctcaaccaacctattcaacatactcaatccagtaatcataggtggaattgttgaatggattcttccatcataggaagagctgttacaagaatttagaccagacaaaagaacacattgtactggagtactcgacatgagattctagcttctctctttccccttcccactgcagtcaatgaagcaatttcaccttcctggaattttcttgtacacacattttcagaaagtgttttttgaaaactaaagaatttccagaaacactccttgttttagagcttcttctatttcccagctttcctctgtagctctcagatatctgctacgtgcatccaaacaatctctcttcccagtcattctcttcccagtcatttttctcttgctcctatgctgagggttagttccacaacatgtgtcagtcagaaggttgaaaattggttttgggatggttgtgctgcgatgcttatctcacaattgccttcatcggtcaccagtatcctgccagaaatagaagcaccacaatattaaatagatcagggaagcatattgagacaactagtatctgtttaagtagttggaatgtaggatcggcgaaggaggtggaaaatcccgacttcaaactttggtacacagggaaagctacaaacagaaatggagtacaagttttgattgagaagaatctcaagaacggtgtggtggatgtgaggaggcaaggagacaagattatgtcaagcttgtcatggttgatttagtcttacgcgtgatctgcagtagtgaccaacactctagtcagattgatttcgacaccacatgaggaagcagatattagtttggaaggttaagtagtgcctaggaatgacatctttaggtatttagggtcaatgatacagagagacggggatattaatgaagatgttagccatatactcaaagcaaaatggatgaagtgacgtcaagcatctagcgttctatatgacaagagggtaccacaaaagctaaaagacagttttataggacaacgattagacctgctatgttgtatgatgcagaatgttggcccacaaaatacgacatgttcagtagataagtgttgcaaaaatacgtatgttgcgttggatttatggctatacaagaaaggatcgagtccggaatgatgatatacgtgataggtttgttcaacatcagttgagatggtttggacatatccaacgtagacttccagagacgccggtgcatagtaggatcctaaggcgagatagcaatgagaagagtggaagaccggagaggaagatcgaagttggcataggaagagtcagtaaaaaaagacttggaaggatgaaatatatccagagatttagccttaaatatgagtgcatgaaaaacagctatccatatatgcccgaaccttgacttactgggtttttaactttagtctatcctaacttgtttggactaaaatgctttattgttgttgttgttgttgagagaagcatattggaagtatctgctatagccattcatctaatttgagttttgtagaattcagttggttggacaggcatctagagaaagtatcagaaatcaatctttattccttgtttcttatgtcatggcatgtccccccctttttaagggaatatggactttattttttgtcatggttggttgctgacttttgagttttgattgctgatcggaaggttgtccattccctgctgatttagtagggcacatcttggtattagtttagcatggaaccctgggtcactcttgtattaatatttaatatgcacttgattttgtccaatcattattcattagtgaatactaccttcaacaactagagattggacacttctttattaaataaatcgactaaagataggggatg

SEQ ID NO: 120391 - DNA, 1194 bp, Zea Mays
atgaggtttgcatcatgcgacaacaaccctgactttgattttatttggcagataccaaatatcatttatctccatgatgatcagaaggctgatgaagttattttggaagtgttagaccttcgatgttttgatagtgtgcaggaggtggatattttggcatattacacgttgagtggtgaactcaagtatcagtttgggtctggaagcatgagcataacagactatctcttaaatctagaaaatcttttgtgtggttgtggaggtttctacctacaagactggtctttagcatggtatgacagcatgtttgtgtatccactctgtagaaaatatcttatgcttcatttctttagcatggcacttgtgtctcaaatcctttcaacaattggatccattttagtgaaaatccatggtggatccagtggaattggtacattcgctatacagattgccaagtacctcggaattaaggtttttgtcactgcaggaagtgaagaaaaactagtagcctgcaaagttttgggtgccgatgtatgcattaactacagaactgaagacttcgttgaacgtatcaaacaagaaaccaacggaaagggtgttgatgtgattctggataatattggaggatcatatctccagcgcaatctaaacagcttaggtgttgatggtagacttttcatcattggcttccaagggggcatagcagctgaagtgaacctgcaagctgtgcttgcatgccgtttgaccatacaagctgctggactgcgcaacagaagccttgccaataaggcagagattgttagtgaggtggaaaagaacgtgtggcctgctgtcgctgctggcaaagtgaagccggtgatttacaagacgtttccgttatgtgaagctgctgaggctcataggttgatggaagctagcacccacatcggcaagatactgctgctcccactgcacctgtggcgtttgtgctcttactctcggaggagtcagttcaagaacatatgcaacttctgtgacagcctgcatggatgttgtactggtgtagcatgtctttttttatatatcttgtagtactagattggatcttttaccccgagaaattatcttatcaattggatccttaaagtgctgatgacatttttctgtgagctatgatataataaatctggcagatagagccactacagcacgtca

SEQ ID NO: 120392 - DNA, 1295 bp, Zea Mays
ggaagctaaatttggcaagcagttttccaccgcgcgcgaacaccggtgcctctctctctctgtctagcgagtagcgagtagcgactcctgtccgctcgaactcgcatcttttccgctgctatgcaaatccgtccatcctctttttgcactattgaaattagcagctagcagagcaggggttcgacgacaacaacggacacacacatcgtctatcagtgctcatccaacaatccgtgcgcgaccaaggcaataatggtgtcgtcctcccgtgctgtcgtcgtcgtcgtcggcctcctcgtcgccgcgtcctccctcgccgtcgctgcctccgatggcggtgggccgacgtacgggtacacggcggggagccccgacgggccggagaactggggcaagctgagccccgcgtacaagctgtgcgggcaggggaagcagcagtccccgatcgacatcgtcaccaagcaggccgtccccaacgccaacctcgacaccctcaaccgcacctacgccgccaccgccgccacgctcatcaacgacggccacgacatcacgatgacgttcgagggcaaggtcgggacggtaatggtgaacggcaaggcgtacagcttcgagaagatgcactggcactcgccgtccgaccacaccatcaacggccagaggttcccgctggagctgcacctggtgcacaggagcgccgacggcgcgctggccgtcatcgggatcctctaccagctgggcgccccggactccttctactaccagctgaagcggcagctgggcgagatggccaaggaccggtgcagcttcggcgaggaggagtcgcacgagggcgtcgccctcatccacctgcgctcgctgcagaagcgcaccggcagctacttccggtacacgggctccctcaccgtgccgccctgcaccgagagcgtcgtctggagcgtcctcggcaaggtgcggcagatcagcaaggagcagctgcagctgctcaaggcgccgctgcccgggaacgacgcacgccccacgcagccgctcaacggcaggaccgtccagttctacaacccgcccaacagcaccgtctccttccatatgtaatgtaatatgattaacgagatgtatatgtcgtttatgttatgaagtaaatatatatgtgcatgcattattattgcctatatattatttggtgtagtatttgtggcagtatagtgctaaaatgggtctggttttgatttgtaacgtacacatatatatgtctagcctagattgtctctaccccttggtttataaattataatttgcat

SEQ ID NO: 120393 - DNA, 574 bp, Zea Mays
agcatacttcttaatttttggttcacttatatacttcgcaagttgttaacttctagatctcaacagttagggaataaaccaacaaatgaagggtaatatttatgatatcaaatggtgatgattgtagaagccgatggtgatcggcgaccgtgagcttccatgttattgtgttctgatacttgagacttttattatgactatgtatgagatattgtctcttattagtactggatgataagatgtgtcttattatgactatggatgagacttttgtgatgtaattgatgagactatggatttaaatattgttatgtgattgtgtgtgagatgttttatgtgaaaatatgttgtgctatatagctgttgatatatttgttatgttgtggaatgtggtgtaaaataaaaataaacaacatttgtaatgctggtcaaattaacttcctagaggcttattgggccgtaggaagttagccagttaacttcctaggggctacagtcagtcgtagtaagttagtcagctgacgacgctgacggcgtgaagctactaacttctgagaacctactaacttccgag

SEQ ID NO: 120394 - DNA, 849 bp, Zea Mays
ctttctgagaaatatcagaagaaatttggtccacttcgatattttgtggctggaatactgaaatttttatgtttgcctagctacttctatgaactggaatatcttccttcgtcaaaggagatggccgtgaatggaaaaggtacatgtcaagacaaggcccacctgtccaatgtctataccgatgtgatgcacatcatatcaaagaaagaaggaattcaaagagcctccggtttgtccagtattgattatattatgactccaagatggatgtcgcttggggatgttgatacatcaggtagtacagtggctagcactgaaccatcagactatgtacgtggtcttgatcagaaagcaaaacacttgtctctgggaagaaataacattgtttcagaacctgaagaagtgctacaccctcaaccacatcatggatcattctggccaagaaccaggtccaaagcaagggctgatagaaattcagttggtataacgtctactaatgacacacggtcgtcttgggcagccccatcaatgcacgataaggaagacatttcctcaacaatatcagacccaggacctatttgggactgtgaaccaaagtgggacacagggccaaaatgggatagtgagctaacttgggagcctgaccaccccattgaactccctagaccacaagaggacatgggaattggagcaccgatggaacttgtgccaaattgggatgataaatgggtagttaggaaagggcactttcttggtgtcctagtatgcaaccattcatgcatgacagtgcaaagtctgatgttagatcaagcaagaagagtatatgaactgttaaatgaacattcatag

SEQ ID NO: 120395 - DNA, 723 bp, Zea Mays
gttgacttggtgcatactcagttcaaaagagctaaggaacgatcggattcatgtgacgatgatctttttaatgacctgatgtctctctataattcaagcagcagtgcgagtgttgacgcagatattcttcgaaggttatctgagaagttgcagcttatcacaatatatgacctaaatcatgaatctctgaccttgcataagatggctagtggcggtgatcctggtggcattgtggatcaaacacatttctcacacgccaacactcttacaccattttcatatcagtcagatgtacaaaccagcaatgaaaggaagctaagagtccctcaaatcaagacatggcatcaagtcatcctgctactacacgcaattttggtcatcaagattaataatgatccaatgaaaatagacaacaagggaggaggattaatagatctggaaggagaacgcatggcataccttggtcgaggccctcggcgactacagcaaaattacttcctctccggcagaggggcaagctttcctctccagcgatgggggcgtgggaatgtaggggaaagaggagatggcaggggtatgcagaaccttcgatgggttatggttggtggctaccggatgaggatgttggcatggtcgggcgggcggttcgcggaggtcacggcggctgcagaaaccgcggcgggattgtggcgttcgcggctttcgcggaggttgcagctttag

SEQ ID NO: 120396 - DNA, 184 bp, Zea Mays
aaaagatccaaactttagatatataccatggaccccacatgtcattgactcatgtggacccacatgtaagtgagatagtaatggtatggatccaaagtggtgatcttttaatggtatggatccaaatttccctacaaataaactcaacatattcttcttccttcggtttctgcgccatctggtc

SEQ ID NO: 120397 - DNA, 103 bp, Zea Mays
atgaggcctgtggtgtcagtgattaatgttttcaagcgtggaagtgaaataaggggccaccggccacggtgggagcaggcccacaggtcggcgatagctgtga

SEQ ID NO: 120398 - DNA, 1918 bp, Zea Mays
atcgcgcgcggggggcagccggggcctactcctacacgccctttcgcctagccaccgccaccgccctcgcgccctgccgtcgaagccgaagccgaaccctcttctctttagggccctctatttgtttctccccgtgtgatccatccatgcgaggctcctgcagcatctagcaggtcgccccgtctggctccacgctacccgccccgctcccgccatgtctgacgatagcgacaggcagcggcaatgcagccggggcgtcaccgtcgacgtcgagctcgacgccgccatggcgctcgccgacatggccggggtcgggccgcccggcggagatcagaacccgccggtgcagctcgcccctcctactactactactactcaggaggacgaggaggagctggcgagcacgcggctgagcctggagctgggaaaggtgggcatccaggcctccccgtgctccagcagctcaagcgccggcggcggaccgcatgcgcaccacctgcaggcgtcgtaccagcagcccgccgcggcgtcgccggcgacttgctacgggccccggccccggaacgcgctcaccgaggccgagaaggaggcgaagcggctgcggcgcgtgctggccaaccgggagtccgcccgccagaccatcctccgccgccaggccatccgcgacgagctggccaggaaggtcgccgacctctcgtcgcagaacgagaacatgaagaaggagaaggacgtggtgatgcaggagtacctgtcgctcaaggaggccaacaagcagctcaaagaacaggtggcgaggacgacggccaagaaggcgccggcgggatccctggcggcggcggcgtccccgccggcgacgccgccgcggccggggttcctgtacagcgcggcgccgccgccggtgccctacgtctggggctcctggccgccgagcgccgccgccgccgcagggtacgagcagcacggcagcccgccgccgccgccactctgcctgcagccctgcgcgtggtactacccggtcgtggcgacggacccgcgcgggtcgccgtcgtccgcgtacccgcagcagcagcagcagccggcggtggcgttccaggacccgcgcggcgcgacggcagagcccgcgggtagcccggccggtggcggcgcgacggcggcggaggaggacaccgacgacgacccctgctcgctcacgctcggcctcgacgtcgacaaccggagcgcgcccgtcagcatcctcgcgggctccggccgcgcggcagcgcagcaggccgacagggacaaggcggccacggcggcggaggcgaggaagcggaggaaggagctcaccaagctcaagcacatgcacgccgcctccgccgccgctgccccccgccccggtggcgagcagtggtagggcggattatggaaatggaatgacagggcatgcacggcattggtgacacggtggtggtgacccccattggtttcctcggcggcgaactaaacaacttcgttcgtggtctcttctttcgatccattggtttctcaagcgaggcggcagcacggcttcagtcaggtttctcaagcgccccaaccaaggatttcatttcaggtttcaaggaaatgttttctgtttttttcttcctagtattctttgctgcaatatgtaactgaagaaattgaacgagagtgctcatcagtcagaggtcgtgtataatgtaaccattctttctttaggatttttatactaccagcaagcagcatcaaagacagtagtacaatatgacaaagagttacgtgtggactcgcttatactttctaccatttcctacaaacatgactagagagtgcaagaaatcgcttatttagttgtaaactcctacacggtgttgggtgcttctaccagtgtttcgacgcatgcgaagtgtgttggctgtaa

SEQ ID NO: 120399 - DNA, 1382 bp, Zea Mays
ccctgtcctccaccgcatccagtgcccccgatgccgccgccgccgcagttgaacgggggcaaggtgaccccgaacctggcgatggatgcggcggccactcgtctgctcaacctcacggtgctccagcgcctggacccagccgtcgaggacatcctcatcaccgccgcacacgtcacgctatacgacttcaacatcgatctcaaccagtggagccggaaggacgtcgaggggtcgctgttcgtcgtcaagaggaactcgcagcccagattccagttcattgtcatgaacaggcgcaacactgataatctggtggaggatctcttaagtgattttgaatacgaacttcaacctccatatttgttgtaccggaatgcttcacaagaagtaaatggaatttggttttacaatcaacatgactgtgaagctgttgcaagtctatttggaaggatactgaacgcatacgccaaagtacctccaaaaccgaaagtgccttccacaaaaagtgaattcgaggaactagaagctgttcctacatctgctgccatagatggcccccttgaacctccgctaggatccactgctgtagtccttgatacccccgacgaaccattgatcaactacttcagtgttgctagcagcattggaagcgaatcaaacgcgccactgtctggaagagtgcagctggctactgagagcatcccatcctcccatgtgctgctgatcattccatctgctgctccagcacatcagctacccccttcagtagcttcatcagctccaccattgcccatccacgacactaatgcccacactagccggtcaacaaatcttgtaacgccagatttctttgcgcctccaccatcctcttctactccactggctccaccgggcgcatccgtgattcctactgccccgcctcttcaccctacttcggcatctgttcagcgctctcaatatggcgccccactgctccagccttttccaccgcccactccacctccttcccttacccccgcacacagtgagagacctgttgttacaagggatagagtcaaggatgctctacagagacttgttcagagcgacgagttcatcgatttggtgtatcgggaattgcagaaatcacttgtgtaggctgcttattaatccttctggagtttctggctcgtgacaagtaccctgttattttttttctttgacctttttcatgcttcccttcctgtaatcctgtatagtttcgtgttcatgtattgatgtatagtactataggaatggctggttagcatacttatgtaactcaaaagcccaagtaaaaagagttttgttcaagaatgttgaaaatcggatctattttttcttgtttatgtacggagaaatctcta

SEQ ID NO: 120400 - DNA, 2058 bp, Zea Mays
tgtgattgttccggatacatcctcccctcgccagtccccactccccacccaactccacgattgctgctcgctgctgcggctccgctcagatccagtgcccccgatgccgccgccgccgcagttgaacgggggcaaggtgaccccgaacctggcgatggatgcggcggccactcgtctgctcaacctcacggtgctccagcgcctggacccagccgtcgaggacatcctcatcaccgccgcacacgtcacgctatacgacttcaacatcgatctcaaccagtggagccggaaggacgtcgaggggtcgctgttcgtcgtcaagaggaactcgcagcccagattccagttcattgtcatgaacaggcgcaacactgataatctggtggaggatctcttaagtgattttgaatacgaacttcaacctccatatttgttgtaccggaatgcttcacaagaagtaaatggaatttggttttacaatcaacatgactgtgaagctgttgcaagtctatttggaaggtaaaggcttttcatgtattctcctctcctcatgtcggaggaatctttctctgaaattctgatgtagatcataaacattattgaacaatatgctaatagatgttgttttgatctgaaatatgattatgcattttccaatttccaaattaggtatagagcaaggatgtgcagtgtgcttacaaacttctgatacacataaaggtttccatgtcatgtttccctgatacttctagaaagtagctagtatggtgctctatttgaaatgcatgcgacatgtgattatgattattttagcataatgatttcacatctgcccctttttgggaagcaactgtatctcaagatgccatggttatgtcatgtttccctgatacttgtacagagtagctagtatcgtgctctacttaaaattcatgctacaggggattatgactattttgtcattcattgccttcttctgttcgttttcaaaataacaattgtatctcaggatgcaggggtgaacttctttgttagaattgtgtgggcgccctttgttaggttgtttatgtttactcgattttatttgcaggatactgaacgcatacgccaaagtacctccaaaaccgaaagtgccttccacaaaaagtgaattcgaggaactagaagctgttcctacatctgctgccatagatggcccccttgaacctccgctaggatccactgctgtagtccttgatacccccgacgaaccattgatcaactacttcagtgttgctagcagcattggaagcgaatcaaacgcgccactgtctggaagagtgcagctggctactgagagcatcccatcctcccatgtgctgctgatcattccatctgctgctccagcacatcagctacccccttcagtagcttcatcagctccaccattgcccatccacgacactaatgcccacactagccggtcaacaaatcttgtaacgccagatttctttgcgcctccaccatcctcttctactccactggctccaccgggcgcatccgtgattcctactgccccgcctcttcaccctacttcggcatctgttcagcgctctcaatatggcgccccactgctccagccttttccaccgcccactccacctccttcccttacccccgcacacagtgagagacctgttgttacaagggatagagtcaaggatgctctacagagacttgttcaggtaaagttgcacactgaaaacatgcagggtacagttgtttggattagtattatcttgtctaactctcaccaaatgcctaacagagcgacgagttcatcgatttggtgtatcgggaattgcagaaatcacttgtgtaggctgcttattaatccttctggagtttctggctcgtgacaagtaccctgttattttttttctttgacctttttcatgcttcccttcctgtaatcctgtatagtttcgtgttcatgtattgatgtatagtactataggaatggctggttagcatacttatgtaactcaaaagcccaagtaaaaagagttttgttcaaga

SEQ ID NO: 120401 - DNA, 1506 bp, Zea Mays
tgtgattgttccggatacatcctcccctcgccagtccccactccccacccaactccacgattgctgctcgctgctgcggctccgctcagatccagtgcccccgatgccgccgccgccgcagttgaacgggggcaaggtgaccccgaacctggcgatggatgcggcggccactcgtctgctcaacctcacggtgctccagcgcctggacccagccgtcgaggacatcctcatcaccgccgcacacgtcacgctatacgacttcaacatcgatctcaaccagtggagccggaaggacgtcgaggggtcgctgttcgtcgtcaagaggaactcgcagcccagattccagttcattgtcatgaacaggcgcaacactgataatctggtggaggatctcttaagtgattttgaatacgaacttcaacctccatatttgttgtaccggaatgcttcacaagaagtaaatggaatttggttttacaatcaacatgactgtgaagctgttgcaagtctatttggaaggatactgaacgcatacgccaaagtacctccaaaaccgaaagtgccttccacaaaaagtgaattcgaggaactagaagctgttcctacatctgctgccatagatggcccccttgaacctccgctaggatccactgctgtagtccttgatacccccgacgaaccattgatcaactacttcagtgttgctagcagcattggaagcgaatcaaacgcgccactgtctggaagagtgcagctggctactgagagcatcccatcctcccatgtgctgctgatcattccatctgctgctccagcacatcagctacccccttcagtagcttcatcagctccaccattgcccatccacgacactaatgcccacactagccggtcaacaaatcttgtaacgccagatttctttgcgcctccaccatcctcttctactccactggctccaccgggcgcatccgtgattcctactgccccgcctcttcaccctacttcggcatctgttcagcgctctcaatatggcgccccactgctccagccttttccaccgcccactccacctccttcccttacccccgcacacagtgagagacctgttgttacaagggatagagtcaaggatgctctacagagacttgttcaggtaaagttgcacactgaaaacatgcagggtacagttgtttggattagtattatcttgtctaactctcaccaaatgcctaacagagcgacgagttcatcgatttggtgtatcgggaattgcagaaatcacttgtgtaggctgcttattaatccttctggagtttctggctcgtgacaagtaccctgttattttttttctttgacctttttcatgcttcccttcctgtaatcctgtatagtttcgtgttcatgtattgatgtatagtactataggaatggctggttagcatacttatgtaactcaaaagcccaagtaaaaagagttttgttcaagaatgttgaaaatcggatcta

SEQ ID NO: 120402 - DNA, 1455 bp, Zea Mays
tgtgattgttccggatacatcctcccctcgccagtccccactccccacccaactccacgattgctgctcgctgctgcggctccgctcagatccagtgcccccgatgccgccgccgccgcagttgaacgggggcaaggtgaccccgaacctggcgatggatgcggcggccactcgtctgctcaacctcacggtgctccagcgcctggacccagccgtcgaggacatcctcatcaccgccgcacacgtcacgctatacgacttcaacatcgatctcaaccagtggagccggaaggacgtcgaggggtcgctgttcgtcgtcaagaggaactcgcagcccagattccagttcattgtcatgaacaggcgcaacactgataatctggtggaggatctcttaagtgattttgaatacgaacttcaacctccatatttgttgtaccggaatgcttcacaagaagtaaatggaatttggttttacaatcaacatgactgtgaagctgttgcaagtctatttggaaggatactgaacgcatacgccaaagtacctccaaaaccgaaagtgccttccacaaaaagtgaattcgaggaactagaagctgttcctacatctgctgccatagatggcccccttgaacctccgctaggatccactgctgtagtccttgatacccccgacgaaccattgatcaactacttcagtgttgctagcagcattggaagcgaatcaaacgcgccactgtctggaagagtgcagctggctactgagagcatcccatcctcccatgtgctgctgatcattccatctgctgctccagcacatcagctacccccttcagtagcttcatcagctccaccattgcccatccacgacactaatgcccacactagccggtcaacaaatcttgtaacgccagatttctttgcgcctccaccatcctcttctactccactggctccaccgggcgcatccgtgattcctactgccccgcctcttcaccctacttcggcatctgttcagcgctctcaatatggcgccccactgctccagccttttccaccgcccactccacctccttcccttacccccgcacacagtgagagacctgttgttacaagggatagagtcaaggatgctctacagagacttgttcagagcgacgagttcatcgatttggtgtatcgggaattgcagaaatcacttgtgtaggctgcttattaatccttctggagtttctggctcgtgacaagtaccctgttattttttttctttgacctttttcatgcttcccttcctgtaatcctgtatagtttcgtgttcatgtattgatgtatagtactataggaatggctggttagcatacttatgtaactcaaaagcccaagtaaaaagagttttgttcaagaatgttgaaaatcggatctattttttcttgtttatgtacggagaaatctcta

SEQ ID NO: 120403 - DNA, 2026 bp, Zea Mays
tgtgattgttccggatacatcctcccctcgccagtccccactccccacccaactccacgattgctgctcgctgctgcggctccgctcagatccagtgcccccgatgccgccgccgccgcagttgaacgggggcaaggtgaccccgaacctggcgatggatgcggcggccactcgtctgctcaacctcacggtgctccagcgcctggacccagccgtcgaggacatcctcatcaccgccgcacacgtcacgctatacgacttcaacatcgatctcaaccagtggagccggaaggacgtcgaggggtcgctgttcgtcgtcaagaggaactcgcagcccagattccagttcattgtcatgaacaggcgcaacactgataatctggtggaggatctcttaagtgattttgaatacgaacttcaacctccatatttgttgtaccggaatgcttcacaagaagtaaatggaatttggttttacaatcaacatgactgtgaagctgttgcaagtctatttggaaggtaaaggcttttcatgtattctcctctcctcatgtcggaggaatctttctctgaaattctgatgtagatcataaacattattgaacaatatgctaatagatgttgttttgatctgaaatatgattatgcattttccaatttccaaattaggtatagagcaaggatgtgcagtgtgcttacaaacttctgatacacataaaggtttccatgtcatgtttccctgatacttctagaaagtagctagtatggtgctctatttgaaatgcatgcgacatgtgattatgattattttagcataatgatttcacatctgcccctttttgggaagcaactgtatctcaagatgccatggttatgtcatgtttccctgatacttgtacagagtagctagtatcgtgctctacttaaaattcatgctacaggggattatgactattttgtcattcattgccttcttctgttcgttttcaaaataacaattgtatctcaggatgcaggggtgaacttctttgttagaattgtgtgggcgccctttgttaggttgtttatgtttactcgattttatttgcaggatactgaacgcatacgccaaagtacctccaaaaccgaaagtgccttccacaaaaagtgaattcgaggaactagaagctgttcctacatctgctgccatagatggcccccttgaacctccgctaggatccactgctgtagtccttgatacccccgacgaaccattgatcaactacttcagtgttgctagcagcattggaagcgaatcaaacgcgccactgtctggaagagtgcagctggctactgagagcatcccatcctcccatgtgctgctgatcattccatctgctgctccagcacatcagctacccccttcagtagcttcatcagctccaccattgcccatccacgacactaatgcccacactagccggtcaacaaatcttgtaacgccagatttctttgcgcctccaccatcctcttctactccactggctccaccgggcgcatccgtgattcctactgccccgcctcttcaccctacttcggcatctgttcagcgctctcaatatggcgccccactgctccagccttttccaccgcccactccacctccttcccttacccccgcacacagtgagagacctgttgttacaagggatagagtcaaggatgctctacagagacttgttcagagcgacgagttcatcgatttggtgtatcgggaattgcagaaatcacttgtgtaggctgcttattaatccttctggagtttctggctcgtgacaagtaccctgttattttttttctttgacctttttcatgcttcccttcctgtaatcctgtatagtttcgtgttcatgtattgatgtatagtactataggaatggctggttagcatacttatgtaactcaaaagcccaagtaaaaagagttttgttcaagaatgttgaaaatcggatctattttttcttgtttatgtacggagaaatctcta

SEQ ID NO: 120404 - DNA, 699 bp, Zea Mays
atgccggtgagcaggcctccttacgctgacatggaccactcggaaggaatttatactggaaccatcttcctcgtcgcctccttcctcgcggcgcaaagcctggagtcacttggaggcccggttgtgtttgggttgatttctttgtttgtcgattggatcttggccacgaccttggcctcagacggcatcgaggacgcgaacaagaagcaggtggatacagccctcgccgctgatgcagcggcctcggccacgtcgttggcgtgcatgatgcgcggcgggagcggcctaggggcgagggaccacatggcgaagctgttgctcgccaatgcggccgacaaggcgaaggtggcggtggccgagtcgtccgagctagtacgcctcgtggccaccgtcaatgagaagagcgccctagacaggaaggtgcgggacttcatttctgacaacataagctgctcgctctcagatgctgccactgaggtgggcactgtttcccaagcattctgctcggtgctccaggaggagctcaccgtgtggcttgctgagcctgcagtgagaatgcgcctaatggctgttctggtggatgaatgtcggggattgaggggtggcgctatggctggtgcaatccatgtgcacgcacagcatggggatcctatgtttcaggaatttatgggccgattgctgagaagcttaagcgtgtag

SEQ ID NO: 120405 - DNA, 2331 bp, Zea Mays
atggtcggtcgctgtacgctcatgatacaaaaggattataggggaaggtggaggtatgtgttgggagctgtagaaacatttctagatgctattccgtcagctggatttttccaagagactataacggtggtcaacaacacattagtaaatggtacaacaaaaagtggcgcaacaactatatcaacaccaagtctgcatgacctccagatctacggtgtgatcgtgaccatattactctgttttattgtattcggaggcgtcaagatcatcaacaaggttgcacctgctttcttggtcccagtcctcttctcaatactatgcatttacattggcgtctccattgcgccagagcctggtgcttcaaagggaatcactgggttgagcatcgtcacacttgcggagaactggggttcagagtaccaacctacaaacgatgctggtgttcctgatccaaatggatcgatatactgggatttcaatgcattgctaggactctttttcccggcagtcaccggaatcatggctggttcaaaccggtctgcatcactaagagacacacagagttccataccagttggaacgttaagtgctaccctttcgactactgtgatgtacctgctatctgtgtttatttttggagccttggctacaagagaagagcttctaactgacaggcttctcgctgcagcgatcgcgtggcctggtccagcaatgatctacattggaatcattctgtccaccttgggcgcagcgctacagagcatgacaggggctccgaggttactcgcggcgatagcgaacgacgacatcctccccatcctcaactgtttcaaggcctacgaagggtctgagcctcatgtggcgactctgttcacgagcttcatatgcgttgcctgtgtcgtgatcgggaacctggatctgatcacgcccaccatcaccatgttcttccttctgtgctatgctggtgttaacttgtcgtgctttcttctggatctcctggacgctcctagctggcgccctcgctggaagatacaccactggctcctctcgctggtcggtgcaactcaatgtatcgttatcatgtttatgatctcatggacatttaccgtggtgtccctcgccctcgcaagcctaatctactactacgtgagcttaaaaggaaaggctggggactggggagatggattcaaaagcgcatactttcagctggctctgcgaagcctcagatcgctgggagcaaacagcgtacatccaaagaactggtacccgattcctctcatattctgccgcccttggggcaagcttccagagaacgtcccgtgccatccgaagctcgcggacttcgccaactgcatgaagaagaagggccgcggcatgtccatcttcgtctcgatcatcgacggcgactaccacgaatcggtcgaggaagccaacgcggcgtaccgccagctcagcgcctacatcgactacaagcagtgcgagggcgtcgcggagatcatcgtggctcgctccatatccgacggtttccgcagcatcgtccagatcatggggctcggcaacctcaagccgaacatcgtcgtcatgcggtacccggagatatggcggcgcgagaacctggcgcagattccgtcgtcgttcaccagcatcataaacgactgcatcatcgcgaacaaggccatcgtcatcgtgaaagggctggacgagtggccgaacgagttccagaggctgtacgggaccattgacctgtactggatcgtgagggacgggggcctgatgcttctgctgtctcagctcctgctcgccagagacggcttcgagagctgcaagatccaggtgttctgcatcgcggaagagggcacggaagccgaggagctgaaggctgacgtcaagaagttcctgtatgatctgaggatgcgagctgaggtcatcgttgtgaccatgaagtcgatggaagcgcactctgagatcagccctaacgctaagaaggatccccaggaagagtacgcgagcgcccaggatagaatcagagcgtacctgtcgcagatgaaggaggatgcgcagagggaaggtcggccattgatggaggacggcaggcaggtcgtggttaacgaagagaaggtcgagaagttcctctacacgatgctgaagctgaatacaaccatcgtcaagtactccatgatggcagccgtggtgctggtgagcctcccgccgccgccgctgaaccacccggcctactgctacatggaatacatggatctgctcgtcgtcaacgtcccacggatgctgatagttaggggatatagaagagacgttgtcacacttttcacgtga

SEQ ID NO: 120406 - DNA, 1818 bp, Zea Mays
atgtccggcagcaagggcacaacgggcacggtggaggtggacgcgccgactttttctgcttttcatttgccttgtgcggatctactcgtcgtgctcatctcgcgcagatctgctcgacgtgtgaaccaccgcctcgccgagaaggagatcgtcgtcgtcctctcctctgcctccgcggcctccatcgagagcagtgttgccgtcgtcgaccacctcacctccctcgtctctcacctccatgagacctcaagagcaagaaaattcgtgtctttgtggtgttccctgagcgatgaatgccttctagatggaggatggcgcatgggccgagaaactgccggtgcaacgtgcagtgacctgaaaatgagtgagggggatgctactcagcttgcccttgagaaaggatcaccgcaagtgtctaatgatgatggttcgagtagtcctgcaactgtgcacaagttgaaagttgacacagaagatgctggaagcaaaattgaatcacccactccagagaagcttgaatctagaagcaaatgggttgtttgcagtgacctgaaaatgagtgagggggatgctactcagcttgcccttgagaaaggatcaccgcaagtgtctaatgatgatggttcgagtagtcctgcaactgtgcacaagttgaaagttgacacagaagatgctggaagcaaaattgaatcacccactccagagaagcttgaatctagaagcaaatgggttgttatcattcaccttgtctttcctgttcacaatgtcaggcacaaggatttactgaatctttttaatagaatggagagttctataaggttgctacgcctacggaagaggatggctacatttaataatattgccacccaggtggaaatactcgcaaaaaggtttgtggactcaagtggtcttatgacaatcgtcagcttgcatccagaggcaatgacaatggacacatatcctctacgcttcttccacggcgtgcccgaggacgacgctgcggagcgggagatggccatcatgcgcgccaaggccctggccgcaacgccgccgacgcagcagcagctcatggcgtcctcgtaccccttctcgctgtcgcccaagggaggcgtcagcctcagcttcctgatccagcagcaccagcagcagcagagcgagacccaaagaatgttgctgtttctgtatcagggcatggggcctctatcccacaattatcttctcagagcagcgcacctcagtaatcctattatggtggatatcagggtacaagcaaaaagattgaaaatccaaatggaagggtatatccaacttcaatcaggagcaaagattcaagtcacaagagaccatgaagctgaacctggtgcactgacaaggcaagttgagctttctggcaaacctgagcagataagcaaagctgaacagttgatcaaagaagttctggcagaggccgatgctgggtcatccggtgctagatctggaggccggaaatacaatgcaacacaacaaggtgctgagacgtaccagatgaaaattgctaataacaaggtgggactgattattaggaagggtggtgagactataaagtccatgcagaccaaatctggagcccgtattcagtcttcaatcagtgatggtggtctttctcaggatgctaagcaatgcagaaacctgaagttcctccataccgaagggtgcttgtccatcactaaggcgtctctaagagcccttgtgcagtatgccaagagactcgagtctcttactctgggaagctaccctcaaattgagcaacatgccatcttttccttactgatgaactaa

SEQ ID NO: 120407 - DNA, 121 bp, Zea Mays
cttaaactcacggttacaaccacaccgaatacctattcaatgaaagggtttgagtggcaactcaggattattacgagcattccaacaggaccaaatgtatatggatttattcaaaaaaaaa

SEQ ID NO: 120408 - DNA, 903 bp, Zea Mays
ttccatcagagcagctagccatggcgccctacgattccgagccccttgatcactccctggagctccatgagcttcactaccagctgatcctgatacagcactggtgtggcactagcaaagcaaaccaagtagaagtcgcatctcccggaggctttaacaagctgggaaacatggtcgctaacgattgggatctagaagatccctgccaaaacgggaaaatagttgcgcacgctaagggtctgcatgtccaagctagcagagaagaagcaagctggcatgcttcgtttgacatcgtcttcgagcaaggcagcgggttggaagggtccacactccaagtaatggggcctaatgtattcaagggagagtggtcaatcgttggaggcaccggaaaacttactatggctcgaggcgtcatatacaagaaatacctaacgacggtcgatagcacatccaaaattgaccttcagatccatgccttctacatccccatggaacgaaaagatgccggaacttctggaaaaaatgtttggcgctggtaattaaaatgaccggcgatgtatcgttgttgcagacggcatatgtgtgtgtaccaactttgagatgtatggatcggagaatactcttcctgtgcttttattatatagtatttattttcaatataggattccgcagaagaatccatatatgttgtgttctttcaactccggggtacgtggtcgtcgtcaataaatagtgtggtactatttcgtgtggatgtagtgtgtgccactattgtttttcttcacggatggagtataaaagttcagaggtgttgtcattgcttagtgctatcaacaaccatgtttgacgagaaatcctcacttttaggtcctgtttgttttataatgcagcttatatatatag

SEQ ID NO: 120409 - DNA, 912 bp, Zea Mays
atgaggcgctggatcaaggagatggaggcggaggccgccgcggccacctcgtccaggtcgagtatgccctcgagggtcgtacgcaagggcaacaccactgtcagcgtccgcggcgtcgagaagaagtccaccccaagctctaggactccagcggcagtgggcatagggcacgccgtaggcatagatccccttcaacaaccggtcacctcggcagcaaacttcggcggccacatcgtttgcaagcacaactcgatcgccccccttcgcttctccgagttcttaataatggtgcgcggagtgcagtaccaccagacggccgtggtgccccgggagtccatccttaagaccgaggcggagtggctcaactctatcaaggccgaccttgtggtttcagatgttgtacccgtcgtgtgtagggcagctacagatgctggcattcgatccgtgtgcgtcacgaatttcagctgggacttcacttatgcagagtacgttgtagctactggacatcatcatcgctcaattgtgtggcagagttctcctccaatggatctcgagaagtccgttccaagagtggacctgttcggaggtgttgatgttaccttgagggaaggcaagttggagttgtattcaacgtatgcattatttatgctgacataggatgtgctccaccatctttgagcttcctgtaatagcacaaaccatgacaatgctctctctctctctctttgaatcaggttaatgagtagcacttgccaagctggcacaaacgggttttctcgcaagaatgtgttagggatagggaatgccaccttagagaatgaccaccatgtggctggagctgatgcaaatgaatggagggaaaaggaagaggacttggtcaacgggcacagtgcaccacatggcgtgcaacag

SEQ ID NO: 120410 - DNA, 658 bp, Zea Mays
tttctgtccccctcgccatttcccacacagtgtggcgagagccggccgcgtggcggatcatcgtcgccgcccctcgcatcctcgtcgtgccgccgcaccgcaagggttgctcgtgttcgacgggatgccaccgctgggacccgggagaggtactagccattcccctccccacgcgcgctagatttcaggtgccgtccagtgtgctctcgcgtcctgtttgtgcagcctcggtttctgcatcccctgagcggctgagccccggtgatttcgaggaaacatgatcgttttcgaatttcgacggagggttcttcatgggggactcatgagctcgcgtcatcgttgtctgtgtgggcctatgtcgcgctggtcccatgcgcgccacgggaacgccttgctatgagctcctcctgctgcctgcgccacgggaatgccttgctatgagctcctcctgctgcctgcgctgtatggctgtattggctctcgtgcagcaggtgggttgggtgtgagatgaatgtgctgaggcctgtggctgttcgcctgtttcagttattggtgcacaggtgtttcgcaagttgtcacctgtcaagtagatgtttctagtatgggcccgactccattgatggatgattaataacaaagctgaggaaaattcattctg

SEQ ID NO: 120411 - DNA, 416 bp, Zea Mays
tttctgtccccctcgccatttcccacacagtgtggcgagagccggccgcgtggcggatcatcgtcgccgcccctcgcatcctcgtcgtgccgccgcaccgcaagggttgctcgtgttcgacgggatgccaccgctgggacccgggagagattttgctgttgtagaaggttgtgtggaagttggatctcttttccattttggcatcagttctgttattatctgaaggctgtgcatcagtcctggatgcagctaatgtactgcagtaaatgataatctctggaaatttcgtcaggttctcctttgctcagaaaagctggctcaagaaccactagcaaggattttaaaatggcaaacattgcattcaaaaggcgagttatcaggctcactgctagccttttcttgaagaccatgcttgt

SEQ ID NO: 120412 - DNA, 108 bp, Zea Mays
cacaatattcgagcattggaatgggaagtatatataggatcaagattggacctggacaaagatctgcccgcccttagcctgtccgtccaatttccgaaagcctttcga

SEQ ID NO: 120413 - DNA, 931 bp, Zea Mays
gaccagatgagcaacttcgtctgtattgtatttatatacgaagtaaataacagcattgacctcccctctcccctacctcccctactatataacaggcccctggaatccatggaagccccacaataaccaggagcgagctacctgcgaagccacatctctccttccacttcatcgatagtacgcatctccatattcagtgcagaggcacaagctaagccatgagcaacggtggtaaccgcagcaggggcggcgcgaggttcgagctgcagctgcacctgtcgccgccgccgccggctaggagggtggaggtggacggcggaggcgacggcagcgactcgtcgtcgtccccgagctcgtgcgtgtcgtcggacggcagcccagggagcaagtcgccgatggtgatcggcgcctgcacgcggtgcatgatgtactgcatggtggccaagaaggacttccccacctgcatcaactgcaagcagccctgcctcgtggacctcctccactgctctggcgccggcggcagcggcggcaaggccaagtgaaaggacggtcagcgtgtcgtaccgtaccccggccgtcggtccagttgatgctcatacggatggttagctcagaccttagcttgtgggctttgtgcgctcatctcgaggcgcggtgggggagtgaccgccgttggatcatccactggatggacatggcctacttggtttagtaataggctagtgtagtactccccctattagctagctgctgatgctattagcttatcttcgtttatgatgttgttgcttctttaaccgcggcatcggtatgtgatcgccggcgtggttcactgcctattattgttgctggcaatggtttttagctgtaacaatgctatgtttaaatggagaatgtcatctttcgatggttgtttctagaaacaagaata

SEQ ID NO: 120414 - DNA, 802 bp, Zea Mays
aataaccaggagcgagctacctgcgaagccacatctctccttccacttcatcgatagtacgcatctccatattcagaggcacaagctaagccatgagcaacggtggtaaccgcagcaggggcggcgcgaggttcgagctgcagctgcacctgtcgccgccgccgccggctaggagggtggaggtggacggcggaggcgacggcagcgactcgtcgtcgtccccgagctcgtgcgtgtcgtcggacggcagcccagggagcaagtcgccgatggtgatcggcgcctgcacgcggtgcatgatgtactgcatggtggccaagaaggacttccccacctgcatcaactgcaagcagccctgcctcgtggacctcctccactgctctggcgccggcggcagcggcggcaaggccaagtgaaaggacggtcagcgtgtcgtaccgtaccccggccgtcggtccagttgatgctcatacggatggttagctcagaccttagcttgtgggctttgtgcgctcatctcgaggcgcggtgggggagtgaccgccgttggatcatccactggatggacatggcctacttggtttagtaataggctagtgtagtactccccctattagctagctgctgatgctattagcttatcttcgtttatgatgttgttgcttctttaaccgcggcatcggtatgtgatcgccggcgtggttcactgcctattattgttgctggcaatggtttttagctgtaacaatgctatgtttaaatggagaatgtcatctttcgatggttgtttctagaaacaaga

SEQ ID NO: 120415 - DNA, 774 bp, Zea Mays
atggagatggaatttgtctctggaggtataatagaactctgcccaggaacatggttatgcactgatacaccatttattagctttcggcacagctgctgcttcaatgtctcatgccttagtttgccatgtcgagaccttgctctaactaattcaatgcaagatccaattaactgcttcatgaaaacatcaatgccattattcaacaaattagcacactctatcgagaccccttccaacccatttgctcctgccactttgtccatccttttcttcattgacaaagtatcacagagttcaccatcttcaatacaagtattagaggtatcctttgaactcacagaagcaaggggtaaagcagtcctcatgacccatttccagctctccctcccgccgaaccctaaccccatcctcagctctattctcagtcgcgcaaccactttgccctggcgcaaaaaatccctaatctccaccatccaagtttatcaaatagtccccaaaaaattcccccaaaatgaaaacaagaagcatgacagtaagcaaataacccaacgaggaacaaggactagaggtctcactttgccttggcgcgcgacaacgagtccaggatccggccgtcgtggccctcctcggagcgggggcggtggaggcagcaatggggaaccggcgaggagcgggggcggtggaggcagcaatggggaaccggcgaggagcgggggcgatggaggcagcaatggggaaccgatggcggaggatccagatggggaggggagatga

SEQ ID NO: 120416 - DNA, 1509 bp, Zea Mays
gtttgagctcgcggggctcacgtacactcattcacccaccgctcacctctggtcggtccatccattcaacacccacggccggcgcgcggcctccgagtccgagccgagtccggcgaatgggcaggaagggaggcctggcctccatcttctcctcctccaagcactccaagcccagcgccggctcctcggcgagcgcgccctccccgccgtggccgtggccgtcctgcgcgaccaagccgcagacggcgtccttccgcgggcatgccggcggcggcgacgaccggccgtgcaccacgtccgccgcggggcgcttcgaggaagcggcagcagcaccgtgcggcggcgggaggctgcggccgcggccgtggcgcggggccgcgccgggcgacgagatgtacaagaccgtcaactcggtctacttcgacgccgccgactcccgccgcttcttcttcttcgacgacgacgacgacggaggggacgatgacgcggcggacgacttgctcgacctcgaagtcgggagcttctgcacgacaacggcctccgaggagtggtcagaggccgtcatccgcagcctcggccggacgtccacggaccgcttcttcttcgacgcgggcccggcgcccgggcccgccgcggcgtccaactccgtcctcgccgcctcgccgtcgccgtccccgtccccaggccgggcactggcgccgcctccgcgcgtggaggctcccatgtcgctgcaggcggcgctgtcgccgtccgcggcggcagcgatgacgctgtccgacgaccccgccgactctggctccaacgacggggtcagcgaggccgagctgccgccgccggcgtcggcgtcggcgtcggcgtcggcgctggtggaggagagcgtggcggtggcgctggactcggaggacccgttccgcgacttccgcgcgtccatgcacgagatggtggccgcgcacggactccgtgactgggcggcgctgcaggagatgctgctctggtatctccgcatcaacggcaagcacaaccacgcgctcatcgtcggcgccttcgtcgacctcctcgtcggtctcgccacgagcacgagcagcagcagcagggccgcctctccctccgccaccacgaccacaatgacgacaacgacagcctgctgctgctgtagtagtagcagcacaagcagctccagtactagcagtagcgccgccagcggtggcgatggctctagcacttccgccgctgcagctgcaatgcaaccacggatgagcgatgcggcggtggaataagtgccggcacgtcctcgtgctcctcggcttcgtatgatctggaagaggaggctgttgccggggagaggtaaagcaatgaccattgcacaactagcaatgcactcacttgttgctgttcttgatgctctgctcgcatcgatgtaatactacttttgaagttattagtactgtacaaggcagcaaggtctcggttaaatcaggaggtaacaggcacggcatcgcctgatcggtt

SEQ ID NO: 120417 - DNA, 111 bp, Zea Mays
ctttgctggtttctaatcatgaacacacagtgtcttttacgtgtggcttttggaccaaaaataggggcggagaggaggcggctagctagcttttgactggaaacatttcag

SEQ ID NO: 120418 - DNA, 2800 bp, Zea Mays
ctctgactactaaaaagggttcacatcacaggtagtagcaagcaagagggatccagtccagccaggcacctgctgctgcacgttgctcccaaatcgcaatcgttgcagagggcgtacatctcgccaaaccctgcagcagcaagcaagcgcaggatgcgagccggcggctgcgcggtgcagcaggcgctggccgcggaggcggcggccgtggtgcggcaggccgtggccctggcccggcggcgcggccacgcgcaggtgaccccgctccacgtggccagcgccatgctctcggcggcggggctcctccgcgccgcctgcctccgctcccactcccacccgctgcagtgcaaggccctggagctctgtttcaacgtggcgcttaaccgcctccccaccgccgccgcctctatgttccacccccatcaccacgccgggcagcagcacgcgcccgtgctgtccaacgcgctcgtcgccgcgttcaagcgcgcgcaggcgcaccagcgccggggctccgtggatggagcacagggacaaccgccacagccggtgctcgccggcaaggtcgacatcgaccagctcatcatctccatcctcgacgaccccagcgtgagccgcgtcatgcgcgaggccggcttctccagctcccaggtcaaggccaacgtcgagaaggccgtctcggcgtcgtcttcaccggagcatcagcagcagaacacgacgataccacccaccagccgcgcccacgcggcgatctctccaggcggagcagcttccggcgacgccatgcgcgtgctcgactgcatggcgagcggaagcaagcggagcgtggtggtcgttggcgagagcgcggccaccgcggaggtggtggtgaaggcggtgatgaacagggtgagcaaaggggagctgcagcagcggcacgagcggctcaagaacgtccagttcgtgcccctctcggccgcgtccttccagcggatgccgagggaggaggtggaggccaaggccgccgacctgcgcgcgctcgtccgccagggctgcgccgccgggaagggcgtcgtgctcgtcctcgaggacctcgcgtacgccgccgaggcctgggccgccgtgtcagagacgagaaggaggagcagcggcagtggcggccgtgatcacggccagggctgctactgccccgtcgagcacgccgtcatggaagtgggcagcttggtgtccgctgctgccggaggcggcggcagaggcctggacaggttctggttgctagggtttgggaacaaccaggcttatttgaagtccagagcagggcagccatctcttgaggctgtctgggagctgcaccccatcgtcgtgccggacggcggcctcgcgctgagcctcagtgacgccgaacaagctagagcaacaaggccttggcccttcgctaacggcactgcagcaaccggcgacagtgagctcatcactttgtcctgcgccaaggtggcggcgacaactccaaatgtgccgccatggcttcagggctaccaagttcaagatacgaccagactggcgagccgcagcaccagttttcagatgcaagattgggaccccaactctaatggagcagcttaccacacgtcggagatcacactgagcttctccccacaggctactaactctccagacgcttcttcaatctccggctcctttgcccccagcttgatgatgagctccgaaccatggcaattcaagctgatgcaaccgtgcccaaactatggacgtggcgatccatttgccaggtcctctgatcgtcaacaactgcttccaaggccgactagtccagaaaaatcttactccgtgtccaactcatccgaaggtgcccctgcagccgagtcgccaaaattcacggagctcaccgctgagaatctcaagatcctctccaacgcgcttgagaaccgagctccacgtcacaaggatgtggttacagagatcgcaagtgtcgtgctccagtgccgctcgggcatgacaagaaagaggaggagatggtgctgccaagagaagccaagtgcagtgacatggctgctcttccaaggagcgggcaatgatggcaagaaagccgtgtctaaggagctcgcaaggctcgtcttcggttcctacagcaagttcaccgccatctcactatccgagttcacccacgtccactccgattccagctccggcgagatcacgttgaagaggcaaagatcactggacactgggcgtagctacgttcagagattgtatgatgcaatactcgaaaaccctcatcgggtgataatgatcgacggtgttgagcaactggactacgagtcagagatcggcatcaggaatgcgatcacaaatggaagaattaggggttgcaacggcgacgagatcagtctgggggataccatcatagtactgaattgtgaagcactccgttcaatgtctaacgcttcctcccctcggctcaagcaaagggtcatcgagaaggatggaaaggaaggaaatgacatgaacatggagaatgggatggagtcatctggttttaccttggatttgaatgcatgtgccgaggattgtgaagggaactatgaagagagtgtttcagataatgcgaggatcgttaatattgtggatggcgtgttcttcttccaattaatggagcactcatgacattgtattattgcttcatttgcatcttcaagttagcctagaattcttagttattagttgtttttctttgtatttgtcctttatttgtcctagatctgtagctgatccttatatttattggtaatttgtgttatgtata

SEQ ID NO: 120419 - DNA, 2884 bp, Zea Mays
ctctgactactaaaaagggttcacatcacaggtagtagcaagcaagagggatccagtccagccaggcacctgctgctgcacgttgctcccaaatcgcaatcgttgcagagggcgtacatctcgccaaaccctgcagcagcaagcaagcgcaggatgcgagccggcggctgcgcggtgcagcaggcgctggccgcggaggcggcggccgtggtgcggcaggccgtggccctggcccggcggcgcggccacgcgcaggtgaccccgctccacgtggccagcgccatgctctcggcggcggggctcctccgcgccgcctgcctccgctcccactcccacccgctgcagtgcaaggccctggagctctgtttcaacgtggcgcttaaccgcctccccaccgccgccgcctctatgttccacccccatcaccacgccgggcagcagcacgcgcccgtgctgtccaacgcgctcgtcgccgcgttcaagcgcgcgcaggcgcaccagcgccggggctccgtggatggagcacagggacaaccgccacagccggtgctcgccggcaaggtcgacatcgaccagctcatcatctccatcctcgacgaccccagcgtgagccgcgtcatgcgcgaggccggcttctccagctcccaggtcaaggccaacgtcgagaaggccgtctcggcgtcgtcttcaccggagcatcagcagcagaacacgacgataccacccaccagccgcgcccacgcggcgatctctccaggcggagcagcttccggcgacgccatgcgcgtgctcgactgcatggcgagcggaagcaagcggagcgtggtggtcgttggcgagagcgcggccaccgcggaggtggtggtgaaggcggtgatgaacagggtgagcaaaggggagctgcagcagcggcacgagcggctcaagaacgtccagttcgtgcccctctcggccgcgtccttccagcggatgccgagggaggaggtggaggccaaggccgccgacctgcgcgcgctcgtccgccagggctgcgccgccgggaagggcgtcgtgctcgtcctcgaggacctcgcgtacgccgccgaggcctgggccgccgtgtcagagacgagaaggaggagcagcggcagtggcggccgtgatcacggccagggctgctactgccccgtcgagcacgccgtcatggaagtgggcagcttggtgtccgctgctgccggaggcggcggcagaggcctggacaggttctggttgctagggtttgggaacaaccaggcttatttgaagtccagagcagggcagccatctcttgaggctgtctgggagctgcaccccatcgtcgtgccggacggcggcctcgcgctgagcctcaggtgcaacagtgacgccgaacaagctagagcaacaaggccttggcccttcgctaacggcactgcagcaaccggcgacagtgagctcatcactttgtcctgcgccaaggtggcggcgacaactccaaatgtgccgccatggcttcagggctaccaagttcaagatacgaccagactggcgagccgcagcaccagttttcagatgcaagattgggaccccaactctaatggagcagcttaccacacgtcggagatcacactgagcttctccccacaggctactaactctccagacgcttcttcaatctccggctcctttgcccccagcttgatgatgagctccgaaccatggcaattcaagctgatgcaaccgtgcccaaactatggacgtggcgatccatttgccaggtcctctgatcgtcaacaactgcttccaaggccgactagtccagaaaaatcttactccgtgtccaactcatccgaaggtgcccctgcagccgagtcgccaaaattcacggagctcaccgctgagaatctcaagatcctctccaacgcgcttgagaaccgagctccacgtcacaaggatgtggttacagagatcgcaagtgtcgtgctccagtgccgctcgggcatgacaagaaagaggaggagatggtgctgccaagagaagccaagtgcagtgacatggctgctcttccaaggagcgggcaatgatggcaagaaagccgtgtctaaggagctcgcaaggctcgtcttcggttcctacagcaagttcaccgccatctcactatccgagttcacccacgtccactccgattccagctccggcgagatcacgttgaagaggcaaagatcactggacactgggcgtagctacgttcagagattgtatgatgcaatactcgaaaaccctcatcgggtgataatgatcgacggtgttgagcaactggactacgagtcagagatcggcatcaggaatgcgatcacaaatggaagaattaggggttgcaacggcgacgagatcagtctgggggataccatcatagtactgaattgtgaagcactccgttcaatgtctaacgcttcctcccctcggctcaagcaaagggtcatcgagaaggatggaaaggaaggaaatgacatgaacatggagaatgggatggagtcatctggttttaccttggatttgaatgcatgtgccgaggattgtgaagggaactatgaagagagtgtttcagataatgcgaggatcgttaatattgtggatggcgtgttcttcttccaattaatggagcactcatgacattgtattattgcttcatttgcatcttcaagttagcctagaattcttagttattagttgtttttctttgtatttgtcctttatttgtcctagatctgtagctgatccttatatttattggtaatttgtgttatgtatagttaattatatgtgatcagcaacaaacttatttgtggaaatcaggagttagggaagaaagggacggtgttcattg

SEQ ID NO: 120420 - DNA, 2888 bp, Zea Mays
acaagaacgagtgatcactgaccagagctcgctgcaggctgcagctggtggttgttttgcctcctgtagtcctgtccgtcgcatgccatgggggtgccttccttcttcaagtggctcgtgggcaagtaccccaacatcgtcgtcccggccaaggaagacgatggtggcgctggcgccggcgcgtcgtcgccgtcgtcaccgtgggacgaaccagccgccggccctaatggcgtctaccacaacctgtacctggacatgaacgccatcatccacccctgcttccacccggaggacgaggtgtgcccgccgacgacgttcgacgaggtgttcgcggccatgttcgagtacatagatcgcctgttccgcatcgtcaggcctaccaagctgctctacttggcagttgatggtgtagctccccgcgccaaaatgaaccagcagaggtcccgacgcttcaaggccgccaaggaagctaaagacgccgaactggaggagaagcttctgagggagaagttcagagctgaagggagggaggtgcgggcgcggccacgggagacgcatgaggtttcggatcccaacatcatcacgccagggacggagttcatggagaagctctccaaagccctcgagtactacgtccgttcccggctcaacagcgaccccgggtggaaaggcatcaaggtaatactctctgattcaaatgtacctggagaaggtgaacataaggtcatgtctttcatccgaggacaacggagcctggcaagctatgatccaaacacaatgcactgcttgtatggactggatgcggacctaataatgctcgctttggcatctcacgaacttcacttttcaattctgcgtgaggatgggtcacgtcaaagtcagccagaaaaatgcatctctctatccaacgaaatgctcaaaactgaagattcctcaagaaaatgtcgtggatggttcccccaagtaatagaaacaactcccaagaaaccttatcagtttgtgaacatatgggttctgagggagtacctggagcttgatttgaagataccaaaccctgttgtcaaaacagatattgagaggctcatagacgatttcatatttatttgcttcctgacaggaaatgacttcattccacgtattccttcagttgagatacatgagggtgcaatagacctgctgttggaagcatacaaacaaacatttaacaagatgggaggctatattgtgagcactgagaagttaaaagacaaacacgctgcatatctcaaagtttcaaggttggagaagttctttcatgaactgtccttatgtgaagagaaaatatttcttaaaagatatgacctacgagagagtttacaacgcaaattcttgcgccaagctgcagaagaatgtaaagaaacaaactatgacactatggaagaaaatactgatggtctaaacttgacagcaaagtctttttctacaaactgtagcatttccacctacagccaagacgagtcagatgtaaaagcaaataccttagagctgaggcgaaacttaaaggatgctcttcgtaacaagcaagaccttataaaaagtggatcctgcaaacatgacatgataagattgggattggcggggtggaaatctcgatactacagagaaaagtttggcgtggaaaaacttagtgaagttgggaaactgaagaatgatatggttcaaagatatatggaaggactttgttgggtgttgcagtactattttacagatgttccatcatggagttggtactacccctactatcatgctccatttgcatctgattttaaaggactatctcagttcaagatatgtttcaccaccgacaagccactaaaaccattcgatcagctcatggcagttcttccaaaagaaagctcatgtgcactgccaaagtgttacagagaactgatggaaaatgaagagtctttggtacaaaaattctatccgtcagatctacagattgatacccatgggaaacgtttcttgtggcaaggtattgcaatgttgccattcattgatgaaaagctgctggtttcggctaccaagacggtggagggcaaacttgcagtgcatgagatcaataggaacgcagttcggcaagagaagatcttcatgaggaactcaaacactactgtgccaaacggttcagcattttcgaaggcatttgactgttcatcgaaaaagctttggttagatccatctaccagtgagcttggagggtggttgtcacctgtcgacgacaaagatacaagctccggtttcttccattcatcggtgatgagagatctaccggacattaggaatgaccagacaatatcattcctgttctcgaacccggaagcggtggaaaccattccaagactgcttgatgatgtcaagaaacctgaaaagactataactgaaactgagatttccaagaggccgctgtggcacacctatccgggttgccgactacctgaaaccaacccaagcgtgctggagccgcagccgatggtcagcagctttggacgtgggagagggagagccaccgctgccgagacgatgctgggcggcggcggccgtggctacgggagaagtttccatggggctgagtcgtcgcaaacgcaaagtcgaggcagcaggaatgacggaaactcttatgcaggaagagggacgtatggtggcgggttccagaggcagcagaccgcttggcgcccagctggggatgcaggcggacgtggtgggagcgagcaacgtcgtggttggtaggcctggcgacagatgacatggaagaactagcgtgtttttttgtcgatacgcggcgttccattttgtctgaaaacatcagtaatgcttatgttaatctctgaaattatccgtggtatctc

SEQ ID NO: 120421 - DNA, 122 bp, Zea Mays
ccattcccacatggagtgcctttgttggttccctccctctgttaaattagaaacaacctggctggatatgacagtacctctcgtttgatcaagctaatccaaagtgtgattagtttcgttgg

SEQ ID NO: 120422 - DNA, 2254 bp, Zea Mays
ccaccggcacgctcctcctctttcctgtaggctgcagcaacccgctcccccgctcacaccgaaatttgaaatcctcctcccagtctcgtccttcgaacgaagcaacagccgccgcgccatggagaagatctccgtcgccgtccgcttccgccctcccaacctggtggccgctaacacctccccagccagttccggcggaggcggcgaccgcgagtggcgtatcgatgacacccgcgtttccctcctccaccgcgccgccggccccatcaccggtgcctccttcgccttcgaccacgtcttcgacggtgcggcgaacaacgagcggatctatggcacggtcgtccgggaactcattggcgccgtcgtcggcggattcaacggcaccgccttcgcctacggccagaccagcagcgggaagacattcaccatgaacggctccgacgccgacccgggcatcattccccgcgcggtccgcgacgtcttcgacaccgtgcgccaggctgacgaccgcgagttcctcatccgggtgtcctacatggagatctacaacgaggaaatcaacgacctcttgacacttgaaggccagaagctgaagattcatgagagcttagatcgtggagtgtacgtgtctggtttgcgggaggagatcgtgaacagcgcagagcaagtgtttgagctcctccagcttggagaagcgaacaggcattttggagagaccaacatgaacatgcggagcagtcggtcacacactattttcagaatggtaattgagagcagtggtaaggaccagacagacggtggagatgctatccgcgtatctgttttgaatttggtggatcttgctgggtcagaaagaatcatcaagacgggggcagaaggggtacgtttgaatgaggggaagtatattaacaagagcttaatgattcttgggaatgtcatcaataagttgagcgagaacggaaaacaaagagggcacattccgtatcgtgatagtaagttgacacgcattctccaacctgcacttggaggcaatgcaaagacatctatcatctgtactgctgctcctgaagagattcacattgaggaaactagaggtactcttcagttcgcaagtagagcaaaatgtgtaagcaattgtgcccaagtaaatgagattctaactgatgctgctttgctgaagaggcaaaaactggaaattgaagaacttcgtaaaaaactgcagggttcccattctgaagggttggagcaggttgtactaaaactacggaacgacatgcacaagtctgaacttgagcgtgatcgattggccatggaacttgaagacgaaagaaagttacggatgactctagagcaacatttgactgagcaacagaagctagaggccatatcgtcagaccactttacagattcaatccagctggatcttctgaaaactccagattcgaagtctgtaccagatggctttgttgcctgtcgctcacgttactcacaagatgttgagttcagcccaatacctgaaaatttggataatattgctgaagaagatctatggacacgtctgaacaaaggctgtgttaccgatcttgatatgcttgagatgacacctaatctcaaacgcgagtcatcctttctacaagaaaaatcatcagctgcgccattggaggaacctaccaacgccatatgccagaggttagcaaaggagtgcatctatgatcagcaacagcttgaggaatcaaaggcgagatgcgccaatctcgagaaagattgcgacgtgctgagggacgagaacttgtccctgcaacaggagctctccgagtccaagctagaggcggacagcctcgtagccgagaagcaggcacagctggatgatttgaggatgaggtgcgtggccctcgagagggatctctccagctccaggcaggaggcccaccgccttgccaccgagaagcaggagctggccgggcagctgggcacagagaggcagaagatggatgagctgaagcaggatatccgggtgatctgcggcgacttgctccagcgggaagggcagctcacgtcgatttacaccaagtccaaggccatcatagagagctgcaaggcctcccaggtagctactctgctttgatggtttcaatgaccgctgttggcttgtgcattttttatacataaaaacagaaggacagcatttttatgttgagattatatccttcgttggcgttgcaattataatttcatcctcagttttttttaactc

SEQ ID NO: 120423 - DNA, 986 bp, Zea Mays
cgttacatgtttgcatgttccaaagcaaacgtcagaaatcaagttttatctgtagaggtttgctggcatccttgaggccatcctccatttgaaatggtctcacattccattgccttgggtagtggcatcgctgcattgaaactttgggactggccatgagacatatattttcttctttcaatacttatgatgattccatgctaagttccggtgctttggaatacttgattgtttaagtcttctattgatttctattgtctattcttctgccttttctcttgttattaactattgaactggcctggctctaccttttttgttattaactgttgaactgacctgctctaccttttttgttattaattgttgaactgacttggctctaccttttttgatattaaatgttgaactgacctgggttgctgcctttcatttgcagataatgttggagtgattgtgaatcccaagggtgatatgaaaggtttctctatcactggacctatcggcaaggagtgtgctgatctttggcctaggattgctagcgcagcaaacgccatcgtttgagagcttgttggaatatgttcagacttctatatgatcatcttattatcagttgctaagagtgctattgggcttaatgggccctttatgtttgttcacttaattttgtagtaaacagaatttggtataccaaggggatctatataacgatgtatgccataaattttctgactaccatttctcatgaaatgcttatattgtttatattgctttggtgacaacaaaatttttggtagttaatttgtttcccatcctttatgtttgttcactcaatttttatttgtttcccatccaactgaaatgttttaatgtcatcattcttcctcatttgtatgaacatgtacaagagtttttttgtgattaattgtgacaatcagccgagttctttgcatttccagcgagttacaagcatgtaaaatattaca

SEQ ID NO: 120424 - DNA, 1960 bp, Zea Mays
gggcactggggccggcaacttcagcagtcagcacgagaacaaaggtagcaaagcaccgggcagctttccctttacgcttcccagttcccactccactcatcctcacgcgccgccgccaaccggcgagcaaaccgaacgaaccagcaatgccggcggccgatccccccgtcactgacgcggtccccgatgaagatgcggctccccgaccatctccacctccgccgccgccgcggccccggcccctctccctcgcctccgcgctcccattctggttctacttcgccgccgccgtctccctcctcgcgctcctcctcccccacctcctgcctccctcctctcccgcgcctctcccgcctctcctccttggacacctcgccgcaggccgcttcctcaagctcgatccagcccccggcctgttcgccgtgacctcccgccccacggccgccgccggcgactcccccgcgcaccgcgtcctcgtcctccctggcctcgccgcgggctccttgtccttccgccgcgtcctctcgtcgctctcctcccgcggcgtccacgccgcggcgctcgacctcccaggccagggcctctccccggcgtcgcccgccgcgaccgcgcccgcccggaccagcgcgctgcgggagatcatgaaccgaggcgtgttccacgccttcgagcatctcgtgcagaccggcgaggtcccgtaccaggaggaggaaccagccgcctcggcggcgcggtctccgcacgcgcccgacgaggcggccgcggccgtcgcgcgcgccgcggaggcgctcggcgtgggccccgtccacctcgtcctccacgactccgcgctcgcggccggggccgcgttcgcgtctgccaacccgggggccgtgcggagcgtgacgctggtcgacgccaccgcgtccctgccggcgttcccggccgcggtcttcgacgtgcccgtgctggggaggctggtgctccgggtgccggcgctgttccgcggcctggtgcggctgtgctgcgtccggggggtcggcgccgaggaggcagaggcgtaccgagcagcgatgcgtggggaggggaaggcagaggcggtggtcgaggcatggaagtcgatgaaccacagcttccagcttggggagtggagggtctcttcggaggaggtgaggaggctgccgatgctggtgctgtggtcgggttcttggtcagatatgtggatcgacgaggggaagaaagtggcggctgcattgcctgacgccaaattcatctaccactccggcggccgatggcctcaggtaagtgtggtgatataagtttacttgtcaatttcatcttgtgaggttgaacgaaatgctatactgtaaataaaaaatttctaattttttttggagatgatcaacatcagcaggtactccacaacttttccatcttgttatgaattttgtcagtgaaatttctttaaatcggttcttttatagcatctccaagagacttgctaaatagcttgttaagttaaattttagctatttaatagtataatagccagtggcggagcgctcggtatggcgagctatggcgctcgccataccttactcgactgctgggagccagagcttggtagcgaggtagacgtggacgggtatggaacttcggcgaggcaaagatgtcgatgaagaagcgcgtttatgtcggcggctccgcgttcaagctgctccgcacggtcatcgtcttcgcgctcgccgcctccctccatgcctccttgtcctgttcgccatgggtcctcgtgctcatggggccggaacgctcgcaccctacctcgccgagcccggctccgcctatgtgctcagctccgcggccccacctgacgacgcttctacctccgcgtcatgcgcagctctgcagccccgcccgacggcgtgagtgccctgcctggctgcctcagcccacgcgcaactccacagcaccactcgacgac

SEQ ID NO: 120425 - DNA, 1719 bp, Zea Mays
gggcactggggccggcaacttcagcagtcagcacgagaacaaaggtagcaaagcaccgggcagctttccctttacgcttcccagttcccactccactcatcctcacgcgccgccgccaaccggcgagcaaaccgaacgaaccagcaatgccggcggccgatccccccgtcactgacgcggtccccgatgaagatgcggctccccgaccatctccacctccgccgccgccgcggccccggcccctctccctcgcctccgcgctcccattctggttctacttcgccgccgccgtctccctcctcgcgctcctcctcccccacctcctgcctccctcctctcccgcgcctctcccgcctctcctccttggacacctcgccgcaggccgcttcctcaagctcgatccagcccccggcctgttcgccgtgacctcccgccccacggccgccgccggcgactcccccgcgcaccgcgtcctcgtcctccctggcctcgccgcgggctccttgtccttccgccgcgtcctctcgtcgctctcctcccgcggcgtccacgccgcggcgctcgacctcccaggccagggcctctccccggcgtcgcccgccgcgaccgcgcccgcccggaccagcgcgctgcgggagatcatgaaccgaggcgtgttccacgccttcgagcatctcgtgcagaccggcgaggtcccgtaccaggaggaggaaccagccgcctcggcggcgcggtctccgcacgcgcccgacgaggcggccgcggccgtcgcgcgcgccgcggaggcgctcggcgtgggccccgtccacctcgtcctccacgactccgcgctcgcggccggggccgcgttcgcgtctgccaacccgggggccgtgcggagcgtgacgctggtcgacgccaccgcgtccctgccggcgttcccggccgcggtcttcgacgtgcccgtgctggggaggctggtgctccgggtgccggcgctgttccgcggcctggtgcggctgtgctgcgtccggggggtcggcgccgaggaggcagaggcgtaccgagcagcgatgcgtggggaggggaaggcagaggcggtggtcgaggcatggaagtcgatgaaccacagcttccagcttggggagtggagggtctcttcggaggaggtgaggaggctgccgatgctggtgctgtggtcgggttcttggtcagatatgtggatcgacgaggggaagaaagtggcggctgcattgcctgacgccaaattcatctaccactccggcggccgatggcctcaggtcgatgcctttgaggaaatttcaggggtgatcaccgagtttgtaacctcagctgaggaagctggaagcagcaggtggtgacgttgagtaggatatatacactccttcgaggatcgttgagcaaatgtaacctggagcagttttcagaccttttagttggtgggtgcagtgacaagtgcaacttgagattttttgttcctggagagtttctgcttgcagcgtctgtaccgagttctgactttacactagcgtgttttttttaactttaatttgttgctaaatggtgtacttgttgtcttgcttcagtttgtaaaacgtgtgtcactgactcatgctagtgtagtagcatgtactcagtttagcgtcgttttgaggtagcgtgttctgagtaatcacttgttctgagtaaggctctgcattgcagcaatggttgccgata

SEQ ID NO: 120426 - DNA, 1047 bp, Zea Mays
tccgtggcttcgtgcgttcaatttgcttgtggaacgtggaagaagagcgagaacgccaaacgagaaaagaaacccaagccttcgccatcaaaaaaaaaagaaaaaaagaaaaaaaagagcagaaaaagtagagtagactacgacagcgtccggcgaggaggcggaggcgaagatgaggaagaagctcggcacccggttccccgcggctcgaatcaaaaagataatgcaagcagatgaggatgttggaaagattgcactagcagttcctgttttagtttcgaggtctcttgaattgtttttacaagatttaattgaccgtacttatgaaattactcttcaaagtggagcaaagacactgaattccttccacctgaagcaatgtgtgaagaggtacagttcttttgatttcctaactgaagttgtcagcaaggtaccagatcttggtggcgctgattcctgtggagatgaaagaggattacctagaagaagaaagtcaaatggcagtgacccagagaatgatgaatcaagatctagtaaaatggccataagaaatgcaaacatcagccccagaggacgtgggaggggtcgaggcagaggacgaggtcggccaccaaccaagagaaaggaggagaggaaacagttcaagagatcaatggcaacgagaccatgcctcaaagcacgcaacctccagtagaggctccgccaacagcccttgcacaagctacaacaagttctaaggcggaagaagcgaacagtgatcatcagtcagattggcctatgccagatgccattggaagcatcggtgtcgtgccatctggttttggacatctgacagtgcaggttgaagatgaggactacgacaatgaggattagtcagggtcatcttctcattgtatgcactaacaggactgttctggtgttgtaaaatgtaaatatagtttgaaatagttgccgcagtttacctgtgattgtctgtcgttttatgcggttatgtagtcctgtgtaactttcgttctccaataattgcttggtagttgcttttttaca

SEQ ID NO: 120427 - DNA, 2299 bp, Zea Mays
tccgtggcttcgtgcgttcaatttgcttgtggaacgtggaagaagagcgagaacgccaaacgagaaaagaaacccaagccttcgccatcaaaaaaaaaagaaaaaaagaaaaaaaagagcagaaaaagtagagtagactacgacagcgtccggcgaggaggcggaggcgaagatgaggaagaagctcggcacccggttccccgcggctcgaatcaaaaagataatgcaagcagatgaggatgttggaaagattgcactagcagttcctgttttagtttcgaggtctcttgaattgtttttacaagatttaattgaccgtacttatgaaattactcttcaaagtggagcaaagacactgaattccttccacctgtgagttcaatatcagctgacattttgttttttttttcataaaataaaaaggtgatgtgatgtatcttttaaaataaatggatctctttgatgaatttcagctgtgactttatttagcatttgtagtgagggtaatctagatgcttacaatttgcaattgctatgattcgacgtttgaactttggtgtacaatatcccccctgcccaaaataggattttatccaggattcatcttatttgtgttgcttatgccatcaaaataagttggtggataagctgtactgaaacagaattcattaattataggtcatgcttcatataattactacacattcaattgccttttggttgtagattctttggtataaggtttactggttaaaagttgttatctaagttaacatccataatatctgtaggtgggattcatacctggttggtccctgactatgtccagctaatttgtactatataagtaaataaggtacttgagctagagccatctaatgtttttgcatcacctctggaggaagtgatgaacagatcgcttttttggcacaagtctcaacttgaaaataatcttttggggcatgtttggttcgataccttccaggcagctcactggccaggcagcccgaaatcagaagcctgggaacgctgcctgagcgaggcagcttctgtcatgagccaaccaaacagccccttaattcgaaaatggaagcaggttggttttagtaaccaatttggaagttgatatttttctttccactgtaagcgacttcagtgtagtttatggaagttgagctcatggacatttctagagaagatatttgtagaggttatgttatatatccttgaaactgaaactggtcagatagttgtcccatcctgctcatgtagatctagcatacgagcttgtctaatttatttggaattaagtttcatatttaaatgtgagttgtattgaggttaatttcgatggaccatgtttttttcttgttaaggcacttagctgatagtttcaatgcatgcgtcttggtattgtttgcatggcatatcagttttgagccattcatattaacattcatatgtctatcttctgacatctgacgttcaggaagcaatgtgtgaagaggtacagttcttttgatttcctaactgaagttgtcagcaaggtaccagatcttggtggcgctgattcctgtggagatgaaagaggattacctagaagaagaaagtcaaatggcagtgacccagagaatgatgaatcaagatctagtaaaatggccataagaaatgcaaacatcagccccagaggacgtgggaggggtcgaggcagaggacgaggtcggccaccaaccaagagaaaggaggttggttatgtacaatttgaagatgagagcagcatgtttgctgaacaaggtgagcccttgccaggagaggaaacagttcaagagatcaatggcaacgagaccatgcctcaaagcacgcaacctccagtagaggctccgccaacagcccttgcacaagctacaacaagttctaaggcggaagaagcgaacagtgatcatcagtcagattggcctatgccagatgccattggaagcatcggtgtcgtgccatctggttttggacatctgacagtgcaggttgaagatgaggactacgacaatgaggattagtcagggtcatcttctcattgtatgcactaacaggactgttctggtgttgtaaaatgtaaatatagtttgaaatagttgccgcagtttacctgtgattgtctgtcgttttatgcggttatgtagtcctgtgtaactttcgttctccaataattgcttggtagttgcttttttacatgattcaagtgttttgtgacatttaacacagtatttgagcagggattgcctattttaagtatttttgtctt

SEQ ID NO: 120428 - DNA, 1130 bp, Zea Mays
tccgtggcttcgtgcgttcaatttgcttgtggaacgtggaagaagagcgagaacgccaaacgagaaaagaaacccaagccttcgccatcaaaaaaaaaagaaaaaaagaaaaaaaagagcagaaaaagtagagtagactacgacagcgtccggcgaggaggcggaggcgaagatgaggaagaagctcggcacccggttccccgcggctcgaatcaaaaagataatgcaagcagatgaggatgttggaaagattgcactagcagttcctgttttagtttcgaggtctcttgaattgtttttacaagatttaattgaccgtacttatgaaattactcttcaaagtggagcaaagacactgaattccttccacctgaagcaatgtgtgaagaggtacagttcttttgatttcctaactgaagttgtcagcaaggtaccagatcttggtggcgctgattcctgtggagatgaaagaggattacctagaagaaggccataagaaatgcaaacatcagccccagaggacgtgggaggggtcgaggcagaggacgaggtcggccaccaaccaagagaaaggaggttggttatgtacaatttgaagatgagagcagcatgtttgctgaacaaggtgagcccttgccaggagaggaaacagttcaagagatcaatggcaacgagaccatgcctcaaagcacgcaacctccagtagaggctccgccaacagcccttgcacaagctacaacaagttctaaggcggaagaagcgaacagtgatcatcagtcagattggcctatgccagatgccattggaagcatcggtgtcgtgccatctggttttggacatctgacagtgcaggttgaagatgaggactacgacaatgaggattagtcagggtcatcttctcattgtatgcactaacaggactgttctggtgttgtaaaatgtaaatatagtttgaaatagttgccgcagtttacctgtgattgtctgtcgttttatgcggttatgtagtcctgtgtaactttcgttctccaataattgcttggtagttgcttttttacatgattcaagtgttttgtgacatttaacacagtatttgagcagggattgcctattttaagtatttttgtctt

SEQ ID NO: 120429 - DNA, 1201 bp, Zea Mays
tccgtggcttcgtgcgttcaatttgcttgtggaacgtggaagaagagcgagaacgccaaacgagaaaagaaacccaagccttcgccatcaaaaaaaaaagaaaaaaagaaaaaaaagagcagaaaaagtagagtagactacgacagcgtccggcgaggaggcggaggcgaagatgaggaagaagctcggcacccggttccccgcggctcgaatcaaaaagataatgcaagcagatgaggatgttggaaagattgcactagcagttcctgttttagtttcgaggtctcttgaattgtttttacaagatttaattgaccgtacttatgaaattactcttcaaagtggagcaaagacactgaattccttccacctgaagcaatgtgtgaagaggtacagttcttttgatttcctaactgaagttgtcagcaaggtaccagatcttggtggcgctgattcctgtggagatgaaagaggattacctagaagaagaaagtcaaatggcagtgacccagagaatgatgaatcaagatctagtaaaatggccataagaaatgcaaacatcagccccagaggacgtgggaggggtcgaggcagaggacgaggtcggccaccaaccaagagaaaggaggttggttatgtacaatttgaagatgagagcagcatgtttgctgaacaaggtgagcccttgccaggagaggaaacagttcaagagatcaatggcaacgagaccatgcctcaaagcacgcaacctccagtagaggctccgccaacagcccttgcacaagctacaacaagttctaaggcggaagaagcgaacagtgatcatcagtcagattggcctatgccagatgccattggaagcatcggtgtcgtgccatctggttttggacatctgacagtgcaggttgaagatgaggactacgacaatgaggattagtcagggtcatcttctcattgtatgcactaacaggactgttctggtgttgtaaaatgtaaatatagtttgaaatagttgccgcagtttacctgtgattgtctgtcgttttatgcggttatgtagtcctgtgtaactttcgttctccaataattgcttggtagttgcttttttacatgattcaagtgttttgtgacatttaacacagtatttgagcagggattgcctattttaagtatttttgtcttatttcaccgcagtctttga

SEQ ID NO: 120430 - DNA, 435 bp, Zea Mays
atggcgctgctcgcgcttggctgctgcactgcagccgccgctctcggcgcgacacgggcagcgacgggggactccatcaaggcatcaggattcgggctatgggtggcagagtcgctgcggaggctcggatggcccgacgacaccgtcgtgttcgcgctcgcgacgctgccggtgatcgagctgcggggggcgatcccgttgggtattggttgcacagatccatggctccacagatccagcaccatccagtcacgtgaatcatgtttcttgtactatggcccgagatcgcgtgaatcatggagctggatgaggttgctgttaccaccggagaggaagacgatacagtgcttctggacatgtgagtcatctacaaccgctttgattctctccctccacgatccgaccggcaacaaggaggagcaccagtggcaatga

SEQ ID NO: 120431 - DNA, 528 bp, Zea Mays
atgcatttgaagttttatttgtctgcaaggctgcaatcatcctgtggtggtcaggttggtacatcattagaaatggaaatatttgtcaaatcgttgataaaatgcaaacatattcttatcttttgtgcatcacgtagaagccctcatctgccatcaagaggaggctcattggttgtgcatggaggagccccatctaaagggaacaccattgttgggtgtagagaaagggtcattgatgccatgtgtaggagaggggatgtcaccacctggtatgggaaagatgatgttgctaccaccgatgtggggaagaaagtcaccgctgccactagttgtaaaggaaaggatgtcgtcgccatgtgtaggagtgaggatgttaccggtaggtgccggaacgcgatgttgttgtcactgatgtggggaaggaagttgtcgttgccacttggtgtagggggggcgccgccgccgtgtataaaagggaggatgttgtcgcctgatgcagaaaaggtgatgtcgttgtcgctgatgtag

SEQ ID NO: 120432 - DNA, 1727 bp, Zea Mays
gaaataaaagaatgtggagttcctccgatccctagccgcgtcgcgcgccgagaccgacggcaacgccgagcacctcacgtgacgcgatcgaccaccgtggttgcatcgcaatcgcagtcagcctcgagctttctctgcgcgcgctcctcggtctcgtcctcactccgtcactcgtgaacctcggtccacactcacacgtacgcacgccacactcctcgggtcccatggccgcgtcggaggccgccgcttccgcggcgagcaagaagggcgtggcgccagcgaggccaagccgcgcgcgcgacttggtcgtgttcgcgacgggcgtggccgcggccgtgctggcgttcgtggggccggcgtccgtcctcgcgccggggcgcgccggcctcgtcgccttccctgtccccggtccggcggacggcccgcgcacattctacgacgacccggagctgtcgtacgccctcgggcggcgcgtcaccgggtgggacgccaagcgcgcgcaatggctgcggtcgcgggggctcggcgaccggcggaacgccccggagcgcgtggtgatggtcaccgggtcgcagccggagccgtgcaagggggccgggggcgaccacctgctgctgcggttcctcaagaacaaggtggactactgccggctccacgggatcgagctgctgtacaacaacgcgctgctggagccgtccatggtggcgtactgggccaagatccccgtcgtgcgcgcggccatgctcgcgcacccggaggcggagtgggtgtggtgggtcgacgcggacgccgtgttcaccgacatggacttctccctcccgctcgccaggtacagccgctacaacctcgtcctgtacggctggcccgaggaggtgtacgagaagaggtcctgggtggggctgaacgccggcgtgttcctcatccgcaactgccagtggtcgctcgacttcatggacgagtgggcgagcatgggcccggcctcgccggagtacgcccggtgggggaagacgctcagggacacgctcagcaagaagttcgacgaccagtccgacgaccagtcggcgctcgcgtacctcctcctcacgaaccgggagcgctggggcaagaagacctacctcgggatcgactactacttccagggctacttcgcggagatcgtggacaagctcgacggcgtcgcggcgcggtacgaggccgcggagcggaagggcgaccccgcgctccggcggcggcacgcggagcgggagcacctgcggtacgcggcggcgcggaacgcggccgtgagggccgtcgtcccgggccccgacggcggcgggcagtcggggtggcggcgccccttcgtcacgcacttcacggggtgcaacccttgcggcggcaagcgcaactcgatctacacgagggagatctgcgaggacgggatgcgccgcgcgctcgggttcgcggacgaccaggtgctccgcgcgtacgggttccgccacgccgccccgctcaacgacagcgtgcgcgcgctgccgttcgactaccccgccgcgcgcgcgcgtaacaattgacggccacagcggtgagatggagctgcggatttctacgccaaaatataaaagaattgggcgggacctaattgtattctgtatcacgttttctacctctttgcatcgttgatatttgatgtaaaacctttgtagttcgatcgacgaaacatgaaagctacaaccattaatagagttttt

SEQ ID NO: 120433 - DNA, 1385 bp, Zea Mays
aacacggaatggtcgccacgtcggaggccgctccgctccgcgtctccgcttcggtggggagcaagcaccacggcggcgcagggacgcgggggccagcgacgcgccgccgcgcgcgcgacgttgtcgtgttcgcggccggcgtcgcggcgaccctgctcgcgcttgtgggcacggcgtcggtcctcgaccccggcgggcgcggcggcctggtcgccttgcgcgtccccgtccccgttcccggccctgaggacgggccgcgcacgttctacgacgacccggaggtgtcgtacgccgtggcggcgggccggcgcctcaccggctgggacgccaaacgcgcggagtggctgcgctcgcgcgggctcggccgccggagcgcgccggagcgcgtggtgatggtgtccgggtcgcagccggagccgtgccccggcggcgcgggcgaccacctcatgctgcggttcctcaagaacaagctcgactactgccgcctgcacgggatcgagctgctctacaacagggagttcctgcacccggccatgggaggctactgggccaagatccccatcgtccgcgccgccatgctcgcccacccggacgcggagtgggtctggtgggtggactccgacgccgtcttcaccgacatggacttctccctgcccctcgccaagtacggcggccgcaacttcgtcgtgtatggctggcccgacaagttcttcgtgaggaagtcgtggctggggctgaacgccggcgtgttcctcatccgcaactgccagtggtcgctcgacttcatggacgagtgggcgcgcatgggccccgcgtacccggaggaccacgcccggtggggggaggtgctcagagccacgctcagcgacaaggactccgacgtggcgtgcgaccagtccgcgctcgtgtacctgctcctcaacaactgggagaggccggggaagaagaccttcgtcgagacggagtacttcttccagggctactggaaggaggtcgtggaccgcctcgatggcgtcgccgcgcggtacgaggccgtcgagcggcgctcgccggggctccggcggcggcacgcggagcaggagcacctgcgctacgcgggggcgcgaaacgcggccttgaggggcgtcgtaccggggccggccggtggcggggaggtggggtggcggcggccgctcatcacgcacttcgtcggctgccagccctgcagcggcggtcggaacccgatgtactcgagggagagctgcgacgacgggatgcgccacgcgctggggttcgcggacgaccaggtgctccgcgcgtacgggttccgccacgccgccccgctcaacgacagcgtgcgggggctgccgttcgattacccagctgcgcacgcgcgcaacgattga

SEQ ID NO: 120434 - DNA, 801 bp, Zea Mays
atatgcatccgccgtgagcctcctccagtcctcctcttccttaccccaatctcgcctcaaatccaatcccattcccacctcacagtctagcttgcctcgcatactcctcatctcttctcctagccttaggtcgatgtttgcctaggcttccaccacggatttggcccccaaccgtgttcccttgttcgcttgctattgtctcaatcattgatacttgttcccccaaaaccctgggctccagtcaatcgttgcgtccctcacacggtgatcgaggcatcactgatgatggcaaggatgatgcggtggccacagccaatgacagcgcgcaagtcccccgtgcgactggtggtgcggcatgcgggggtgctcttgctgccttcgccttcacctagcaaccagagatgacttcgaccttccctcgttggcaagtgtctcgaaccgttgccgtgactctccgccaccaagcgcctctgcaactagcggggcaaaggacaaccgagggagaggatggtggagtagccgatggagaggaggaggaggcgcttcggatgaggactttagttttgtattggttctatgactctctgccatgtacctctgcaggtagcggggcaagagcaaccaagagagaggaggcgccgtcgctagcgatgcgtggttaaacagccgaggtagaggaggcactccgaatgccaatttagttttgtattggttgttagcaaatagtgaaatattaaagtcgattataatatatgtattgctcgtttttatataaccactgtgaattaatattttatcgaa

SEQ ID NO: 120435 - DNA, 471 bp, Zea Mays
tgtgaaaactgaaatttaattaaatggaaataggaaaaaagaaaacatcttctggaccaactctatgagctggcaaaatcccctctttcccacgtcggcccacctggcccgggtcgcgtgtctacgccaacaggcgggacccgcgggtcggccgccccacgcgcgctaccgcaccatccaatgtgtgggccctatcaggctgatgaacactcctcactggcgtgtgggtccagaaggtcagggtgccttccccttgctccgcacgaatggagcctcgagctcaacaaactgcgctgaatcctccgtggttgttgcggtcaccctctagtgtttatctaccaggcgcaactcccctgcctcctcgtttcatttcaccagagccaaaatcgagcaccagcgccagagcgaaggggagatgagcagggagcgcctgccaacgccgtccccgtccacgaccgacgttcggggatc

SEQ ID NO: 120436 - DNA, 896 bp, Zea Mays
aatcccctccgtccggccgtcccctgcctccctcccggccgcttccaaatccacccgccatccgttccgccgtcgccgcgatggacgccgcggaggcctcggaggtgcaggcgcggctggccgcggccgtgcacgcgctcaaccacgacgcgcgtcccgaggcgcgcctcgccgctaaccaatggctcctcgcgctgcagcggtccccgcaggcgtgggcagtcgccacctccctcctggccaccccagacccgctcccgcccgccgatctcctcttcttcgccgcgcagatgctccgccggaagatccagtctccgggccccgcgctcctcgggctcggcctggcgtcgcagctcctcgatgcgctgctcctggccgcgcggcggttctgcgccgccccggcaccgcgccagctgctcacgcagatctgcctggcgctcgccgcgttggcgctccgcgccgagggcggcgtcgacggcctcttcgcgcgtatgccgcacctgccgccccccgccgtgctggagctgctcaccgtgctccccgaggaggctgcgcaggaccagggcggcgacacgggggttgacgccgccgcgcggtgccggtttacgcgcgagctgctcgcgcacgcgccatcggtgcttgagttcctccaccggcaatccgagaaggcacccgccgatgacgacggggttcccctcgacgagcgcaaccgcagaatcctccggtgcctactgagctgggtccgcgtgaggtgcttctcagagacgccggcagcctcgcttgccaggcacccacttctcacttttgcgttcaactcgctgcaggtgtccttctcgtttgaggtggccatagaggttatgactgagcttgtcagccagcaccaagtaagcttgttt

SEQ ID NO: 120437 - DNA, 131 bp, Zea Mays
catcattttcttggtcaaacctaggcagtcatgatttccttcagcactacccaatcctcagggactcatttatcttatgttctaggcatcaagcaaaaaatccatcctcactagtcacatcaagaacaaac

SEQ ID NO: 120438 - DNA, 1483 bp, Zea Mays
atggtagcagcagtgagggtcgacgccaggggctggtacaccggtcctggtatggttgtccctggcgtcgtcagccatgcaactggtgatgaagatggcgcaacacaactggaattacctgaggcctttctgagtaagacaccttatataagggaggctcttcttctaccagctttagccaacagaaatgagaaaattattgctggtcttgcctgtttgatgtgtgaagttggccaggcggcacctgctttggttgcagaagggggtagccaagcacttgctctcaccgatggacttttgaggtgtagtttggcacatttcattcttggtattgatgtgaagtcagccaaaagaaatgtggtacaagagttgtttgtgcctgtgttttcttcgctgctggatgctcttttatttcgtgctcagatggacactgatgagcatggttctgatggagcaccttgtatacctgagagactaacacagttcaggatgaatttggaggagctcctcgttgatatttgtttgcttctgggtgcccctgcatatataaacaggctcttttctggtggatgggacttttcaagccaaacaattccttggaaggaggtagaagttagaatgtatgcactcagcatggttgctgacacgattttacaagatgaaggctcctttgatttttcaatcataatgcattttgtgaacattttgtccagtagaacacctgttgaactgaatggaaatttgtttttggtgtataaatcgttcggtgatgtcgttggctcgtactcaaagtggttatcgtcttctcaatgtaacattaagcccttactcctattttgcgcgtcaggaatttcaaaatccgtatcatcaaatgcttgctccttagcattgcgcaaactttgtgaggatgctccttcattcatccatgaaccacagaaccttgaaattcttttctggattggtgagggcatgaataaagggaacctgcagctagaggatgaggaagagataattagtgcaatcacacatgctttaagttctataagtgaaaaagagttgaagaaaagttcactggccaggttactttgttccagttactctgcagtggaaaagattattgacattgatagagatcaattgctaaggcaaaatccagctgcttatacgcaatcattggatcttgctgtccgtggtctctacaggatgagtgctttgtttcatcatttggcaacatcagtcacatctggtctggtcgatgatgatataattatagttcttcttggaatattctggccacttcttgaaagtcttttccgatcatctcatatggagaatgtgcatttatctgcagctatatgccgttctctttcttctgctatacattcttgcggacaccactttcatattttattacctaaagttatggagtgcttatctgcaaatttcttgctatttcaaaggcacgactgcttcttgaggacag

SEQ ID NO: 120439 - DNA, 1280 bp, Zea Mays
aattcttcttatacctgtgatcaagaacctgacctagttgaagcatatacctactttacatctatgtttattcgctgctgtccaaaggaagccattgtggcatctagctccctgattgagttatcatttcaaaaggcagctatatgctctacagcaatgcaccgaggagctgcacttgcagcaatgtcatatatgtcgtgttttcttgagactgcccttgctgctgtgctagaatctcctgagtgcatccctaacgggtcacctggtgtggccctaatccaaatcttggcacgctgtggtgaaggtctattatctaatgtgctttatgctttacttggtgtatcagccttgtcaagggtccataaatctgccacaatattgcaacaactggcggcattgtgcagtttcagtgagggaacgacatggaaggctatccttagttggaattctctttgtgggtggctacaatcgacggtgaaatctttgccttctgagtatctaaagcaaggggaggctgaaataatagttccatcgtggctcaaggtgcttcaggatgcaggctcagactatcttcacagcaggactggtgataatataagaagccatcaaggttacatgcaagggaagggtggtagaactcttaaacgtataatcagagatttcgcagaaagccaccggaatgttccaatccccagtcctacatgatatggatgtgtcacgagtcttgcactctttactgatttgaggatgtccagtccctccagtagcttggagtctgactctagagagggggtccttgtggaactgatgtccgtcccgtctctgctggcatgctacatgttggttccatctatagttcagcaagaggaagaggctatttgattgttccggacatctggttcggacttggagagtcttctctgtatagcaaggaagtcgcaccattgttctgctgactaattgggggttgaatgcaaagtctgaagccgcatgtcatggttcgagatccaattttgttttgatagacatactgtgaaattcattgtgccggtaagctatatgaagacaaaatggggggatggaatgcaacctgtacataccattctttgctggttggggcaggcgatgtacgaacattcatatgcagcagtgttactgctcgaatctggagttaaacatgggcagtaatgctaggcatttatcaaacttctatcatgtcagtcgaaactttgaacaagtgtacataatcaaatatattatcagatatcataattttatgg

SEQ ID NO: 120440 - DNA, 1262 bp, Zea Mays
atcacccaaccaagccttcgtcctcctccctcactcacagtggtggacaccatggccgtacaagcgcaattcggcggcctcctgctcccaccctacgcggtcgaggaccagatgcgggcgctcaaggactacggcgtgctcctgtccgccgcgcagagcgagctgacgcgcaacgtcgtcgtcggcggcggcggggcggccgccatgcccctgccgtcgcgcaagcgccaccgcagggaggacgagcaccggcactacaacgtggacgtgcctctcccggggatggggtcgctggccgcagacccgacggcggcggcgtcgacgagcggccgggcgcccgccgacgccgaggtggacgcgctggtgcgggccgagtgcgagcagctgcgcgcggggctggaggcggcgcgggcgcggcagcgccgggcgctgctggcgcgcgcggccgcgtccgtccttgcgcggcgggcgcgggaggcggaggcccggctggaggccgcgcggcgacgcgccgcggagctcgacgagtgggtccgcctggccgccgcggaggcgcaggcgtggtgcggcgtcgcgcgggccaacgaggccgtcgccgcgggcatgcgcgccacgctcgacgcgctcctcctccgctcctcggccgccgccgccggccgcgagggcgagggcgactcgtccgagcccgggcccgaggacgcgcagtctcgctgctcctgctgctacgttgaggacgttgaggcgacgggcaccgctgccgccacgccctcgccattgtggaacggcaggtgggcgtgcagggcgtgcggcgagggcgaggcgtccgtgctgctgctgccgtgccggcacatgtgcctgtgcaaggcgtgcgagccccggacggacgcctgcccggtctgctccggcgccaagaacgcgtccatccacatcgcgcccagctgatgcccaccgcgccaagtcgtttgtttgcggggcctagcatggcgcgtcgattggattcaatttgctccgtagggttcgtcaagtaacctagatgagtagttaggagtttgatagattcgatgccgttgattttcttttatgcacgatgttaatggaaaatcagaaagaagaccgacttgtcatgtaaaccggcatgcttccttgctctgttttctcagcgtatttgttgctctagattttcgtttcttctgttttgacgccaagaaatatatataatgtagggcccgcttcctcatttaaaaaaaatacaattatgatcc

SEQ ID NO: 120441 - DNA, 106 bp, Zea Mays
ccttgaaatttgtaacatttgttcatctaaactttacaaactaaattcatgcatggatgtcccttttttggacttttactaacttatgttggttaaatgccttccc

SEQ ID NO: 120442 - DNA, 301 bp, Zea Mays
ttattttgtaattttaaaagtgcaacgaagctcaaatatgacatgaatagcatgcttttgagtgaccagcggaatggttcatgctttgtgaattgtactaccaataatcttacacaggtattgacattgcagggaaccaaattatattatattacagctacaaaatattatcataagaaaatgccaaaataaaaatggaaccttatgtttgatcagtctttggtgcttattaaaagttgtcagttacagtgctatagggtcctcgttcttaagttttgaggaaagactcacaagagttaaa

SEQ ID NO: 120443 - DNA, 197 bp, Zea Mays
tgcagtgatcgatgacacttgttatagcttgttgttgtcgtcgtcatcgtcgtcgttgttgttcatgctgctgttgttacgacttcaagaaatctcctcaattgctagagatataaccacaaccgaaaaagagcagccgagcaaagagaactctgatcaaatcatcagctactccctccgtctcaaaatataatttg

SEQ ID NO: 120444 - DNA, 978 bp, Zea Mays
tataaataaagtactcaagcaatcctcgagcctcaggcccaagcaaagcatccagcggagccacaccacaccacccttggtccggcactagcactagctatccagtggagacgaagatggcgacggcgcggtggctgcaggttgccgccatggcggtggcgctgctggcggagtgggcgacggcggcggcgcctcggaagcccgtggacgtgccgttccagaagaactacgtgccgacgtgggcgcaggaccacatccactacatcgacggcgggcgggaggtgcagctgtacctggacaagtccaccggcacgggcttccagacgcggggctcctacctcttcggccacttcagcatgcacatgaagctcgtcggcggcgactccgcgggcaccgtcacggccttctacctgtcgtcgcagaactcggagcacgacgagatcgacttcgagttcctgggcaaccggacggggcagccctacatcctgcagaccaacgtgttcaccggcggcaagggcgaccgcgagcagcggatctacctctggttcgaccccaccaaggagtaccactcctactccgtcctctggaacctctacatgatcgcgttcttcgtggacgacgtgccgatccgggtgttcaagaacacgagcgccgaggtcaggcgccgctacaccatctacaactactgcaccgatcgcgaccgctacggcgccgccgtgccgcccgagtgcgcccgcgaccgcgacgtctgatgatgatgcgttgggccggcaagctgcttgatcgagagcagcctgtaatgtatgtatggtatggtattgttgtgtgtcaggttcgtcgtcgtgggtctgcagagacacagagagagtccgatccggcgcgtacgtgtgcccgcgtgggcacatgcatacgtacatgcttgtgttgtactgtacgctcgtatctcctcacaccgaaatgaattgcgattaagtatcg

SEQ ID NO: 120445 - DNA, 1624 bp, Zea Mays
tataaataaagtactcaagcaatcctcgagcctcaggcccaagcaaagcatccagcggagccacaccacaccacccttggtccggcactagcactagctatccagtggagacgaagatggcgacggcgcggtggctgcaggttgccgccatggcggtggcgctgctggcggagtgggcgacggcggcggcgcctcggaagcccgtggacgtgccgttccagaagaactacgtgccgacgtgggcgcaggaccacatccactacatcgacggcgggcgggaggtgcagctgtacctggacaagtccaccggcacgggcttccagacgcggggctcctacctcttcggccacttcagcatgcacatgaagctcgtcggcggcgactccgcgggcaccgtcacggccttctacctgtcgtcgcagaactcggagcacgacgagatcgacttcgagttcctgggcaaccggacggggcagccctacatcctgcagaccaacgtgttcaccggcggcaagggcgaccgcgagcagcggatctacctctggttcgaccccaccaaggagtaccactcctactccgtcctctggaacctctacatgatcgcgttcttcgtggacgacgtgccgatccgggtgttcaagaacacgagcgccgacctgggcgtgcggtacccgttcagccagccgatgaagctctactccagcctgtggaacgccgacgactgggcgacccgcggcgggcgcgagaagacggactggtccaacgcgcccttcgtcgcctcctaccgcggcttccacgtcgacggctgcgaggcctccgcggaggcgcgcttctgcgccacccagggcgcgcgctggtgggaccagccggagttcagggacctcgacgccgcgcagtaccgccgcctggccgaggtcaggcgccgctacaccatctacaactactgcaccgatcgcgaccgctacggcgccgccgtgccgcccgagtgcgcccgcgaccgcgacgtctgatgatgatgcgttgggccggcaagctgcttgatcgagagcagcctgtaatgtatgtatggtatggtattgttgtgtgtcaggttcgtcgtcgtgggtctgcagagacacagagagagtccgatccggcgcgtacgtgtgcccgcgtgggcacatgcatacgtacatgcttgtgttgtactgtacgctcgtatctcctcacaccgaaatgaattgcgattaagtatcgaaatttcggcagcttatccatcatgtaatgagttcctctgcagtacttaaaactctcatcgtctcttgtctgtatatctatacaacttcttgctcgaagtagtccaatatttccgtgtgcattagattagcatctagtggtatgagagttttacgttcatagaaggttactgcagacgcgaactgcttgtctacttccacccatcctatctctcgtgtcatctcttttactttttaaacagtgtactccacaatcttattatgctatataaatattaaaaaaagaaatctaggtacaatttgatgcacatataaaactaatcaaaactgaaccgatagtgatgtttcatagaaaattaccaccaacggcagcgcttgcctactctata

SEQ ID NO: 120446 - DNA, 294 bp, Zea Mays
atggatgtccccacccccacgatccacacccttgcccgcatctccccttccatccgccacgcccgcatttggctccgcatctccccttccattggcctccagcgcgaaccccttggtggccgcctccagctgcgcgaatgtgaactctccagggggtccttcaacgatgacagtccgctcggcttccgcgtcatcacacgcgacagctgccaccggaataggatgcgcgcccgcgacccgtacgggctcccgcccaccacagcacccccgacgacgatgttgtggttgttctaa

SEQ ID NO: 120447 - DNA, 4936 bp, Zea Mays
tcccagtttcccacaacaacctcgccccattccgtcccgtccccaccacactgctcggcggcggcggcgccagcgccagcgacgacgactagtaaaacgtaacgcgcgccctgacccagtcccgatacgggctataaagctcaccgcccctccgtcccctcctcgcaaacgcaacgtccgtccctgggcctcccgttccccgttcctcctccctgactccctcccacgctgcaccggcccccctccgcacaagcgtttcgttcgttccttcgtaacctccgtatcagcagctgacgcaaagagctagagctgccggtgtgccggtcgccatgcataaccccaggccgggcggcggggacatcgtcgagatgtcgtcgtccgccaccgccgaggggcgggtgatcccgcacagcggcccgctgagcaagaagtcgggcgcccggaagagcgcgcggttcgcggagtccgtgtcggcgccgctgtccgcgccgccgccgcgcgcctccgccaacaacaacaacaacaacgacgacgacgactacgtggagatcaccctcgacgtgcgcgacgactcggtggcggtgcacagcgtcaagcccgcccacggcggcggcgccggcgccggcgccggcgcgggcggcgacgacccggacgtgacgctgctggcgcgcacgctcgagagccggcgctcctcgtcctacggccactccgtcatccggaacgcctcgtcgcggatcaagcaggtgtcgcaggagctccgccgcatcgcctccatcaaccgccgcggcgccgcggggccccggatcgaccgctccaagtccgccgccgcgcacgcgctcaaggggctcaagttcatcagcaaggccgagggcgccgccggatgggaggccgtcgagaggcgcttcgacaagctcgccgagaacggcctcctccaccggtccaagttcggccagtgcatcgggatgaaggagccggagttcgccggcgagctgttcgacgcgctgtcgcggcgccgcaacatctccggcgacagcatcagcaaggcggagctgctcgagttctgggaccaaatctccgacaccagcttcgacggccggctgcagacgttcttcgacatggtggacaaggacgccgacggaaggatcaccgaggaggaggtcaaagagatcatcacgctgagcgcgtcggcgaacaagctttcgaagatcacggatcaggcggaggagtacgcccggctgatcatggaggagctggacccgggcaacctgggctacatcgagctgtacaacctggagatgctgctcctgcaggcgccgagccagtcggtgcgcatcggcacgaccaacagccggaacctgagccagatgctgagccagagcctccgtccgacggcggagccgaaccctctccggcggtggtaccggcgcgcgcagtacttcctggaggacaactggcggcgcgtgtgggtgatgcttctgtggctgtgcatctgcgcggggctgttcgcctggaagttcatccagtaccggcagcgctacgtgttccaggtgatggggtactgcgtgtgcgtggccaagggcggcgcggagacgctcaagttcaacatggcgctgatcctgctcccggtgtgccggaacaccatcacctggatccgcaaccgcaccgccggcgtggggcgcgtggtgcccttcgacgacaacctcaacttccacaaggtggtggcggtgggcatcgcggtcggggccgggctgcacatcatctcccacctgacgtgcgacttcccgcggctgctccacgccacggacgccgagtacgcgccgctggggcagtacttcggggtgccccgcccgcccaactactggtggttcgtgcgcggcacggaggggtggacggggctggtgatgctggtgctcatggccgtggcgttcaccctggcgacgccgtggttccggcggggccgcatcgcgctgcctggcccgctgcggcggctgacggggttcaacgcgttctggtactcgcaccactgcttcgtggtggtgtacgcgctgctgatcgtgcacgggcactacctgtacctgacgcacaagtggtacaagaagtcgacgtggatgtacctggccgtgcccatggtgctgtacgcgtgcgagcgcctcaccagggcgctgcgctccagcgtcaggcccgtcaggatcctcaaggtggccgtgtacccgggcaacgtcctctcgctccacttctccaagccgcagggcttccgctacaagagcgggcagtacatcttcgtcaactgcgccgccgtgtcgccgttccagtggcacccgttctccatcacgtcggccccgcaggacgactacgtgagcgtccacatcaggacgctgggcgactggacccgcgagctcaagaacgtcttctcaagggtgtgccggccgccgacggagggcaagagcgggctgctccgcgccgagtacgaccgcgacggcagcgccgtggccaacccgaggtgagaaatctgtcccttgaccgatggaatgcgctggcgtacgtctccatgacaaaaacgtggcggtggcgtcgtagttgggtgggaggtcggagcaagaagatgcctatgcaggcaggcaggggttcttcttcttcttccgtgtggtagcatttgttgaccttgacccctgtgcggaatttctgccaccaaatactactagtacttagtggcacggtaggtggctagctgacttattattgcgttcagtttggccgttgggcatgatgagctcggcgaaccaaccacaaccaacggcggtgaccgctggccggtgatattcccggcggcggatcggaacacgagctgcgactgttggtcctggtttttatccgtgggccacggccggccatgcatgtctgcacgacgacggacagacagtggctgcgactgtacgggggaagctattgaccattattattagttcggactaaataactaaaccacctgtcgtgtgtcgtgtgcagcttccccaaggtgctgatcgacgggccgtacggcgcgccggcgcaggactacaagcagtacgacatcgtgctgctggtggggctaggcatcggcgccacgcccatgatctccatcatcaaggacatcatcaacaacatgaggcagctggacggcggcggcgacctggaggcctcggacgcgtcggcgtcgtcgtcgtcgatggcctcgttccgcacccggcgtgcctacttctactgggtgacccgggagcaggggtccttcgagtggttccgcggcgtgatggacgaggtggcggagacggacaggaagggcgtcatcgagctgcacaactactgcaccagcgtgtacgaggaaggggacgcccggtccgcgctcatcgccatgctccagtcgctcaaccacgccaagcacggcgtcgacgtggtgtccggcacccgcgtcaagacccacttcgccaggcctaactggcgcaacgtctacaagcgcatcgcgctcaaccaccagaaccagcgcgtcggtgagttgttgttgttgttgttcttcttcttcttctttgttgtgcattcctcgaccggtcgccattctacttcggtccattcgtcgaacacgtggcatgcattactacttgcttctctcatgacccggcggtgaaagaagctttctaccaaacccgatatgcatgacaggccggtggtggacaggtgtgatgcgcgtgcggggagtagcagtagtagtgcaatgcggctggcctaactttcgttatagaagacagacagacacatgcattagaggatatagctaatcattgttgctgagacttgatattaattaattaattgcaggagtgttctactgcggcgccccggtgctgaccaaggagctgcgcgagctggcgcaggacttctcgcggaagaccaacaccaagttcgagttccacaaggagaacttctagctctctctctctctatatatatgtaaggatatggatgggtgtagagaggggatcggagtagcgcaaagtaggtatttgcttgaccagttgggttgggtgggtcaaaacccccaacagtttttttttttaattattattattattcttcttcttcttcatttgctctagagaagaactaatgatcgaaatgccattatttgtacagatcctctctctctctcacttagactatagctaggcagttcgatgagcatgcatgcaagcagagttgagggtttgatggccttagtcagatcagatcaaaagcgtcaaaatgcatgtctctggtcgttctcagccacagccagcagtgcgtgcatcacgcaaagaaagcgcacgcatcttgtgtggctgccatagctgaggtgctctaggccacacattctcctactctcatcatcatccctgatacacgtacggtgggcaacaaccatgcatgaacggcctcacccaatgaatgacatgtttcagggttctagagggcgatgagcatgcatgattgcatacgcatgactggcccacatagcaacccagcgtagtcggggttttttttgttttgttttgttgtcggtatatatgtatatattagctcttcgtttgtttattaattagtatgtgccttctgattgctttatcgcattgtacatacatcgatggtgcggagcaagaagagcactacataaagcacacaaaaaaaaaacttgtgcaatggtgggtggaggtcatgcacactcttgaataacaaaatgaggtgttccttcttccccatgtgcggttgcagtttctcttttcagtctctctttctctacaacctgaacatgcttcccagcatatatgacccagttaggagccaatttctaacacaataccttgatgatgatgatacttgaattctggaaaggcatgtaactaaatcttcctctgagtgtgacttcaag

SEQ ID NO: 120448 - DNA, 2436 bp, Zea Mays
gcaaacgcaacgtccgtccctgggcctcccgttccccgttcctcctccctgactccctcccacgctgcaccggcccccctccgcacaagcgtttcgttcgttccttcgtaacctccgtatcagcagctgacgcaaagagctagagctgccggtgtgccggtcgccatgcataaccccaggccgggcggcggggacatcgtcgagatgtcgtcgtccgccaccgccgaggggcgggtgatcccgcacagcggcccgctgagcaagaagtcgggcgcccggaagagcgcgcggttcgcggagtccgtgtcggcgccgctgtccgcgccgccgccgcgcgcctccgccaacaacaacaacaacaacgacgacgacgactacgtggagatcaccctcgacgtgcgcgacgactcggtggcggtgcacagcgtcaagcccgcccacggcggcggcgccggcgccggcgccggcgcgggcggcgacgacccggacgtgacgctgctggcgcgcacgctcgagagccggcgctcctcgtcctacggccactccgtcatccggaacgcctcgtcgcggatcaagcaggtgtcgcaggagctccgccgcatcgcctccatcaaccgccgcggcgccgcggggccccggatcgaccgctccaagtccgccgccgcgcacgcgctcaaggggctcaagttcatcagcaaggccgagggcgccgccggatgggaggccgtcgagaggcgcttcgacaagctcgccgagaacggcctcctccaccggtccaagttcggccagtgcatcgggatgaaggagccggagttcgccggcgagctgttcgacgcgctgtcgcggcgccgcaacatctccggcgacagcatcagcaaggcggagctgctcgagttctgggaccaaatctccgacaccagcttcgacggccggctgcagacgttcttcgacatggtggacaaggacgccgacggaaggatcaccgaggaggaggtcaaagagatcatcacgctgagcgcgtcggcgaacaagctttcgaagatcacggatcaggcggaggagtacgcccggctgatcatggaggagctggacccgggcaacctgggctacatcgagctgtacaacctggagatgctgctcctgcaggcgccgagccagtcggtgcgcatcggcacgaccaacagccggaacctgagccagatgctgagccagagcctccgtccgacggcggagccgaaccctctccggcggtggtaccggcgcgcgcagtacttcctggaggacaactggcggcgcgtgtgggtgatgcttctgtggctgtgcatctgcgcggggctgttcgcctggaagttcatccagtaccggcagcgctacgtgttccaggtgatggggtactgcgtgtgcgtggccaagggcggcgcggagacgctcaagttcaacatggcgctgatcctgctcccggtgtgccggaacaccatcacctggatccgcaaccgcaccgccggcgtggggcgcgtggtgcccttcgacgacaacctcaacttccacaaggtggtggcggtgggcatcgcggtcggggccgggctgcacatcatctcccacctgacgtgcgacttcccgcggctgctccacgccacggacgccgagtacgcgccgctggggcagtacttcggggtgccccgcccgcccaactactggtggttcgtgcgcggcacggaggggtggacggggctggtgatgctggtgctcatggccgtggcgttcaccctggcgacgccgtggttccggcggggccgcatcgcgctgcctggcccgctgcggcggctgacggggttcaacgcgttctggtactcgcaccactgcttcgtggtggtgtacgcgctgctgatcgtgcacgggcactacctgtacctgacgcacaagtggtacaagaagtcgacgtggatgtacctggccgtgcccatggtgctgtacgcgtgcgagcgcctcaccagggcgctgcgctccagcgtcaggcccgtcaggatcctcaaggtggccgtgtacccgggcaacgtcctctcgctccacttctccaagccgcagggcttccgctacaagagcgggcagtacatcttcgtcaactgcgccgccgtgtcgccgttccagtggcacccgttctccatcacgtcggccccgcaggacgactacgtgagcgtccacatcaggacgctgggcgactggacccgcgagctcaagaacgtcttctcaagggtgtgccggccgccgacggagggcaagagcgggctgctccgcgccgagtacgaccgcgacggcagcgccgtggccaacccgaggtgagaaatctgtcccttgaccgatggaatgcgctggcgtacgtctccatgacaaaaacgtggcggtggcgtcgtagttgggtgggaggtcggagcaaga

SEQ ID NO: 120449 - DNA, 3504 bp, Zea Mays
cctcccgttccccgttcctcctccctgactccctcccacgctgcaccggcccccctccgcacaagcgtttcgttcgttccttcgtaacctccgtatcagcagctgacgcaaagagctagagctgccggtgtgccggtcgccatgcataaccccaggccgggcggcggggacatcgtcgagatgtcgtcgtccgccaccgccgaggggcgggtgatcccgcacagcggcccgctgagcaagaagtcgggcgcccggaagagcgcgcggttcgcggagtccgtgtcggcgccgctgtccgcgccgccgccgcgcgcctccgccaacaacaacaacaacaacgacgacgacgactacgtggagatcaccctcgacgtgcgcgacgactcggtggcggtgcacagcgtcaagcccgcccacggcggcggcgccggcgccggcgccggcgcgggcggcgacgacccggacgtgacgctgctggcgcgcacgctcgagagccggcgctcctcgtcctacggccactccgtcatccggaacgcctcgtcgcggatcaagcaggtgtcgcaggagctccgccgcatcgcctccatcaaccgccgcggcgccgcggggccccggatcgaccgctccaagtccgccgccgcgcacgcgctcaaggggctcaagttcatcagcaaggccgagggcgccgccggatgggaggccgtcgagaggcgcttcgacaagctcgccgagaacggcctcctccaccggtccaagttcggccagtgcatcgggatgaaggagccggagttcgccggcgagctgttcgacgcgctgtcgcggcgccgcaacatctccggcgacagcatcagcaaggcggagctgctcgagttctgggaccaaatctccgacaccagcttcgacggccggctgcagacgttcttcgacatggtggacaaggacgccgacggaaggatcaccgaggaggaggtcaaagagatcatcacgctgagcgcgtcggcgaacaagctttcgaagatcacggatcaggcggaggagtacgcccggctgatcatggaggagctggacccgggcaacctgggctacatcgagctgtacaacctggagatgctgctcctgcaggcgccgagccagtcggtgcgcatcggcacgaccaacagccggaacctgagccagatgctgagccagagcctccgtccgacggcggagccgaaccctctccggcggtggtaccggcgcgcgcagtacttcctggaggacaactggcggcgcgtgtgggtgatgcttctgtggctgtgcatctgcgcggggctgttcgcctggaagttcatccagtaccggcagcgctacgtgttccaggtgatggggtactgcgtgtgcgtggccaagggcggcgcggagacgctcaagttcaacatggcgctgatcctgctcccggtgtgccggaacaccatcacctggatccgcaaccgcaccgccggcgtggggcgcgtggtgcccttcgacgacaacctcaacttccacaaggtggtggcggtgggcatcgcggtcggggccgggctgcacatcatctcccacctgacgtgcgacttcccgcggctgctccacgccacggacgccgagtacgcgccgctggggcagtacttcggggtgccccgcccgcccaactactggtggttcgtgcgcggcacggaggggtggacggggctggtgatgctggtgctcatggccgtggcgttcaccctggcgacgccgtggttccggcggggccgcatcgcgctgcctggcccgctgcggcggctgacggggttcaacgcgttctggtactcgcaccactgcttcgtggtggtgtacgcgctgctgatcgtgcacgggcactacctgtacctgacgcacaagtggtacaagaagtcgacgtggatgtacctggccgtgcccatggtgctgtacgcgtgcgagcgcctcaccagggcgctgcgctccagcgtcaggcccgtcaggatcctcaaggtggccgtgtacccgggcaacgtcctctcgctccacttctccaagccgcagggcttccgctacaagagcgggcagtacatcttcgtcaactgcgccgccgtgtcgccgttccagtggcacccgttctccatcacgtcggccccgcaggacgactacgtgagcgtccacatcaggacgctgggcgactggacccgcgagctcaagaacgtcttctcaagggtgtgccggccgccgacggagggcaagagcgggctgctccgcgccgagtacgaccgcgacggcagcgccgtggccaacccgagcttccccaaggtgctgatcgacgggccgtacggcgcgccggcgcaggactacaagcagtacgacatcgtgctgctggtggggctaggcatcggcgccacgcccatgatctccatcatcaaggacatcatcaacaacatgaggcagctggacggcggcggcgacctggaggcctcggacgcgtcggcgtcgtcgtcgtcgatggcctcgttccgcacccggcgtgcctacttctactgggtgacccgggagcaggggtccttcgagtggttccgcggcgtgatggacgaggtggcggagacggacaggaagggcgtcatcgagctgcacaactactgcaccagcgtgtacgaggaaggggacgcccggtccgcgctcatcgccatgctccagtcgctcaaccacgccaagcacggcgtcgacgtggtgtccggcacccgcgtcaagacccacttcgccaggcctaactggcgcaacgtctacaagcgcatcgcgctcaaccaccagaaccagcgcgtcggagtgttctactgcggcgccccggtgctgaccaaggagctgcgcgagctggcgcaggacttctcgcggaagaccaacaccaagttcgagttccacaaggagaacttctagctctctctctctctatatatatgtaaggatatggatgggtgtagagaggggatcggagtagcgcaaagtaggtatttgcttgaccagttgggttgggtgggtcaaaacccccaacagtttttttttttaattattattattattcttcttcttcttcatttgctctagagaagaactaatgatcgaaatgccattatttgtacagatcctctctctctctcacttagactatagctaggcagttcgatgagcatgcatgcaagcagagttgagggtttgatggccttagtcagatcagatcaaaagcgtcaaaatgcatgtctctggtcgttctcagccacagccagcagtgcgtgcatcacgcaaagaaagcgcacgcatcttgtgtggctgccatagctgaggtgctctaggccacacattctcctactctcatcatcatccctgatacacgtacggtgggcaacaaccatgcatgaacggcctcacccaatgaatgacatgtttcagggttctagagggcgatgagcatgcatgattgcatacgcatgactggcccacata

SEQ ID NO: 120450 - DNA, 2762 bp, Zea Mays
cgtttcgttcgttccttcgtaacctccgtatcagcagctgacgcaaagagctagagctgccggtgtgccggtcgccatgcataaccccaggccgggcggcggggacatcgtcgagatgtcgtcgtccgccaccgccgaggggcgggtgatcccgcacagcggcccgctgagcaagaagtcgggcgcccggaagagcgcgcggttcgcggagtccgtgtcggcgccgctgtccgcgccgccgccgcgcgcctccgccaacaacaacaacaacaacgacgacgacgactacgtggagatcaccctcgacgtgcgcgacgactcggtggcggtgcacagcgtcaagcccgcccacggcggcggcgccggcgccggcgccggcgcgggcggcgacgacccggacgtgacgctgctggcgcgcacgctcgagagccggcgctcctcgtcctacggccactccgtcatccggaacgcctcgtcgcggatcaagcaggtgtcgcaggagctccgccgcatcgcctccatcaaccgccgcggcgccgcggggccccggatcgaccgctccaagtccgccgccgcgcacgcgctcaaggggctcaagttcatcagcaaggccgagggcgccgccggatgggaggccgtcgagaggcgcttcgacaagctcgccgagaacggcctcctccaccggtccaagttcggccagtgcatcgggatgaaggagccggagttcgccggcgagctgttcgacgcgctgtcgcggcgccgcaacatctccggcgacagcatcagcaaggcggagctgctcgagttctgggaccaaatctccgacaccagcttcgacggccggctgcagacgttcttcgacatggtggacaaggacgccgacggaaggatcaccgaggaggaggtcaaagagatcatcacgctgagcgcgtcggcgaacaagctttcgaagatcacggatcaggcggaggagtacgcccggctgatcatggaggagctggacccgggcaacctgggctacatcgagctgtacgcgtgcgagcgcctcaccagggcgctgcgctccagcgtcaggcccgtcaggatcctcaaggtggccgtgtacccgggcaacgtcctctcgctccacttctccaagccgcagggcttccgctacaagagcgggcagtacatcttcgtcaactgcgccgccgtgtcgccgttccagtggcacccgttctccatcacgtcggccccgcaggacgactacgtgagcgtccacatcaggacgctgggcgactggacccgcgagctcaagaacgtcttctcaagggtgtgccggccgccgacggagggcaagagcgggctgctccgcgccgagtacgaccgcgacggcagcgccgtggccaacccgagcttccccaaggtgctgatcgacgggccgtacggcgcgccggcgcaggactacaagcagtacgacatcgtgctgctggtggggctaggcatcggcgccacgcccatgatctccatcatcaaggacatcatcaacaacatgaggcagctggacggcggcggcgacctggaggcctcggacgcgtcggcgtcgtcgtcgtcgatggcctcgttccgcacccggcgtgcctacttctactgggtgacccgggagcaggggtccttcgagtggttccgcggcgtgatggacgaggtggcggagacggacaggaagggcgtcatcgagctgcacaactactgcaccagcgtgtacgaggaaggggacgcccggtccgcgctcatcgccatgctccagtcgctcaaccacgccaagcacggcgtcgacgtggtgtccggcacccgcgtcaagacccacttcgccaggcctaactggcgcaacgtctacaagcgcatcgcgctcaaccaccagaaccagcgcgtcggagtgttctactgcggcgccccggtgctgaccaaggagctgcgcgagctggcgcaggacttctcgcggaagaccaacaccaagttcgagttccacaaggagaacttctagctctctctctctctatatatatgtaaggatatggatgggtgtagagaggggatcggagtagcgcaaagtaggtatttgcttgaccagttgggttgggtgggtcaaaacccccaacagtttttttttttaattattattattattcttcttcttcttcatttgctctagagaagaactaatgatcgaaatgccattatttgtacagatcctctctctctctcacttagactatagctaggcagttcgatgagcatgcatgcaagcagagttgagggtttgatggccttagtcagatcagatcaaaagcgtcaaaatgcatgtctctggtcgttctcagccacagccagcagtgcgtgcatcacgcaaagaaagcgcacgcatcttgtgtggctgccatagctgaggtgctctaggccacacattctcctactctcatcatcatccctgatacacgtacggtgggcaacaaccatgcatgaacggcctcacccaatgaatgacatgtttcagggttctagagggcgatgagcatgcatgattgcatacgcatgactggcccacatagcaacccagcgtagtcggggttttttttgttttgttttgttgtcggtatatatgtatatattagctcttcgtttgtttattaattagtatgtgccttctgattgctttatcgcattgtacatacatcgatggtgcggagcaagaagagcactacataaagcacacaaaaaaaaaa

SEQ ID NO: 120451 - DNA, 1152 bp, Zea Mays
cgaacacgtggcatgcattactacttgcttctctcatgacccggcggtgaaagaagctttctaccaaacccgatatgcatgacaggccggtggtggacaggtgtgatgcgcgtgcggggagtagcagtagtagtgcaatgcggctggcctaactttcgttatagaagacagacagacacatgcattagaggatatagctaatcattgttgctgagacttgatattaattaattaattgcaggagtgttctactgcggcgccccggtgctgaccaaggagctgcgcgagctggcgcaggacttctcgcggaagaccaacaccaagttcgagttccacaaggagaacttctagctctctctctctctatatatatgtaaggatatggatgggtgtagagaggggatcggagtagcgcaaagtaggtatttgcttgaccagttgggttgggtgggtcaaaacccccaacagtttttttttttaattattattattattcttcttcttcttcatttgctctagagaagaactaatgatcgaaatgccattatttgtacagatcctctctctctctcacttagactatagctaggcagttcgatgagcatgcatgcaagcagagttgagggtttgatggccttagtcagatcagatcaaaagcgtcaaaatgcatgtctctggtcgttctcagccacagccagcagtgcgtgcatcacgcaaagaaagcgcacgcatcttgtgtggctgccatagctgaggtgctctaggccacacattctcctactctcatcatcatccctgatacacgtacggtgggcaacaaccatgcatgaacggcctcacccaatgaatgacatgtttcagggttctagagggcgatgagcatgcatgattgcatacgcatgactggcccacatagcaacccagcgtagtcggggttttttttgttttgttttgttgtcggtatatatgtatatattagctcttcgtttgtttattaattagtatgtgccttctgattgctttatcgcattgtacatacatcgatggtgcggagcaagaagagcactacataaagcacacaaaaaaaaaacttgtgcaatggtgggtggaggtcatgcacactcttgaataacaaaatgaggtgttccttct

SEQ ID NO: 120452 - DNA, 566 bp, Zea Mays
gcagcggaaattctttattacaaaatggttacaagttacaacatttacaagttataacaagattacaatatatatcatcggagtgattacaaaagaaagtgattcaaaaaaaattacaatttaaaatgtataaaatatttataggttttcaaatacatgctagcttaagtgacaatcctcaataaagaagctaaagatgggatatacttatataagaaggccgagcccaccggcacttagcaccatccacaacagaacaaaatttcaacctgaaaaacaacagggaataaaaccctgagtacgcaattactcagcaagacttacccgactaaagaaaagactctcaagggtatgctggtttgttgggaatcaaggtaaagctcatcaaatttcaaagactcgtttttgcagaaaagcttactagtagtggatccttatgccaaaaatttttacttcacaaattaagtacttttcctgaatctagatttgcctggtctagaacattcacttgtcctacactagcttcattttatcaattttaatttcacttgttatctacgctgaag

SEQ ID NO: 120453 - DNA, 451 bp, Zea Mays
atgccgacgaacaagttctgagcggtgccgtcgcctgaatcaattcattcggtgatgggttcaaatagattgttgtcatcacaattacttgatgaatcatcatctgatgacgacgaggatttcatactttctgccgcgcaaatcattcatactgtttcacaagttcgtacaaagccaggaggctctgttccaggtcgtgcatatatttatcgagatagataagcgggacacgcgagattgtaccaagattacctggctgacattcctacttatggtccaaacttgtttcggcggaggtttaggatgcatcgatccctgtttattcgcataatgaatgttgttgaacaacatgatgattactttgagcaaaaatgaaacgcagctcaacaacaaggtttaagttgtttgcagaaggttactgcagtatttcgtatgctaacttatggagtgg

SEQ ID NO: 120454 - DNA, 2131 bp, Zea Mays
ctccacggaccacggccaagcggcagcagctgcagctctgagccccgggccctgcccctgcccctgccgcttcctcccctgtacggtcccctcctctttcacctccgactgcgcccacgcgcggccccgggcgcggacgacaggtgtccggcatgctgccgccacgtccaccccgaccgacgccccttccctcctcccgccccttccacttcctcgttgtcgtctccgtcctctgtttcgcagccatcctgacgccagcccccgccgctgtagcagcagcagcatcaggggacgcggacggaggaggaggagaaggcggcgtcatcaggatcaggactgccgctgtcgccaggtccgccatggacacgaagccatttatttctgcaaaagatgccctgaagaaagaaccaattagcgatgtgattgctttaaaggattccatgaagtactttgatgctgagttcttcaatgattcaaaactacgtgagatggaagatggtgcaaaggaattcaatgtacccgcattcagagaaaatcggaaattggttgcgacggagaatggtgggttgcacaacccttctgttttactcttcaaatcatcatggagtagtggcagtatgacaagtgagactagaagtttcgagtaccctcgtgcgtcttctgtacatcgtccaactaatgatgaagatattgcatttatgtcggtaatcgagcttggagagcttattaggacaaagcaaataacatcacgtgaacttacagatatatttctgaggagattaaagaggtacaatcctgttctagaagctgttattacatatactgaagatttagcatacaaacaagccaaggaggcagatgacttgctggcacaaggaaaatatcttggtcctttgcatggcattccatatggcctcaaagatataattgcggtaccacactataagaccacttggggctcaaggacgtttaaaaaccaagtccttgatagtgaagcttatgtgtacagaagattgaagtccgctggagcagtcctggtagcaaagcttgtcacgggctcacttgcctatgatgacatatggtttgggggaaggacacgaaacccctggaacatcgaggaattctctactggctcatcggcaggtccagcggctagcacctctgcaggaatggttccatttgcaattggttcagaaactgcaggatccatagcatacccagccgctagatgtggagtaactgcattgcgcccaacatttggaacagttgcacgaaccgatgtcatgagcatttctgagagtttggataagcttggtcctttctgtagaagcgcagtagattgtgctgttgtattagacacaattcgcggaacggatgccggtgatccatcatcgcgtgaggttgctttgggtgatccatttcatgttgacatcaccaaactcactgtaggctacctcgatgacgctgagatggaggttgtcgatgttctttcctctaaaggtgtcaagctggtccccttcaagctgaactacactgtggaatcagtccagtccatcctgaacataacgatggacactgatatgcttgcgcacttcgataactggcagcgggaaggacatgatgatgactatgaggcgcaagaccagtggccggtagagcttcgtcgtgcacggttaatcccagcggtagattatatacaggcgcagcgagcacggggcaagttgatcagagaaatcaaagatagcttcactgttgatgcgtttgttggcaacgtgactgactgggagcgtgtctgtctcgggaaccttgttgggatgcctgtggtcgtggtgccgacaggcttgaagagcatcgagaacccgcctaaaggcggtacgaagagaagaacaacagtgacgacaggcatctacgctcctcctgaccacgaccatattgctctggcgctggcaatggcgtaccagtccgtcactgatcacaacaaacagcggccgccgatcgatgatctggggccgaatgatgtcatacaaagatagttcaacctgctcatggaccgcgatgatccggtgatggtagcacgagggtcgttatggttatggaagctgaagttgaagacgatcagtgagccagaatg

SEQ ID NO: 120455 - DNA, 2432 bp, Zea Mays
ctccacggaccacggccaagcggcagcagctgcagctctgagccccgggccctgcccctgcccctgccgcttcctcccctgtacggtcccctcctctttcacctccgactgcgcccacgcgcggccccgggcgcggacgacaggtgtccggcatgctgccgccacgtccaccccgaccgacgccccttccctcctcccgccccttccacttcctcgttgtcgtctccgtcctctgtttcgcagccatcctgacgccagcccccgccgctgtagcagcagcagcatcaggggacgcggacggaggaggaggagaaggcggcgtcatcaggatcaggactgccgctgtcgccaggacacgaagccatttatttctgcaaaagatgccctgaagaaagaaccaattagcgatgtgattgctttaaaggattccatgaagtactttgatgctgagttcttcaatgattcaaaactacgtgagatggaagatggtgcaaaggaattcaatgtacccgcattcagagaaaatcggaaattggttgcgacggagaatggtgggttgcacaacccttctgttttactcttcaaatcatcatggagtagtggcagtatgacaagtgagactagaagtttcgagtaccctcgtgcgtcttctgtacatcgtccaactaatgatgaagatattgcatttatgtcggtaatcgagcttggagagcttattaggacaaagcaaataacatcacgtgaacttacagatatatttctgaggagattaaagaggtacaatcctgttctagaagctgttattacatatactgaagatttagcatacaaacaagccaaggaggcagatgacttgctggcacaaggaaaatatcttggtcctttgcatggcattccatatggcctcaaagatataattgcggtaccacactataagaccacttggggctcaaggacgtttaaaaaccaagtccttgatagtgaagcttatgtgtacagaagattgaagtccgctggagcagtcctggtagcaaagcttgtcacgggctcacttgcctatgatgacatatggtttgggggaaggacacgaaacccctggaacatcgaggaattctctactggctcatcggcaggtccagcggctagcacctctgcaggaatggttccatttgcaattggttcagaaactgcaggatccatagcatacccagccgctagatgtggagtaactgcattgcgcccaacatttggaacagttgcacgaaccgatgataagcttggtcctttctgtagaagcgcagtagattgtgctgttgtattagacacaattcgcggaacggatgccggtgatccatcatcgcgtgaggttgctttgggtgatccatttcatgttgacatcaccaaactcactgtaggctacctcgatgacgctgagatggaggttgtcgatgttctttcctctaaaggtgtcaagctggtccccttcaagctgaactacactgtggaatcagtccagtccatcctgaacataacgatggacactgatatgcttgcgcacttcgataactggcagcgggaaggacatgatgatgactatgaggcgcaagaccagtggccggtagagcttcgtcgtgcacggttaatcccagcggtagattatatacaggcgcagcgagcacggggcaagttgatcagagaaatcaaagatagcttcactgttgatgcgtttgttggcaacgtgactgactgggagcgtgtctgtctcgggaaccttgttgggatgcctgtggtcgtggtgccgacaggcttgaagagcatcgagaacccgcctaaaggcggtacgaagagaagaacaacagtgacgacaggcatctacgctcctcctgaccacgaccatattgctctggcgctggcaatggcgtaccagtccgtcactgatcacaacaaacagcggccgccgatcgatgatctggggccgaatgatgtcatacaaagatagttcaacctgctcatggaccgcgatgatccggtgatggtagcacgagggtcgttatggttatggaagctgaagttgaagacgatcagtgagccagaatggctggccacctggcagaagacatcagctgtggaagtatcaagtaccaatccacatatgggcttcttcatcagctcaaataactcagcactttttttttctgaagcaggcagcattgtatcaccttaacatacgttacaaaggaggttctggatttcatctggggcctcatcagaccaaaccgagccaaagaactgatcagctagcctagtcattacatgagctgcaacttctctgggagggtatttggtttctatggactagtccatctattttattctaaaaatttttattctattttagttaataaattgtaaaatacgatgagttttcgtat

SEQ ID NO: 120456 - DNA, 2546 bp, Zea Mays
ctccacggaccacggccaagcggcagcagctgcagctctgagccccgggccctgcccctgcccctgccgcttcctcccctgtacggtcccctcctctttcacctccgactgcgcccacgcgcggccccgggcgcggacgacaggtgtccggcatgctgccgccacgtccaccccgaccgacgccccttccctcctcccgccccttccacttcctcgttgtcgtctccgtcctctgtttcgcagccatcctgacgccagcccccgccgctgtagcagcagcagcatcaggggacgcggacggaggaggaggagaaggcggcgtcatcaggatcaggactgccgctgtcgccaggtccgccatggcatggccatcaaaatgtaaatggttgcccttacagaacagtgggaggtgtctttcgtatactcatgtttgcaaataccacaagatttggaaggacacgaagccatttatttctgcaaaagatgccctgaagaaagaaccaattagcgatgtgattgctttaaaggattccatgaagtactttgatgctgagttcttcaatgattcaaaactacgtgagatggaagatggtgcaaaggaattcaatgtacccgcattcagagaaaatcggaaattggttgcgacggagaatggtgggttgcacaacccttctgttttactcttcaaatcatcatggagtagtggcagtatgacaagtgagactagaagtttcgagtaccctcgtgcgtcttctgtacatcgtccaactaatgatgaagatattgcatttatgtcggtaatcgagcttggagagcttattaggacaaagcaaataacatcacgtgaacttacagatatatttctgaggagattaaagaggtacaatcctgttctagaagctgttattacatatactgaagatttagcatacaaacaagccaaggaggcagatgacttgctggcacaaggaaaatatcttggtcctttgcatggcattccatatggcctcaaagatataattgcggtaccacactataagaccacttggggctcaaggacgtttaaaaaccaagtccttgatagtgaagcttatgtgtacagaagattgaagtccgctggagcagtcctggtagcaaagcttgtcacgggctcacttgcctatgatgacatatggtttgggggaaggacacgaaacccctggaacatcgaggaattctctactggctcatcggcaggtccagcggctagcacctctgcagaaactgcaggatccatagcatacccagccgctagatgtggagtaactgcattgcgcccaacatttggaacagttgcacgaaccgatgtcatgagcatttctgagagtttggataagcttggtcctttctgtagaagcgcagtagattgtgctgttgtattagacacaattcgcggaacggatgccggtgatccatcatcgcgtgaggttgctttgggtgatccatttcatgttgacatcaccaaactcactgtaggctacctcgatgacgctgagatggaggttgtcgatgttctttcctctaaaggtgtcaagctggtccccttcaagctgaactacactgtggaatcagtccagtccatcctgaacataacgatggacactgatatgcttgcgcacttcgataactggcagcgggaaggacatgatgatgactatgaggcgcaagaccagtggccggtagagcttcgtcgtgcacggttaatcccagcggtagattatatacaggcgcagcgagcacggggcaagttgatcagagaaatcaaagatagcttcactgttgatgcgtttgttggcaacgtgactgactgggagcgtgtctgtctcgggaaccttgttgggatgcctgtggtcgtggtgccgacaggcttgaagagcatcgagaacccgcctaaaggcggtacgaagagaagaacaacagtgacgacaggcatctacgctcctcctgaccacgaccatattgctctggcgctggcaatggcgtaccagtccgtcactgatcacaacaaacagcggccgccgatcgatgatctggggccgaatgatgtcatacaaagatagttcaacctgctcatggaccgcgatgatccggtgatggtagcacgagggtcgttatggttatggaagctgaagttgaagacgatcagtgagccagaatggctggccacctggcagaagacatcagctgtggaagtatcaagtaccaatccacatatgggcttcttcatcagctcaaataactcagcactttttttttctgaagcaggcagcattgtatcaccttaacatacgttacaaaggaggttctggatttcatctggggcctcatcagaccaaaccgagccaaagaactgatcagctagcctagtcattacatgagctgcaacttctctgggagggtatttggtttctatggactagtccatctattttattctaaaaatttttattctattttagttaataaattgtaaaatacgatgagttttcgtatttaataatttaggg

SEQ ID NO: 120457 - DNA, 1752 bp, Zea Mays
ccccccacctccattccggccgctctgcagggccggcccatgcaggtgaggcgacgacgcggcggcgcgcgtttaccggaccggcggcggcctaccggagacgatgaaggggagaccgctgttcaagagccctctcccccgcagctacctctccgaaacctccagcgtcgcgtccgccgccgtcgccacgcaccgcgtctaccaagtctggagaggaaagaatagattcctctgcggcggtcggctcatcttcggcccggacgcaagctccatcgtgctcacggtggcgctcatcatgacgccgctcgcgctcttcgtcgccttcgtctcgttccggctcgccgagctcatcgggaagccgctcggcaccgccgtcccggcgacggccatggccgtcggcatattcgacgtggtggtgctgattctcacgtcggggcgagaccccgggatcatcccccggaacgcgcggccgccggagcctgacgcagccgcgacggagagcttctcaggctcccccgcggcgatgggcgcgtcggcgtcgtggtcgctgccccccacgcgcgacgtgtacgtgaacggcgtggtggtgaaggtgaagtactgccacacgtgcatgctgtaccggccgccgcgctgctcgcactgctccgtctgcaacaactgcgtggagcgcttcgaccaccactgcccctgggtcggccagtgcatcggccggcggaattaccgcttcttcttcatgttcatctcatccaccacgttcctgtgcctctacgtgttcggcttctgctgggtgaacctgctgctcatctcccggcgctacggcgtcagcttcggcagcgccgtcgcggagtcccccgtgtcgggctgcctcatcgtctacaccttcgtcacggcgtggttcgtcggcgggctcacggcgttccactcctacctcgtgtgcaccaaccagaccacgtacgagaacttccggtaccggtacgagcgcaaggccaaccccttcaaccgcggcgccggccacaacatcgctgagatcttcttctcgccgatcccgccgtccaggaacgacttccgggccaaggtctcgcccgccgacccggacgccgccgcgctctactacctcggcccgctgtcgtccgagtcccgcatcagcttctacaccagggccagcctcagcttcgacatggccaaggccagcttcgacctcaactactccgccaagcgcaccagcgtcgcgtcctccgacttcagcgacatctacggcggcggccacggggcgctcgaccgagtctctactgctcatcagcagcctcggcactccatcttcggcgggcctggcagggagagcaagaaggcggaggacgaagcggacgccgtgacggcggagctcggggccaccatgcacatgcgctacggcgccgccgcaggacggacgcgcgggagggagttcgaggcggtgtgatcgagcgcgcgcatgggaacgagggggtcgatcgatcgagaagaagcaaattaaatgcccttctcagctcgattcgtgattcgtgaatgtgatttgcgcgtgtgctgtaggtacgtacgtgtaagtagcctcagtttcgtcctcctcatcctccttttatatgtttggaaacaggatgcctcatatcatagcattctacttcctgcatggtacactgtagttcaaggcttcatgtatatatagttgtattatacatacatgtaacatgtatataggctgcctacgcacataca

SEQ ID NO: 120458 - DNA, 692 bp, Zea Mays
ctcacgttcattccgcgggcgcagggttctctctcgtggcgatcgctgaccgtagcggccaccctccgccaggtggccaggttttcgtgtggccctccgccatgtcttcgcaggaccctccgccggcgacgagcacccaaaagaagcaatcggagagtttggtaaacctactggcagaggcaagcaggttctaccgcaaagcatataatgaactgttctcaggtttaattactgagtgggagcctgaatcatctactaatactcctgactatatgctttttgggtggcatctcttcttaacgcttcgttcgagatcaccagaattgttcaaggacctggtgtcctgcatccatggattagttgctgtattggccatactattggttcacgtgccagctaaattcaggaccttcacgattgaaggctcttctcacttaatcaaacaaactgagaaaggcgtggatcttattgcttctttatgtcataattatcatacctctgaagaatgtttgaaagaaatgatggacaagtctcacaaggcaatagaagaagttttcagtatgaaagcactaagtgcttcagagtgcaaaacagagaatttggataagatagacacaggcatggaacccttcctcgcatgtttgtgcatgcaaacctagttatggttatgctgcatactttaattagctgaa

SEQ ID NO: 120459 - DNA, 4268 bp, Zea Mays
atgtcttcgcaggaccctccgccggcgacgagcacccaaaagaagcaatcggagagtttggtaaacctactggcagaggcaagcaggttctaccgcaaagcatataatgaactgttctcaggtttaattactgagtgggagcctgaatcatctactaatactcctgactatatgctttttgggtggcatctcttcttaacgcttcgttcgagatcaccagaattgttcaaggacctggtgtcctgcatccatggattagttgctgtattggccatactattggttcacgtgccagctaaattcaggaccttcacgattgaaggctcttctcacttaatcaaacaaactgagaaaggcgtggatcttattgcttctttatgtcataattatcatacctctgaagaatgtttgaaagaaatgatggacaagtctcacaaggcaatagaagaagttttcagtatgaaagcactaagtgcttcagagtgcaaaacagagaatttggataagatagacacagatcgcctgatgtatttcaaaggtctcattgatatggagtgtttccagtcaaatctggaaaaaatggagaaactatgtaattctaataactgtgaagcggagcttgattttaaattaattttgaccaataatgattatattccctgtgccgagaatttgtcgagggattccactaatttaggatgttcaaagtgtgcctttgaaacattggcatctcccacaaagacaataaagaacatgttgactgttcctagttcccctttgtcacccaccaacggtggttcagtcaagattgtgcaaatgacaccaataacttctgccatgacgacagctaagtggcttcgtgaggtgatatcttcattgccagagaagccttcatctaagcttcagcagttgatgtcatcatgcgatagagatttgacaaatgccgtcacagaaagggtcagcatagttctggaagcaatttttccaaccaagtcttctgctgatcggggtggctcattaggcctcaattgtgcaaatgcctttgatactctatgggcagatgccagaaaaatggaggcttccaagttgtactatagggtattagaggcaatctgcagagctgagttacaaaacagcaatgtaaacaatctaactccattgctgtcaaatgagcgttttcaccgatgtttgattgcatgttcagcggagctagtattggcgacacataagacggtcatcatgatgtttcctgctgttcttgagagtactggtctaacctcatttgatttgagcaaaataattgagaactttgtgagacatgaagagaccctcccaagagaattgaaaagacacctaaattccttagaagaacaaattttggaaagcatggcatgggagaaaggttcatcattgtataactcactgattgttgccaggccatctgttgcttcagaaattaatcgctttggtcttctggctgaatcaatgccatctcttgatgacttagtggcaaggcagaatattcatattgagggcttgcctgctacaccatctaaaaaacgtgctgctggtcgagacgacaatgctgatcctcgatcaccaaagagaccatgcaatgaatctaggagcacagtagtagaacacaatttgcagacacctccacccaagcaatgccacatggtgttgactagtttgaaagcaaaatgccatccactccagtccacatttgcaagtccaactgtcagtaatcctgttggtgggaacgaaaaatgtgctgacgtgacaattcagatattcttttccaaaattctgaagttagctgctattagaataagaaacttgtgtgaaaggattcaatatatggaacagacagagcgtgtctataatgtcttcaagcagattcttgatcaacagacaacattattttttaatagacacatcgatcaacttattctttgctgtctttatggtgttgcaaaggtttgccaattagaactctcattcagggagatactcaacaattacaaaaaagaagcacaatgcaaaccagaagtttttttaagcatctatattggaagtaggaatcataatggggtattaatatcacgccatgttgatatcattactttttacaatgaggtctttgttccagcagccaagcctttcctggtgtcattaatatcatctggtactcgtccagaagacaagaagaatgctagtggccaagttcctggatcaccgaagctatctcctttcccaaatttaccagatatgtccccaaagaaagtttcagcttctcataatgtatatgtgtctcctttgcggcaaaccaagatggatttactgctgtcaccaagttccaggagtttttatgcatgcattggtgaaggcacccatgcttatcagagcccatctaaagatttggctgctataaatagccgcctaaattataatggtcggagagtaaacagtcgattaaactttgacatggtgagcgactcagtggtagctggtagtctaggccagccaaatggtggttctacttccttggatcctgcagctgcatttagccccctttcaaagagaaagccagatacttgatcaaatataaatggcgatctctctcgtatatagctcacagctccatagcagtctattcttctgaataagtgggttgactggagtgatttaactgtacatgtatgtgttagtgagaaccagcagtttataggcagcaaactgttttaaattagctttgaggttttatcaccatttccctgctgattgaacatattttagattgtaacatctgctttgtagaatgctaatgaatctttagttttcagtgggttgacattaaaaatccttatcctagttggctggttgttgggagacattcatcaaggttatatttggtcgtcaaatagtactgtacttgattcatatctttcatatttttcactagcgttggcaaccgtaaattgctttcctgactaggaacatattcttcacaagtatggcaactctaaactatttgaccttttatattctcatttttaagtactttctctatttctgctacttttgtactgtgtatttccagcttctccaccagactgattgttagagtgtatgctcctatattatccatgtatgtgtaaaatgggctgctagcccattagggttagggttcccctgggtctatatatgtaaccaccctctatgcaatagaagttgaatatcagtttctatcactaatgattccatattcagtgggctgcaagtgatttgacatacgtgccttatccttcaggtatgtctcatgttgactttgcttttgtaatggtactgttggcttcattgctggaatgctggttataatcaacctttactgctctatattgttctttttttggtttgcacaaccagggtggttggttttctgaatcaatcaatccatttcctcggacacaagataatttttgtatgttacacttcccaaaattgcaattaattcagaagtctgcctactttcattcagttagttctcagcaacactgaaaggatatgaatcagtcaacccgatagatgtttatctggttattccaaacaatctgacatcacatctgtttctgcaggcgagataaggaaaatctgaaatgctatcaccatttaaaacattggctcctggaagttcaggttaggtgttgctgtagaatgagatggttaccatctttacaagctcaggctatatgatttcagcagcactgtaacctggggtgcaaatgttaaggccctgcaagcactttccaggccacaccaattctgcttggttcttgaagatacattcttcctatggtgccccctatataaaagccatttctggttgttatgtttatccttgacatgtcaacagattagtgttgggttgcagtcatgcggtccttaagtctcggagaaggcgagaagtcattgctgctagcattgtgatcgtcggccacgaaagtaatcaaaaagtgagagctacttgttcctagcaaatggagaagggcgatatataggtttatgatcaaattcagtgtatgcaagcagcatattttgtttagagttagcttttgaggttcatcatttcatttcacagctgattctctatgttgtaactccttagtcgtgtagaaattagaatgctatctgcttaatttttagtgaataatttgctagtatattttttaatgtaattgcagtagctctgcctcttcattaaggaa

SEQ ID NO: 120460 - DNA, 3291 bp, Zea Mays
atgtcttcgcaggaccctccgccggcgacgagcacccaaaagaagcaatcggagagtttggtaaacctactggcagaggcaagcaggttctaccgcaaagcatataatgaactgttctcaggtttaattactgagtgggagcctgaatcatctactaatactcctgactatatgctttttgggtggcatctcttcttaacgcttcgttcgagatcaccagaattgttcaaggacctggtgtcctgcatccatggattagttgctgtattggccatactattggttcacgtgccagctaaattcaggaccttcacgattgaaggctcttctcacttaatcaaacaaactgagaaaggcgtggatcttattgcttctttatgtcataattatcatacctctgaagaatgtttgaaagaaatgatggacaagtctcacaaggcaatagaagaagttttcagtatgaaagcactaagtgcttcagagtgcaaaacagagaatttggataagatagacacagatcgcctgatgtatttcaaaggtctcattgatatggagtgtttccagtcaaatctggaaaaaatggagaaactatgtaattctaataactgtgaagcggagcttgattttaaattaattttgaccaataatgattatattccctgtgccgagaatttgtcgagggattccactaatttaggatgttcaaagtgtgcctttgaaacattggcatctcccacaaagacaataaagaacatgttgactgttcctagttcccctttgtcacccaccaacggtggttcagtcaagattgtgcaaatgacaccaataacttctgccatgacgacagctaagtggcttcgtgaggtgatatcttcattgccagagaagccttcatctaagcttcagcagttgatgtcatcatgcgatagagatttgacaaatgccgtcacagaaagggtcagcatagttctggaagcaatttttccaaccaagtcttctgctgatcggggtggctcattaggcctcaattgtgcaaatgcctttgatactctatgggcagatgccagaaaaatggaggcttccaagttgtactatagggtattagaggcaatctgcagagctgagttacaaaacagcaatgtaaacaatctaactccattgctgtcaaatgagcgttttcaccgatgtttgattgcatgttcagcggagctagtattggcgacacataagacggtcatcatgatgtttcctgctgttcttgagagtactggtctaacctcatttgatttgagcaaaataattgagaactttgtgagacatgaagagaccctcccaagagaattgaaaagacacctaaattccttagaagaacaaattttggaaagcatggcatgggagaaaggttcatcattgtataactcactgattgttgccaggccatctgttgcttcagaaattaatcgctttggtcttctggctgaatcaatgccatctcttgatgacttagtggcaaggcagaatattcatattgagggcttgcctgctacaccatctaaaaaacgtgctgctggtcgagacgacaatgctgatcctcgatcaccaaagagaccatgcaatgaatctaggagcacagtagtagaacacaatttgcagacacctccacccaagcaatgccacatggtgttgactagtttgaaagcaaaatgccatccactccagtccacatttgcaagtccaactgtcagtaatcctgttggtgggaacgaaaaatgtgctgacgtgacaattcagatattcttttccaaaattctgaagttagctgctattagaataagaaacttgtgtgaaaggattcaatatatggaacagacagagcgtgtctataatgtcttcaagcagattcttgatcaacagacaacattattttttaatagacacatcgatcaacttattctttgctgtctttatggtgttgcaaaggtttgccaattagaactctcattcagggagatactcaacaattacaaaaaagaagcacaatgcaaaccagaagtttttttaagcatctatattggaagtaggaatcataatggggtattaatatcacgccatgttgatatcattactttttacaatgaggtctttgttccagcagccaagcctttcctggtgtcattaatatcatctggtactcgtccagaagacaagaagaatgctagtggccaagttcctggatcaccgaagctatctcctttcccaaatttaccagatatgtccccaaagaaagtttcagcttctcataatgtatatgtgtctcctttgcggcaaaccaagatggatttactgctgtcaccaagttccaggagtttttatgcatgcattggtgaaggcacccatgcttatcagagcccatctaaagatttggctgctataaatagccgcctaaattataatggtcggagagtaaacagtcgattaaactttgacatggtatgtctcatgttgactttgcttttgtaatggtactgttggcttcattgctggaatgctggttataatcaacctttactgctctatattgttctttttttggtttgcacaaccagggtggttggttttctgaatcaatcaatccatttcctcggacacaagataatttttgcgagataaggaaaatctgaaatgctatcaccatttaaaacattggctcctggaagttcaggttaggtgttgctgtagaatgagatggttaccatctttacaagctcaggctatatgatttcagcagcactgtaacctggggtgcaaatgttaaggccctgcaagcactttccaggccacaccaattctgcttggttcttgaagatacattcttcctatggtgccccctatataaaagccatttctggttgttatgtttatccttgacatgtcaacagattagtgttgggttgcagtcatgcggtccttaagtctcggagaaggcgagaagtcattgctgctagcattgtgatcgtcggccacgaaagtaatcaaaaagtgagagctacttgttcctagcaaatggagaagggcgatatataggtttatgatcaaattcagtgtatgcaagcagcatattttgtttagagttagcttttgaggttcatcatttcatttcacagctgattctctatgttgtaactccttagtcgtgtagaaattagaatgctatctgcttaatttttagtgaataatttgctagtatattttttaatgtaattgcagtagctctgcctcttcattaaggaa

SEQ ID NO: 120461 - DNA, 183 bp, Zea Mays
cttttcctgttggcacatttgctgcacgaacaagggactagactatctcctttagcagcttcgccaaatgcgttccacgaaagcatcggtcttcctaatccattcaggggtgacatcattacgtcgaacgcggcccgtgtacatccactcacggtcctccatcctctaacatttataaccgag

SEQ ID NO: 120462 - DNA, 432 bp, Zea Mays
atgtcgagccatcgaatgagtaccataggcagcaaatcagggacccctaaccctcgcctcccccacttccaaggtttcgtagagaaggaagggaagggaaaggaagcgaagaggcagtcacacatgttcgtgccggagaaggacacgacgaagacatggacatctagaggcgatataggtagtataccgctagatacatacagggagagcacgcaagcggagaaagaagcccagctagagcagctccaaaccgagaggcacccgcaccaggcgtcagtccgaaatgggcgagagaatacgagtgcttccagccctggacccaccgaggcgacacaacaccaccaccaactccgtagcatatgccgactggtgtcgcgttatggaccttggttgtccaatatctcagatctggactcttcgtcgccaagataa

SEQ ID NO: 120463 - DNA, 1878 bp, Zea Mays
cacaccacagctcccacacacagcaggcagcagctcgatcgctagctcctccgaaccggaaagccaagcccgctttggcgatcgtgcttgcttgcttggttccttcaattcctgccggagccagcgagagctagctgctgctgtcgcgtggtagacgtcgtcttgccagcgagagcctagctcgatcggtctctctggtacaacgtagggagaaagatcgagggggagaggacgacgacgatggccggcgcgaccgtgaccgtggaggaggtgaggaaggcccagcgcgccaccggccccgccaccgtgctggcgatcggcaccgccacgcccgccaactgcgtgtaccaggccgactacccggactactacttccggatcaccaagagcgagcacctcaccgacctcaaggagaaattcaagaggatgtgcgacaagtcgatgatccggaagcgttacatgcacctgacggaggagttcctggcggagaacccgagcatgtgcgcgtacatggcgccgtcgctggacgcgcggcaggacgtggtggtggtggaggtgccgaagctggggaaggcggcggcgcagaaggcgatcaaggagtgggggcagccaaagtcgcggatcacgcacctggtgttctgcaccacgtccggggtggacatgccgggcgccgactaccagctgaccaaggcgctgggcctgcgcccctccgtgaaccgcctcatgatgtaccagcaggggtgcttcgcgggcggcacggtgctgcgcgtggccaaggacctcgcggagaacaaccgcggcgcgcgggtgctggtggtgtgctccgagatcacggccgtcacgttccgcggcccctccgagtcgcacctcgactcgctcgtgggccaggcgctgttcggcgacggcgcggcggccgtggtcgtgggcgccgacccggacgaccgcgtcgagcgcccgctcttccagctcgtctccgccgcccagaccatcctgcccgactcggagggcgccatcgacggccacctccgcgaggtggggctcaccttccacctgctcaaggacgtgcctggcctcatctccaagaacatcggccgcgcgctggacgacgcgttcaagccgctcggcatctccgactggaactccatcttctgggtggcgcaccccggcgggcccgccatcctcgaccaggtggaggccaaggtcgggctggacaaggccaggatgcgcgccacccgccacgtcctctccgagtacggcaacatgtccagcgcctgcgtcctcttcatcctcgacgagatgcgcaagcgctccgccgaggacggacaggccaccacgggcgagggcctcgactggggcgtcctcttcggcttcggcccgggactcaccgtcgagaccgtcgtgctccacagcgtccccatcaccaccggagcggccaccgcctgattcatcgattcatcaacgatcaaattcctcccctctccgatccaattcgtcgtcgtctcgttcgtcattattttacgtcgtccgtccgcaaataatgtgctctctgctataattgtcgtgtgtagtagtaagtagctgttactatttttccatgtactgtcagtcgcacaatcatcatatataattaatatctctatatatgcatttcatgcaagaccagggtagagctagcttgaggagaagacccttatcgttgtcactttagcatgcatggggtggtgaggtattgggtatacctgtgtaagacaagcttggctggtttaattatatattttttttaaaaaaaaatctgtttgatacaaaaataacacctgtaatgtgcatggtgacggcaaattgaccgccattttcagtgcacctaaagctgtattggat

SEQ ID NO: 120464 - DNA, 2217 bp, Zea Mays
acgtacgcacgcacgcacgcattctagctcggccgataccgtacagacatgaaaaaaaagaaggtgcgtggtcaacgccgcctggccgtgcccgtaccaacaactaacacaaacgttttcattttcttggggtgaaaaaaaaagagagagaagtgagaacgagacgtaaagcaggcgtctgtgcacgggagtgaagagataatacagcttttgtgcccctgtcacgggctgttaggtgtgcaacacaaatggcacgtcgaggcgtcttttgccgccggcctctgctagttcttccatcactgttgcacactgaccactcaagaaacccgctctaattaagctgttgacctcttcttcttcttctagcgcgcgctagctgatgagtagctagcgcaccagagtccagaggtggtagcagtagaaacaggattcttttcgtggacgtcgatgtgccatgctagctgccatcgtccccactgcacggggcagacagggaccccgtgccgtcccatcgactcgactacctcaggcctgcagctagcgcaactcgtatagagagatggaatagtactccatcagcacggcattcccacaccacttggattttgtcgacctgaccggcaagcaactagccccttcctgttccatcaatcgaattgacgtagcaactagctgccttgacgtccgtgctcgggcatggccagtacacatacggccggccggtacggtttgttttaattgggccggtttgattttgacgtgcatgcaggcgacaagtcgatgatccggaagcgttacatgcacctgacggaggagttcctggcggagaacccgagcatgtgcgcgtacatggcgccgtcgctggacgcgcggcaggacgtggtggtggtggaggtgccgaagctggggaaggcggcggcgcagaaggcgatcaaggagtgggggcagccaaagtcgcggatcacgcacctggtgttctgcaccacgtccggggtggacatgccgggcgccgactaccagctgaccaaggcgctgggcctgcgcccctccgtgaaccgcctcatgatgtaccagcaggggtgcttcgcgggcggcacggtgctgcgcgtggccaaggacctcgcggagaacaaccgcggcgcgcgggtgctggtggtgtgctccgagatcacggccgtcacgttccgcggcccctccgagtcgcacctcgactcgctcgtgggccaggcgctgttcggcgacggcgcggcggccgtggtcgtgggcgccgacccggacgaccgcgtcgagcgcccgctcttccagctcgtctccgccgcccagaccatcctgcccgactcggagggcgccatcgacggccacctccgcgaggtggggctcaccttccacctgctcaaggacgtgcctggcctcatctccaagaacatcggccgcgcgctggacgacgcgttcaagccgctcggcatctccgactggaactccatcttctgggtggcgcaccccggcgggcccgccatcctcgaccaggtggaggccaaggtcgggctggacaaggccaggatgcgcgccacccgccacgtcctctccgagtacggcaacatgtccagcgcctgcgtcctcttcatcctcgacgagatgcgcaagcgctccgccgaggacggacaggccaccacgggcgagggcctcgactggggcgtcctcttcggcttcggcccgggactcaccgtcgagaccgtcgtgctccacagcgtccccatcaccaccggagcggccaccgcctgattcatcgattcatcaacgatcaaattcctcccctctccgatccaattcgtcgtcgtctcgttcgtcattattttacgtcgtccgtccgcaaataatgtgctctctgctataattgtcgtgtgtagtagtaagtagctgttactatttttccatgtactgtcagtcgcacaatcatcatatataattaatatctctatatatgcatttcatgcaagaccagggtagagctagcttgaggagaagacccttatcgttgtcactttagcatgcatggggtggtgaggtattgggtatacctgtgtaagacaagcttggctggtttaattatatattttttttaaaaaaaaatctgtttgatacaaaaataacacctgtaatgtgcatggtgacggcaaattgaccgccattttcagtgcacctaaagctgtattggat

SEQ ID NO: 120465 - DNA, 2313 bp, Zea Mays
ggtcaaacagtccgagacaggagcagacgtctggctataatggtcgaacggtccggctataatggtcgaacagttcgcaaacggtcagaagcagcaacctcagaccatcggaccacaacgttccaaaacaagtgttaggaaacaaaacactactaagacgtctggacgactcagtagagtcggccctacttttgatcagttgtttgccaaatatatgaagaaggtcgttccacacaaccggccaataaaacaaacaaagtcaaaagggcgatctgtgcgaaagcaaaagccgactaaaccgactcaaacggtagcacaaccaagaccgccttgtcatcctcctccagggatagcgtggtgcttctcggtctatccatcgtcgatgtgttgtcctactcatgcgtggggtggtaagacgatgaatccgtattactggtccaattcatttgcttatttgggctggggggcaccacaagtttttgcctattgaaaggatgatcaggcaaacatggttgaagaggatgcaatctgaaacgacctctgtgcattaaagttccatcaagtatttatattatccgatcgcaagagccgatgacttgcatcaagcagagtccttacttcgggaacaaagtagctcatgaggtcaattgtttctgaagttttcgctggtgctttggttcgccaagctccaccaaaaggcaggggcatatgttgaccaccaaaatgagcggacggttcgacccttgggcccggacagtccgcgtgccccgagattagattaattcaggtgtttatccttatctcgtgcgtggttatccatctaatcatgtgagagttgttggctatctcttaggaataggtccagacctccccctctataaatataaaggggtacagtcgattgagaaccctagaacacattccaatcgaaccaattactttatttacctttcctgccttaggagtagatgtagtgtagttctagttgtagtcttccgcatatccacctccacccctattcaactctacgttgtctagatccgtcctgaggtggcctgccgaccccaggacaaccctatgatctttacccctcctgaggggcaagatctacttcgtctacttcaatcaagatctcttcctcgaattgatctcttaatttctaggcgactctacgtcatctggagacgccccggctgacctgctgacccagagcaccctaaggtatctcccccaggggacgagatctaggtcatacaaggagaagaagacgaccctgcgccatcgcggactgtccggactgcgcgcagtgaaggcgccgcttctaccgccaggttgcggactgtccgacctagagccgcggaccgtaagcacctcccgcggcgagcactgccaggcgacccgtcacaggccgccgccactgttcacctcgtggagccgaacccaaggtattgctcatcacgaggtcctagggttcgttgctgtttggtcccaaatatgtggtgaccatcatagaggtgttgccccacatttaggataaccactttatttgatcctacatcatctaaaggtgccaagtaccaccaggcggttcattatagtgtttggtgaccaaaaagacaccaacagatacatgagcagaatagtcatattggtgctgcaactatatatagtccgagacattgattttgtccctcaacatttaaaatgggcacgttagtcctaaaaaatttcatttaggttcaattttatcgtacaacaatcaaagtgatcatgaatccttatcctgtgtactttggctcaaattcttattctaactatcaaactgtatttttctactacttatgaaggctgcaagaatagcctgcctctaacttgttctgccacctgccatccgtgaatctggaccgtttgcctcaatcatgcgcgatccaaccgtcctccgccccgtccccgcaccctccccctccccttgcgatacggtagccgtcgtcccagcccgcggccttcgccaaccacccccaccctcgcgcccacccatcgccgcatgggcaccccttgaccccggcgagacaccgccccactcacccataggcggcagcatccacgtggccgatccacctggcgacgcgccctcctccgcccccgacatggtacgagacccagggttgatcctccgcaccgttgaccccaaccgcttcaccctttgtggcgagcagcatctcctcccccagtcaccgacaaaaagcgagtgggtgagcagctcctcctgcaaggcgaatatgtgggcgcagtccaccgccaaatctacgacgt

SEQ ID NO: 120466 - DNA, 1332 bp, Zea Mays
ttatacaagcgtcgactgcatgcgtaaatgacaagcaaagcagaggtgctttagatcaggaaaaaagccatggccacaaccacaagaagctgtgccaattcggccaccgtactgcatggcatccgtcaccgactgcgagccgatggccccgcggctatccttggcatcggcacggcgaacccgaagaactgcgtaccacaagaccagttcgccgactggtacttggacgtaaccaagagcgagcacctcgcggagctcaaggccaagacgaagaagatttgtgacaggtcaggcatcacgaaacgctacttctaccacaccgaggagatcatcggcgaccacccggagctgatcgtccgcgacctgccgtcgctcacgacgaggctcagcgtcatcgccgacgccgcgcccaagctcgccgcggaggcagcgtcaagggctatcgcagactggggccgcccggcggccgacatcacgcacctcgtcgtggccaccaacgccggcgccaacgagcctggcgtcgaccagctcctcgcggcgctgctaggcctccgcccgaccgtgcgccgcacgctgctctacctccacggctgctccgctggcctcgtggcgctccgcgtcgccaaggacgtcgccgagaacaaccgcggcgcgcgcgtgctcgtggcctgcgcgcaggccaagatcctgatgttcggcgccccggacgacgacgcccgcctggacaaggttgtccccatgacgctgttcggcgacggcgccggcgcaatcatcgtcggcgcggacccgacaagccgccccatggccatggagatagagcggcccatcttccacatggtgtccgcctcgcagacgacgttgcccggcacagacgaggcggtggtgctaagtctcagagagaacggcctcgtcgacggccgcctgtccgccgaggtgccgaggcttgtcggcggcagcttagagcagtgtctagctggctcgctggcgccgctaggcctcgtgaacgaaagcgacggtggcggtcgctggaacggcttcttctgggcggtgcacccaggcggccgtgcgatcttggacagctacgaggctacgctcggtctgcagcccgggaagcttgcggccagccggcacgtcctgagtgagtacggcaacatgatgggctccacgatcatatttgttctcgacgagatacgccatcgccgccgccgtgaggaagacaccaaggaaaaggactgccagtttggagtcatgtcgggggtcggacccggacttacagtcgagacaattgtgctgcatgctgccaccggtagccaggaccaggacgaaaactag

SEQ ID NO: 120467 - DNA, 1864 bp, Zea Mays
ctcttctttccctctgtataccgcgagcgcccgcagctagctgctagccgcgcgcccgccgctacctgcccgcctccagcgcgcccgccgcgcgtgccccgccgccacccctcgcggtgatctgtgtgggcgacgtccacagctacatcacgaagctggagagcctctggtccaacctctaggccgcactccccgccgacgccttggccaccgcgctggtcatcttcctcggcgactacaacgaccgcggcccgcacacccgcagggtcctcaacttcctcctcgcgctcccgacgcgctacccagcgcagcgccatgtcttcctctgcggcaaccacgacctcgccttcacggcgttcgttggggcgccgccgccgccgcccaacggctccccgttcttcggccacctgcgcagcgccatctctctttcctccctatctcgctgctccctcccctgccgccctgcttatttacgcccatttcttaagagaggatttgatggcctgtcagaataaaagagctcgaggaaattgcggcggccggaaatcctggtgatggtgccacacaaacacgagaatctgcttcgtcctcggcggaattgccgtcggggtcgggcgattcttcggaggacaagtgcctctgtttcgttgagctggctaggtccatggggattagtcaggacactcatgagtcgatggcaacagatgcagccaattacctttgccaccagcttcagcatcttcttgggcctatctcttctgcgacgagccaaagtggcccctgggaggagaggtcggtgatggttaggttgactcagaagctgcagaaatctaagagaaataagtggtggcggcagaggagaaggaagcatgttgcagagctttttcagaaggagcgtgcggattatgatagagttgaccaggaagctgatgaatggagggctaagcaaatagccaaggacattgcaaagcggagggtggaaagcatgcagcagattgctagaaagaaaacaaatgaggaaagaaagcgcctagaatctgagactggaaatgctttgggtgattcagatactgagccaaggaacacaaagtacatgtcactgggagacgaccgcagcctgtgcatggaatgcctggggtctgcggtcatggacaccggtgaatgccagcccctgtaccattctatcagggactactacgaggggatgaaaatgaagctggaccagcagatacccatgctcttggttgagcagcaagcgcttaacgaagccatggaaggagagagtagaggcccacaccacatgcctgagacaaggggcctgtgtctgtcggaggagcagactgtgagcagtatacttaggaggcccaggattggtggaaaccggttactggacatgagaactcagccacaaaaactgactaggagatgtgaattgagggtgattcctctggtaagtgtcccagtgggtcaaggctatgatttgaccgaaacttgtgctggagcagctttcactgaatgggatgacaccacttgctgctatgtgaagcttgtttcatgggaagaaggtggttacaagatttctgattatccgatgccgagaggagaggtagtggttggcggacacagtacaacaaaaggctataggactaactgtattgattccggctcccatcaagtgactccttcccctcacgttgactttgcggacagatgtctcaattctagtggtagagctacgaacaacaatctgatgtcctgatcgagagttgaacttgtgtatttgaacttgtgaactatggatgtgaacttgtgtgaatttgtgaacttatgtatttggaattatgtgaatttgcgaacttatata

SEQ ID NO: 120468 - DNA, 111 bp, Zea Mays
atgtcatcattaaccaccaaaaccaaactagggcttaaatgctttcaccgctcaccaaactcgactatatcaaactacccattcatatccctttatagtacaaccaaataa

SEQ ID NO: 120469 - DNA, 928 bp, Zea Mays
agatgtatcgagttttgcgccttcgatacgtcgtttacgtattcagtttttcacacaacggcggcgatgtcgtcggcctcctcctccgccgccgccgccaacgccggtgaaggaagcgggggtgcggaggagggcgtggagatcacttacgtgagctatggcggggagcagcatctgccgctggtgatgtcgctggtggacgaggagctcagcgagccctattccatcttcacctaccgctacttcgtctacctctggccgcagctcaccttcctggcgttcgatgccagggatggcaagtgcgtggggacagtcgtgtgcaagatgggggagcataggggtgcattcaggggctacatcgccatgctcgtcgtcctcaagccctaccgagggaggggaatagcaactgagctagttactagatcaattcgggcaatgatggaatctggctgtgaggaggtgacacttgaagcagaagttactaataagggtgcccttgctctgtatggtcgccttgggtttatccgagcaaagagattgtacagatactatctaaatggtgtagacgcatttcggctgaaactactgtttccgcgccctgataatgacccacaaatatttggtataattgactagattctccctactcgtgacagcatcctaatcagtaggttgaattgagttggagatctgtaatccgatcatttttcgctctgttcatgcttcctcagctatcatgtggctgtaatattgctgtacttacatataaatgttcgaggtgttttattttcttcctgttctttgataagggtgttgtaagacctttttcttttgtgagaaaaacaaaacgcatgccgcagttgcaagaggactgtgcagttcttttgctcaataaacaaaacgcatgccgcagttgctgtagtgttta

SEQ ID NO: 120470 - DNA, 940 bp, Zea Mays
atcgagttttgcgccttcgatacgtcgtttacgtattcagtttttcacacaacggcggcgatgtcgtcggcctcctcctccgccgccgccgccaacgccggtgaaggaagcgggggtgcggaggagggcgtggagatcacttacgtgagctatggcggggagcagcatctgccgctggtgatgtcgctggtggacgaggagctcagcgagccctattccatcttcacctaccgctacttcgtctacctctggccgcagctcaccttcctggcgttcgatgccagggatggcaagtgcgtggggacagtcgtgtgcaagatgggggagcataggggtgcattcaggggctacatcgccatgctcgtcgtcctcaagccctaccgagggaggggaatagcaactgagctagttactagatcaattcgggcaatgatggaatctggctgtgaggagcttgtatcttctgatcaggtgacacttgaagcagaagttactaataagggtgcccttgctctgtatggtcgccttgggtttatccgagcaaagagattgtacagatactatctaaatggtgtagacgcatttcggctgaaactactgtttccgcgccctgataatgacccacaaatatttggtataattgactagattctccctactcgtgacagcatcctaatcagtaggttgaattgagttggagatctgtaatccgatcatttttcgctctgttcatgcttcctcagctatcatgtggctgtaatattgctgtacttacatataaatgttcgaggtgttttattttcttcctgttctttgataagggtgttgtaagacctttttcttttgtgagaaaaacaaaacgcatgccgcagttgcaagaggactgtgcagttcttttgctcaataaacaaaacgcatgccgcagttgctgtagtgttta

SEQ ID NO: 120471 - DNA, 866 bp, Zea Mays
atcgagttttgcgccttcgatacgtcgtttacgtattcagtttttcacacaacggcggcgatgtcgtcggcctcctcctccgccgccgccgccaacgccggtgaaggaagcgggggtgcggaggagggcgtggagatcacttacgtgagctatggcggggagcagcatctgccgctggtgatgtcgctggtggacgaggagctcagcgagccctattccatcttcacctaccgctacttcgtctacctctggccgcagctcaccttcctggcgttcgatgccagggatggcaagtgcgtggggacagtcgtgtgcaagatgggggagcataggggtgcattcaggggctacatcgccatgctcgtcgtcctcaagccctaccgagggaggggaataggtgacacttgaagcagaagttactaataagggtgcccttgctctgtatggtcgccttgggtttatccgagcaaagagattgtacagatactatctaaatggtgtagacgcatttcggctgaaactactgtttccgcgccctgataatgacccacaaatatttggtataattgactagattctccctactcgtgacagcatcctaatcagtaggttgaattgagttggagatctgtaatccgatcatttttcgctctgttcatgcttcctcagctatcatgtggctgtaatattgctgtacttacatataaatgttcgaggtgttttattttcttcctgttctttgataagggtgttgtaagacctttttcttttgtgagaaaaacaaaacgcatgccgcagttgcaagaggactgtgcagttcttttgctcaataaacaaaacgcatgccgcagttgctgtagtgttta

SEQ ID NO: 120472 - DNA, 193 bp, Zea Mays
ggccttaattgtgaatattggtctccctcaaaaatacttttgataaatttcaaaagtttttgtgtatggtcacaacctaattctgtacaggccgttcctcttaatattcggtaaggtaagggcctgatcgttttgctatcaatccatgtcggttgggttggattaaatgagtttcaattaaaaaaaatcaaaa

SEQ ID NO: 120473 - DNA, 1116 bp, Zea Mays
gcggcccttatccccagcccaaaatggacgccaccaccgccgtggctgcgaggcgcctcctcctcctcccgctccgcgcccagccgccagcaccgcggggcgcagcgccggccacggcgaacccctggtgtcgatccgttccgcggagacgacgagtccgtgccgccccggcgcgcgcgtcgctggaccgcgccgcggtcctcctcgacaccgcggccgcggtggccaacggcgggacaggttactcgcaggcgagctactacacgtctctgggactcttcgttctctccgttccggggctgtggtccctcatcaagcgctccgtcaagtccaagattgtgcaaaagacatttgtcaaagacgaagggcagtcgatggcgccaaatcaggtggctggagagatcctgtcgttcttcactcgcaataacttcaccgtctcagaccgcggggaggtcatcacattcgagggcacaatgataccaaacagaggccaggcggcgctgctaaccttctgcacctgcattagcctcgggagtgtcgggcttgttctatcaatcgctgtcccagaaggtggcaacaactggttctggctcatgaccctgagccccttggcgggagcgtactactggacgaaagcgtcaaggaaagaagagatcaaggtcaagatgatcctatccgatgacgggaacgtgtccgagatccttgtgcagggcgatgacgtccaggttgagcagatgaggaaggacctcaagttcagcgagaaggggatggtctatgtgaagggcatctttgagacatgactgggagtttcatactctatctgtgagtgaacaatcgagtggagacgagtctttgctgcaacggaaactgcgtaagcgtaacccaggtgaggaaatgcaaattggacgggcaaatctgtaccttggcttaaaggaaaaaaagaagtgatcttcatacgggatttgattattgtaagtgttgcccgtatgaggatagttaatgtatgaactcaaactaatgactttataaaaagctgatgagaaacacctttttgagcatgaaaatactaaaacctttttaggagagaaagaagtaactggaagtctgaccactgca

SEQ ID NO: 120474 - DNA, 1171 bp, Zea Mays
atggacgccaccaccgccgtggctgcgaggcgcctcctcctcctcccgctccgcgcccagccgccagcaccgcggggcgcagcgccggccacggcgaacccctggtgtcgatccgttccgcggagacgacgagtccgtgccgccccggcgcgcgcgtcgctggaccgcgccgcggtcctcctcgacaccgcggccgcggtggccaacggcgggacaggttactcgcaggcgagctactacacgtctctgggactcttcgttctctccgttccggggctgtggtccctcatcaagcgctccgtcaagtccaagattgtgcaaaagacatttgtcaaagacgaagggcagtcgatggcgccaaatcaggtggctggagagatcctgtcgttcttcactcgcaataacttcaccgtctcagaccgcggggaggtcatcacattcgagggcacaatgataccaaacagaggccaggcggcgctgctaaccttctgcacctgcattagcctcgggagtgtcgggcttgttctatcaatcgctgtcccagaaggtggcaacaactggttctggctcatgaccctgagccccttggcgggagcgtactactggacgaaagcgtcaaggaaagaagagatcaaggtcaagatgatcctatccgatgacgggaacgtgtccgagatccttgtgcagggcgatgacgtccaggttgagcagatgaggaaggacctcaagttcagcgagaaggggatggtctatgtgaagggcatctttgagacatgactgggagtttcatactctatctgtgagtgaacaatcgagtggagacgagtctttgctgcaacggaaactgcgtaagcgtaacccaggagagaaagaagtaactggaagtctgaccactgcacattggagttccaattggacaccagccgatcactcaaggggtctgcggcgagcggacgacgagttcgcggttggcggacggacgctgcaccgtcacaggcaacacaactaagatgggatcggcagtggtggacttccctaggggcgagctgcggcaacgacctccttagggcgtgagcgacgacgtgtttttatgctaccctgtatacatatttatgccaacgtcaatagatgtttacgacatatatttcagtcaatggttacccttacatct

SEQ ID NO: 120475 - DNA, 1383 bp, Zea Mays
aagctcacagcaaaataaaagccaggcggcggcatatggcgctcagcaaggagcaaaaactcacaatttctgagcaacaacacacggcaagcagcgaacagcaggtggcgctggatgccgagctccagctgtggaaccacaccttcggctacgtcaagtccatggcgctcaaggccgcgctcgacctcggcatacccgatgccatccaccagcacggcggctcggctaccatcccacagatagtcaccaggatcacgctccacccgtccaagacaccatgcctgcggcgcctcatgcgcgtgctcaccgtcaccggcgtcttcggcacccaggagccgcacgatgacgggggcggctgtgacgacgagctcgtctacacgctcacgccggcgtcccgtctccttgtcggcccaccggggcagaacgtgagccctttactgaacgtgatgctctgccccatcttcgtgtcgtccttcctcgacctccgcgggtggttccagcacgagatgccggacccgtcccccttcaaggtgacgcacgggcgggacatatgggagctggccgcccacgacgccggcttcagcaggctcttcgacgccggcatggtcgcggacagcggcttcatcatgaacgtcgtggtcagggagtgcggcagcggcaccgtcttccaggggatcagctccctcgtcgacgtcggcggcgggtttggtggcgccacacaggccatcgcgaaagcgttcccgcacctggagtgcagcgtgctagatctcccgaacgtcgtcgccggcgctcctgctgataccgccgtgaagtatgtcgccggtgacatgttcgagagcgtttcgtcggcagacgctgtcttcctcaagtcgattatacatgactggggtgatgccgactgtgtcaagatactgaagaactgcaagaaggccataccagctcaaggaggcaaggtgataatactggatatcgtggttggagcaggatcgtcgtcgtgcgaccggaagaacgtggagacgcaatgcttgtttgatctctacatcatgactatcaacggtgtcgagcgagatgagcgagagtggaagaagatcatctttgaagccgggtttacatcttacaagatcatacctgttctgggcactcgatccataattgaagtctgcccatagaaaccaatataattaaggatggcaacagcctcccatcgcccttgcgagtataattccaaaccagcacttcaatacttgaatccgtgaggttttgaggtcacttacgtgttttactcattgtacgcttttaaacaataactagccatttgtacgtgatttgctacggttgttatatatatcatataaataaatattaagatatttattcaaatat

SEQ ID NO: 120476 - DNA, 1373 bp, Zea Mays
aagctcacagcaaaataaaagccaggtggcggcatatggcgctcagcaaggagcaaaaactcacaatttctgagcaacaacacacgacaagcagcgaacagcaggtggcgctggatgccgagctccagctgtggaaccacaccttcggctacgtcaagtccatggcgctcaaggccgcgctcgacctcggcatacccgatgccatccaccagcacggcggctcggccaccatcccacagatagtcaccaggatcacgctccacccgtccaagacaccatgcctgcggcgcctcatgcgcgtgctcaccctcaccggcgtcttcggcacccaggagctgcacgatgacgggggcggctgtgacgacgagctcgtctacacgctcacgccggcgtcccgtctccttgtcggcccatcggggcagaacgtgagccctttactgaacgtgatgctctgccccatcttcgtgtcgtccttcctcgacctccgcgggtggttccagcacgagatgccggacccgtcccccttcaagatgaagcacgggcgggacatatgggagctggccgcccacgacgccggcttcagcaggctcttcgacgccggcatggtcgcggacagcggcttcatcatgaacgtcgtggtcagggagtgcggcgccgtcttccaggggatcagctccctcgtcgacgtcggcggcgggttcggtggcgccacacaggccattgcgaaagcgttcccgcacctggagtgcagcgtgctagatctcccgaacgtcgtcgccggcgctcctgctgataccgccgtgaagtatgtcgccggtgacatgttcgagagcgtttcgtcggcagacgctgtcttcctcaagtcgattatacatgactggggtgatgccgactgtgtcaagatactgaagaactgcaagaaggccataccagctcaaggaggcaaggtgataatactggatattgtggttggagcaggatcgtcgtgcgaccggaagaacgtggagacgcaatgcttgtttgatctctacatcatgactatcaacggtgtcgagcgagatgagcgagagtggaagaagatcatctttgaagccgggtttacatcttacaagatcatacctgttctggggactcgatccataattgaagtctgcccatagaaaccaatataattaaggatggcaaccgcctccgatcccactcgcggatataattccaaacccgtacttgaatacttgaatccgcgaggttttcaggtcacctacgtgtttttactcattgtacgcatttaaacaattattagccagttgcacgtgctttgctatggttgttatatatcatataaataaatattaagatatttatttaaatat

SEQ ID NO: 120477 - DNA, 177 bp, Zea Mays
tcgtcaatcccatgatcgagaacaccatcagctacatctaggggtagctcgacgagctcaagtgcaaaaatttcttcaggctcaagaagatccagggctacaagaagagggagattgagcgccagatggccgccgccaagctattcgtggaggaacagctcgccgagaatctcgcgc

SEQ ID NO: 120478 - DNA, 567 bp, Zea Mays
gcggcaactcagggagcaccttgcggtgaagtatgttcaggtggtctcagatgtgaaatgtgatgatctaaatggggaggagaagatgcatcaacatgagatgccaaatactgaaaacgatgatggtgtcatggcattgttaccttctattgttgcatgttccctcccatgcttggaggtcctaatcgagggcctacgccactgcagagagctccgggagggaggttgctggtcaacggcagtcaggcggccgcctccatggcatggaagcttgaggggtcatatccgtgagggagagcggaggagatccgccgtgtccattctatagagtccagactccagaccaggatagagcaaggctgaggcgtccagtttcatcaattcatcacgtcagttaccaggcacacgccacatggctgattaccaaggcgagcctttcctgtcctcttctcacctttcttgatgtaatgtccagctcccgaacggaaacaccattgaaaatgtgttcctcccttttaagaaagcgactctcatgagctcaacgttgttactgtagtagactgtgag

SEQ ID NO: 120479 - DNA, 189 bp, Zea Mays
atgaaagtggtggcggccaagatgaaagtggtggcggccgcatcaaaggagaaggtgcaacaagacgaaccgaaagctgctatctcagatgtgaaatgtgacaacccaaaagaggagggcaatgtgcagcaaaccaaatggttagaggatttcacttcctcaatcactttggtcccgctgtttgtttga

SEQ ID NO: 120480 - DNA, 1204 bp, Zea Mays
cctcactctcccgctccactcctaaacccagaacccagcccgtcgcaaccctagccgccgccgccgcgcgccgccggcaccacaccactgccgtcgccacccccatggccgcgccgtcagaggacgcgttgcggcgcgcgctcgcggctcgcaaggccgccgtggacgcgcaagccgaggccgtgcgcgcgctcaaggccggcggcggcgcgtccaaggccgacgtggacgctgcggtcgaggcgctgaaggcacttaaggttgaggccggcgccgccgcgcgcaggttgcagcaggcggtcggggcgggcgcgggtggcgccgcgagggaggagctgcggcaggcggtggtgaacacgctggagcggaagctgttctacataccttccttcaagatctaccgcggtgtcgcggggctctacgactacgggccgcccgggtgccgcgttaaggccaacgtgctttccttctggcgtcagcactttgttttggaagagaacatgttggaggttgactgcccctgtgtgacgcctgaggttgtcttgaaggcatcaggccatgttgagaagtttactgacctcatggttaaagacgagaagacaggcacatgctaccgtgctgaccacttgttgaaagatttttgcaaggagaagcttgagaaagaccttgccttgccccaagagaaggctgatgaatttaagcgtattcttgctattttggatgacctctcagcagaggaacttggtgcaaagattaaggaatacggcattgttgcccctgatacaaagaatccactttctgatccctacccattcaatcttatgttccagacatctattggccccactggtcttagcgtggggtgagaatatctccattctctctgtggttatgttccttttgtgttgattggctaaaaaggttcaattttgtgtggcggaaataggtatatgcgaccagagaccgcacagggtatttttgtaaacttcaaggatctgtactattacaatggccaaaagctcccttttgcagctgctcaaattgggcaagcttttagaaatgaggtttgtgtttttttgccacatttctaaatggctaccccattttactcaattatggcatgattcagtcactgcttgttcagtgcctcgtactttgttcttgaaataataaatgttctacactagctttgtttttgttaata

SEQ ID NO: 120481 - DNA, 2594 bp, Zea Mays
cctcactctcccgctccactcctaaacccagaacccagcccgtcgcaaccctagccgccgccgccgcgcgccgccggcaccacaccactgccgtcgccacccccatggccgcgccgtcagaggacgcgttgcggcgcgcgctcgcggctcgcaaggccgccgtggacgcgcaagccgaggccgtgcgcgcgctcaaggccggcggcggcgcgtccaaggccgacgtggacgctgcggtcgaggcgctgaaggcacttaaggttgaggccggcgccgccgcgcgcaggttgcagcaggcggtcggggcgggcgcgggtggcgccgcgagggaggagctgcggcaggcggtggtgaacacgctggagcggaagctgttctacataccttccttcaagatctaccgcggtgtcgcggggctctacgactacgggccgcccgggtgccgcgttaaggccaacgtgctttccttctggcgtcagcactttgttttggaagagaacatgttggaggttgactgcccctgtgtgacgcctgaggttgtcttgaaggcatcaggccatgttgagaagtttactgacctcatggttaaagacgagaagacaggcacatgctaccgtgctgaccacttgttgaaagatttttgcaaggagaagcttgagaaagaccttgccttgccccaagagaaggctgatgaatttaagcgtattcttgctattttggatgacctctcagcagaggaacttggtgcaaagattaaggaatacggcattgttgcccctgatacaaagaatccactttctgatccctacccattcaatcttatgttccagacatctattggccccactggtcttagcgtggggtatatgcgaccagagaccgcacagggtatttttgtaaacttcaaggatctgtactattacaatggccaaaagctcccttttgcagctgctcaaattgggcaagcttttagaaatgagatctcgccacgacaaggacttctccgagtccgtgaattcacattggcagagattgagcattttgtggacccagaggacaaatcacatccaaaatttgttgatgttgctgatttggagttcctgatgtttccaagagagctgcaactctctggggagtcagccaagctaatgaagcttggggaagcagtttcaaagggaactgttaataatgagacacttggttacttcattggaagggtctatcttttcctgacaagcttgggaattgataagggccggttgcgcttcaggcagcatctacctaatgagatggctcattatgctgctgactgttgggatgctgagatagagtgctcgtatgggtggatagagtgtgtgggtattgctgatagatctgcatatgatttgaaagctcacactgacaaaagcggtgtcccacttgttgctcatgaaaaattctccaagcctagagaggttgagaaacttgtcatagttccctcgaagaaagacctggggctggcttttaagggcaaccaaaagatggtcctggaagcattggaggctatgagtgagaaggaagcatttgagatgaaagctgaactagagaccaagggggagacaaattttaaagtctgcacacttggaaaagacgtggtgattacaaagaagatggtatcaatcagcatggagaagaagctggaacaccagcgagtcttcaccccttcggtcgtcgagccgtcattcggcataggacggatcatctactgcttgtttgagcactcgttttacacaaggcctagcaaatcagaagaggaacagctgaatgtcttccggttccctcctcttgtggcccctatcaagtgcaccgtgttcccccttgttaagaatcaagagtttgacgatgctgccaaagtaatcgccaaggcattaacaactgctggtatctcccacattattgacactactggtacgtgcaatacaatcttaaataccccactccgtataacgtaactatatatatgtaagcataagctcgtggttgttctcttgcagcaatttctattgggaggaggtacgccaggacggatgagatcggtgttccatttgctgtaacagtggattcggcaacgaacgtgacgatccgagagagggacagcaaggagcaggtccgcgtggacatcgacgaggtggcgcctgtggtgaagcagctgacggaaggccaaagcacatggacggatgtttctgcaaagtatcccgcccatgtcggcccccaaagtgagcaggagtgaagaatcgccgccctgatgtctagtctagccatcgaccgagaaggcgtcgggatgagccgtcttcgttctccaattgctgagaagattgtgtggcctaaacataactgcttttggtattgacattatccagaaaggcagtttttttccctcatacatacatgacacttgctatagcagttggatgttatgaagtctgcagatgtcaccgatttttttgtttcttttaaatgcccctttcttgatgtattctcacccatacaaaacataccatttgaggtatttctgaactagctgtccttttgtaaggtcagactgggaattgttc

SEQ ID NO: 120482 - DNA, 2548 bp, Zea Mays
cctcactctcccgctccactcctaaacccagaacccagcccgtcgcaaccctagccgccgccgccgcgcgccgccggcaccacaccactgccgtcgccacccccatggccgcgccgtcagaggacgcgttgcggcgcgcgctcgcggctcgcaaggccgccgtggacgcgcaagccgaggccgtgcgcgcgctcaaggccggcggcggcgcgtccaaggccgacgtggacgctgcggtcgaggcgctgaaggcacttaaggttgaggccggcgccgccgcgcgcaggttgcagcaggcggtcggggcgggcgcgggtggcgccgcgagggaggagctgcggcaggcggtggtgaacacgctggagcggaagctgttctacataccttccttcaagatctaccgcggtgtcgcggggctctacgactacgggccgcccgggtgccgcgttaaggccaacgtgctttccttctggcgtcagcactttgttttggaagagaacatgttggaggttgactgcccctgtgtgacgcctgaggttgtcttgaaggcatcaggccatgttgagaagtttactgacctcatggttaaagacgagaagacaggcacatgctaccgtgctgaccacttgttgaaagatttttgcaaggagaagcttgagaaagaccttgccttgccccaagagaaggctgatgaatttaagcgtattcttgctattttggatgacctctcagcagaggaacttggtgcaaagattaaggaatacggcattgttgcccctgatacaaagaatccactttctgatccctacccattcaatcttatgttccagacatctattggccccactggtcttagcgtggggtatatgcgaccagagaccgcacagggtatttttgtaaacttcaaggatctgtactattacaatggccaaaagctcccttttgcagctgctcaaattgggcaagcttttagaaatgagatctcgccacgacaaggacttctccgagtccgtgaattcacattggcagagattgagcattttgtggacccagaggacaaatcacatccaaaatttgttgatgttgctgatttggagttcctgatgtttccaagagagctgcaactctctggggagtcagccaagctaatgaagcttggggaagcagtttcaaagggaactgttaataatgagacacttggttacttcattggaagggtctatcttttcctgacaagcttgggaattgataagggccggttgcgcttcaggcagcatctacctaatgagatggctcattatgctgctgactgttgggatgctgagatagagtgctcgtatgggtggatagagtgtgtgggtattgctgatagatctgcatatgatttgaaagctcacactgacaaaagcggtgtcccacttgttgctcatgaaaaattctccaagcctagagaggttgagaaacttgtcatagttccctcgaagaaagacctggggctggcttttaagggcaaccaaaagatggtcctggaagcattggaggctatgagtgagaaggaagcatttgagatgaaagctgaactagagaccaagggggagacaaattttaaagtctgcacacttggaaaagacgtggtgattacaaagaagatggtatcaatcagcatggagaagaagctggaacaccagcgagtcttcaccccttcggtcgtcgagccgtcattcggcataggacggatcatctactgcttgtttgagcactcgttttacacaaggcctagcaaatcagaagaggaacagctgaatgtcttccggttccctcctcttgtggcccctatcaagtgcaccgtgttcccccttgttaagaatcaagagtttgacgatgctgccaaagtaatcgccaaggcattaacaactgctggtatctcccacattattgacactactgcaatttctattgggaggaggtacgccaggacggatgagatcggtgttccatttgctgtaacagtggattcggcaacgaacgtgacgatccgagagagggacagcaaggagcaggtccgcgtggacatcgacgaggtggcgcctgtggtgaagcagctgacggaaggccaaagcacatggacggatgtttctgcaaagtatcccgcccatgtcggcccccaaagtgagcaggagtgaagaatcgccgccctgatgtctagtctagccatcgaccgagaaggcgtcgggatgagccgtcttcgttctccaattgctgagaagattgtgtggcctaaacataactgcttttggtattgacattatccagaaaggcagtttttttccctcatacatacatgacacttgctatagcagttggatgttatgaagtctgcagatgtcaccgatttttttgtttcttttaaatgcccctttcttgatgtattctcacccatacaaaacataccatttgaggtatttctgaactagctgtccttttgtaaggtcagactgggaattgttcagctatctacagtggaattggaaatttcagttacttgtta

SEQ ID NO: 120483 - DNA, 1840 bp, Zea Mays
ctaacctgtcccgtctcatgtgacggtcatcttgttcttgtgtcactcatggactctcctctaatgaagcccctactagtgcccaacaaccacagtcccggaccggttgtcgccgccacgccgggagaacacggcggtgctgcggccgacgagagcagcaccctcgtggatgctgccagtggcacggatgagagccacagggcactcgccgacgccgacgtgaagatgaacgacgatggcgacgtacaaggggacgagctgtccgcgtccgtgcagcgccggctggacgagagcagcgccgtggagggggaggatgaagaggaggagattggtgacgacgcggaggccgacgacatggcggcgcgcatgggacggcgcctggcggcgctgcccgggaatgcgcacgagagcgagccgttcaccatcttccgcgtggcggggcccatgcgcgaccgcaaccggcacctctacgagccgcagatgatctccatcgggcccttccaccgtggcgccggccggcacctcgccgccatggaggagcacaagtggcggtacctccgcgacattctggcccgccccggcggcgcgacgctggcctcgtacgcccgcgccgcgcgctcgatggaggcctccgcgcgccgccggtacgcggagcccgtgctgctgcccgcggccgagttcgccgagatgctcctcctggacggctgcttcctggtggagttcttcctcaaggggcaggagagcgcggaggacgcgctcatcgacgcctcgtgggcgatgcagaacgtgtacaacgacatgctgctgctcgagaaccagctccccttcttcgtgctcgagcgcttctacgacctggccacgggcgggctcggccgggactacttcgtcaccaacgtcctcgtcaactacctcaccgtggacatgtgcgtcggcccgcgggaccccgagagcacgcggccccccgacggtgagatccaccacctgctgcatctctactaccactggttcctaccaccggaggaccgggacgggagcggcacgggcagcaaggacaaggaagacggcgaggcgctcgaggaactgatgtccacgtctgcggatgagcgcatgccgtggcagctgccgccggcgtcggagctgaaggactccggggtgacgttccgcgccaagaagtcgccgcggagcatggtggacgtgaccttcgaccgccgcagcggcgcgctggagatcccggccgtggagagctacacgaaccacgccatcttcgcgaacctgctggcgtacgagcagagccggggccggtgggagctgcagcgcctggtgagctacgtgctgctgatggcgtccgtggtggacgcgcggcgcgacgtggaggtcctgcagcgggccggcgtgttcgtgcgcggggacgaggagacggcggcgttctacgcgcacctgggcgagctgtgcccgccgcccgagttcgtcaacaactgctacgccgacctgttccgcgacgtcctggagtactgtgggcgcagctggaacaggcaccgcgccgtgctggtgcacgactacttcagcaacccgtggaccagcatgtccgccgccgccgccgtcttcctgcttgtcctcaccgtcgtgcagacggtctacaccgtgctgccatactacagccagaattaacggggcaaaaaacaaaaaaggcgttttgccgccgtcacacagaccgggtgtcgccctctgttttttcttttttttgcctgcaactacaagaaaccctatgatttttccttgctggctcctcctatacaatccatatgaatgatggcgtctggagcgtgatcgtttgcttgtc

SEQ ID NO: 120484 - DNA, 1837 bp, Zea Mays
gaattcaatttgattgcacaagtacaccttggctacgacccttggccgccgcctcaacctcaactcatctcgccggtggtcgatctcctccatctgctcgccgcggcgcaacccggagaggagaccgcgctcggtcgagcaccacctagggctagcgtcctcgcgacgagctccggcgcggcgtccgccctctgcagccccggtgtccccgcgaccggctccggcgcgaccggcacacagctccacaggccaacgggacctgattcatggcgaagcaggcgtacgccacgagcagtctcgtggtcgggtacgcgctgtgctccagcttgctggctatcatcaacaagtatgccatcaccaagttcagctaccccggactgctgaccgccctgcagtacctgacctcggtggttggagtgtgggtgctcgggaagctcggcttcctctgccacgacgccttcaacctccagaccgccaagaagtttgcgccggccgcggttgtcttctaccttgccatcttcaccaacacccacctcctcaagcatgcaaacgtcgacactttcatcgtgttcagatccctgactcctctcctggtggctatcgccgacaccaccttccggaagcaaccgtgcccttccaagctcacgttcttgtccctcgtgatcattttgggaggcgcggtcggctatgtgatgacagactcggccttcaccctcactgcatactcgtgggcactcgcttacctggtcaccataactactgagatggtgtacatcaagcacatggtgaccaacttggggctcaacacctggggctttgtgctctacaacaatcttctctcgctgctaatggcaccggtgtttgggtttctgacaggggagcacttgtccgtcttcagagcttttgagtcaagggggcagagttggtttgagcttgatgcctttgtggcggttgcgttgtcctgcgtctttggtctgctcatcagcttctttggtttcgctgcaaggaaagcgatctctgccacagcgttcacagtgacaggtgtggtcaacaagttcctcacggttgcgataaatgtgatgatttgggacaagcatgcaagcatgtttggtttggtttgcttgctcttcactctcgctggtggagtgctctatcagcagtcagttacaacaaaaggcaatccttcagcagcagctaagcagggaagaggtggtgatgatgctgttgaggtggatgaggagagccagatgctggtttcatctccaaaggttgtctaaggtgcatgatcaccaaagatccagttctgttcgtttttctggacccatgttttgaagatttgtcagtcatgtaccgaaggaaatccaagaggctgcatttttgttctaggagaggctgcagtaactttacatgatacatgtttggtctataattatttttgttaccgtgccttgtttactggtaagctccaaaccccgtgcgatgtttaattacttagaacgacaaaccaatgcggtgaccatcttatatggttattggcacctatctggacattgtatacctgatgaggtgactcagattacatacaccctttctgacattactaaggcccatgttcgtttggtacggattgatgggctggaatcattcctagccgaattgcttctttaatttatataatttttgatcagctggaatgatttcgggtgcaatcccgcacaaacaaacaaggcctaaatgttttagcagtgcattagcttcatggttttggtatgatcagattttcagtggcccatttgctatcagcggggatcaaataaactacgcatttgtttgcggt

SEQ ID NO: 120485 - DNA, 888 bp, Zea Mays
cgtccctaccctctcctgtcctgtcgttctcgtgcaagctcacggtcccccacgcccacgagcgcctccgctgcgacgaagagaatcatcaggcagagcgggggtggggcggggcgcagatggatctagagaggtcaccgccagcgtcgtcggcggaggcgcccggggacggcggcgggggcggggccgcggcctgctcaatctgcctggatgcggtgctcgcccgcagcgctggtcgctccgtcgccaagctacaatgcggacacgagttccacctaggtcggatcccccgcgccgctgctgggctacgttttttcgtcatccggatctgcctgtgatggccgccttggtcgggtagcgtgcgtcaccggcgtaatttgccgtaaaagaggctgaatttggcgtagaagaggaattctgatgtgtcgttttccaggatttcatagcgtcgtcgacgtggttcagacttaataacggagatgctctgacacatgttcggatggtgagcctgatgatgctgatgctgatgggagtgaaaactgcacgtgtaagagcaagtagtgctgttcctgcataattggagctccaggttgacttgcgaatccgaggcttggatttagcggtaatttaggttgcttcactagcggttggcctgttgccttgagggttgtcgtgatttagcttagttgttattaggcctataacggcttttgaaagcagggacaacatcaaaggttcggacctttgggtcttgttcttcccattcaggtcacaccttgtgttaagtactgagtacttccctagagcaaatttagaaaaaaatgggagcttcatctcgtgtgatgcaaatttaaaattcctatgacccaacttctcaaatttcttcta

SEQ ID NO: 120486 - DNA, 2000 bp, Zea Mays
cgtccctaccctctcctgtcctgtcgttctcgtgcaagctcacggtcccccacgcccacgagcgcctccgctgcgacgaagagaatcatcaggcagagcgggggtggggcggggcgcagatggatctagagaggtcaccgccagcgtcgtcggcggaggcgcccggggacggcggcgggggcggggccgcggcctgctcaatctgcctggatgcggtgctcgcccgcagcgctggtcgctccgtcgccaagctacaatgcggacacgagttccacctagattgtattgggtctgcattcaatgcaaaaggagcgatgcaatgccctaactgtcggaagattgagaaaggtcgctggctttatgcaagcggacatcgcgcctctgttgatattgatatgggtggctgggtgaccagtgacaactatgatatcacctccgagcttccttttggatttcaatggtgcccctttagtggattcacccggctagcatccatgtttgaggagcgtgaagctgagcttacttatcacacaactggagatcgctcaagtgctgcaagcagttcacttgtttgcccatatcttgccctgcgtggttttctgcatcctgttcatgtgccttctacatctaatcctggtgctgaaagcacttcatttcgtcggcatgcaactggcttggaaggccatgccactcttgatttgaataatgctcaacttttccatgcgattgagtcaataaatcatgacagtgagcacagacatttgagtaatcttcctgtatcaggaattcctgagtattctatgactccatttggtataggactaccaagatatgacagtggcagccaacagagattcagatcatatgcacatcatcatcccctaatccataggccagcacctcgcagtgggagcaatttggtggcaccaccattggggtcggttccagctgtggtggcggcggcggagaccgcaagaggcagccacatgtaccaacgctcgtccgtgcatggcagcccgttccctcctaccaccactagaagggtgaggccgagagccttgacgatcacatcgttcatcgcagcgacgtcctcaggtgagatcggaggcccccatggattctccgctcctggagccgccatgaacaggagcgtctctgacgctgagggcatctctagacccattgaccggccgtacaatgcatggggccgggagggcttcgctccgttcccctggatccccgctgaaggcgagtctcactggtggggcaccttcaaccctgtgcagaaccatgcgcatggaggctttagcagaaggcctgctggggagcggatgccgccgcagagccaaagccacccggagaacagctatcaggctgtgccgccgtcacagaggatgccgccgttcttgtgattcgacaaggctgttcctacgtccgatcgctgtgtataaaatgaagtattcggttcggggcctgagagagcacattgagcgaagatcgactgcactgcagtctccagcgttgggacctgtgtgatgtttatgccgctggtatttcagcgcttttctttttccctccggtccagcagcactctggtttcattgagcgctgtagactgtctgtcctaactgatgttgtgttgcgttgaggaggacgatttggaaacgtgagccgaagctgaactgcatctctggtctccgggactaaaaaatgccgtttgctgctatgaaagttgtatcgatttgcgaccgcaggtcgcctgcaaatttgttagaacaggtgaaatttagtgaacacaaatgttggagacctgcggcgtttacattttttttgttggttaccgagattgtatttaaaggtcgtgatgcgccatcaagcgattgtgatggatcaatttatctccctattgtagcaatgggttttttttgaaaccgatggatgtatatgtcactagaagtaaataccagacaaatatagttgtatccatgctaatttgacca

SEQ ID NO: 120487 - DNA, 621 bp, Zea Mays
tctttctggtagtcttcatgccacttcttgcagttgcaggggagggatcatggctttcttttattttccgtgtgcaatgcttaatttagatattcttttatgcaaataatgcggttacactagattagccaacattctgggaaataagctatatggtcagagtaagaggttcaagagttgatagtttaacaacattaactaagagcaaatctatcaagaaaaaagaaacaagcaacctgaaacctacaactgcaggagcttgcttgaaagtgaacaatcaaggttgtgtgtatatattatgcccgacattttgaaggatattgcgagggtcattgtatctgctagaaaatcatttcaacttgtcgaacaatgtattaggatacgaattggagtggtcaacagaaattctggccaaatatgtcaaattttagaatccacgatggtcctccaaaaaataaagatgctcttgatcatccattgagcagtggaatcctaattttctgttgtagcgtgatggataaaggtttttgtgtattcttgggtttttgtcctttcctttttggctacacacaactctttttcaatacatagtcagtaggttgcaatgcctcctattttctt

SEQ ID NO: 120488 - DNA, 1516 bp, Zea Mays
atataggcaccccgcaccccgttggcgtttgcccgtcctgactcctcgtccccgtgcacaccaccctcgtctccgcgcccgcgccactcacatcgtgatcgagacgacccgcgtcctccgcggtccgcgcccgcgcaccatctcgcctcgcattcccgaaagtgttttttttttgttattgcagtatctgtattccttgatcaacatgtcgcgggaggagaatgtttatatggccaagctggctgagcaagcagaacggtacgaggaaatggttgaatacatggagaaggtggctaagaccacagatgtgcaagagctcactgttgaggagcgtaaccttctatctgttgcctacaagaatgtgattgcggccccccgtgcctcatggcgcattatctcctccatcgagcagaaagaggagtcccgtaagaatgaggaacatgttgcacagatcaaggaataccgtggcaagattgaggctgaattgagcaacatttgtgatggtatcctaaagctgcttgacacgcaccttgtgccttcctccactgccacagagtcgaaggtgttttacctcaagatgaagggtgattatcacaggtaccttgctgagtttaagactggtgctgagaggaaggaatctgcagagagcacaatggtagcttataaggcagctcaggatattgcattggctgaactgccacctattcatcccataaggcttggacttgcacttaacttctcagttttctattacgagattcagaactctccagacaaagcttgcaatcttgccaaggaggcgtttgatgaagctatttctcagttggacatgcttggtgaggattcctacaaagatagcaacttgattatgcagctcctgagggacaacttgaccctctggacggaggacggcattgaggagggcttagaatcctctaagggcgatgctggtgagggtcagtagcctggtaaacttagattgatggttcgacgtgtttctcaagcacatcgtgttggacgcccagtgctgacaaaaggcttttgctgctccatgcattccaagcttctgccccctcgttcgcaccctctttatgttgttggctggtagtggtcagatttagtcccattggtttagttggccctgggtccatctgaactgatgtattgttactgctatggaagtcattcctttagttttgctctggcagtggattgctgttgggtcgtgttttcagtctttattggttccgatcggacgctgttgcggcaaaccacccctgtagatactcttcacatgctgaagaaaactaccagcagccgtttagcctgaataattgctaaatgataggttaccgttgaggctgattggtttttatttttttttaccctgtgacatcaagttcttgggtaactttttttaccgttgaggctcaaacaaattgttaagtgggagaattgtgaagtgggagtggtaatggatcatgatctaaatgattcttcacaattcattgaaacc

SEQ ID NO: 120489 - DNA, 1494 bp, Zea Mays
atataggcaccccgcaccccgttggcgtttgcccgtcctgactcctcgtccccgtgcacaccaccctcgtctccgcgcccgcgccactcacatcgtgatcgagacgacccgcgtcctccgcggtccgcgcccgcgcaccatctcgcctcgcattcccgaaagtatctgtattccttgatcaacatgtcgcgggaggagaatgtttatatggccaagctggctgagcaagcagaacggtacgaggaaatggttgaatacatggagaaggtggctaagaccacagatgtgcaagagctcactgttgaggagcgtaaccttctatctgttgcctacaagaatgtgattgcggccccccgtgcctcatggcgcattatctcctccatcgagcagaaagaggagtcccgtaagaatgaggaacatgttgcacagatcaaggaataccgtggcaagattgaggctgaattgagcaacatttgtgatggtatcctaaagctgcttgacacgcaccttgtgccttcctccactgccacagagtcgaaggtgttttacctcaagatgaagggtgattatcacaggtaccttgctgagtttaagactggtgctgagaggaaggaatctgcagagagcacaatggtagcttataaggcagctcaggatattgcattggctgaactgccacctattcatcccataaggcttggacttgcacttaacttctcagttttctattacgagattcagaactctccagacaaagcttgcaatcttgccaaggaggcgtttgatgaagctatttctcagttggacatgcttggtgaggattcctacaaagatagcaacttgattatgcagctcctgagggacaacttgaccctctggacggaggacggcattgaggagggcttagaatcctctaagggcgatgctggtgagggtcagtagcctggtaaacttagattgatggttcgacgtgtttctcaagcacatcgtgttggacgcccagtgctgacaaaaggcttttgctgctccatgcattccaagcttctgccccctcgttcgcaccctctttatgttgttggctggtagtggtcagatttagtcccattggtttagttggccctgggtccatctgaactgatgtattgttactgctatggaagtcattcctttagttttgctctggcagtggattgctgttgggtcgtgttttcagtctttattggttccgatcggacgctgttgcggcaaaccacccctgtagatactcttcacatgctgaagaaaactaccagcagccgtttagcctgaataattgctaaatgataggttaccgttgaggctgattggtttttatttttttttaccctgtgacatcaagttcttgggtaactttttttaccgttgaggctcaaacaaattgttaagtgggagaattgtgaagtgggagtggtaatggatcatgatctaaatgattcttcacaattcattgaaacc

SEQ ID NO: 120490 - DNA, 1558 bp, Zea Mays
tgcccccgatccggcccacctacgtgttccagctcacctcccgagtcccgacgaccgcttcgtgccttcgtttcgtccgtcccctagtccctacgaccctactccctcccgcacgccaccgcccaccagcgccgccgaggggcaaggccgaacctttctccgttcgccgaggcggagcacgcccttccaggccagcttccaccggagcaagagctaagtcgcctcgaattcttcccagctagtagcgtgtgccgtaccccgtcgctcaaccgggatggcgtcgagtggggatccgcccggatctgctgatgagaagaaaactccaaaatccgaagggtcttccgacgaacgtcaagggcttcctccagcaggcttttcaaatccttttgattttggttctatgcaaagtttgctcaatgatccatctattaaggagatggcagatcaaattgcaagggatcctgcattcaaccggatggctgagcagctacagagaagtgctcaaagcacaggagaacagggcacacctccattaaatcctcaacaatacatggaaacaatgcaaaaggtcatggaaaacccccagtttatgaccatggcagagcgtctggggaatgctcttatgcaggatcctgctatgtccagtatgctggaaacctttagtagtccatcacataaggagcagctggaagagcgtatgtctcgcattaaggaagatccagctatgaagtcaattcttgatgagttagagaatgggggcccttctgcaatgatgaagtactggaacgaccctgatactcttcaaaagattggtgaggcaatgggagctagcttcccatttggtgcaggttcttctgctgaaccttctggtactgaagaaactgaggaagaaggtggggatgacgatgaatccatcgttcatcacactgccagtgttggtgatgaagagggtctcaagaaagcactagatggtggagccgacaaggatgaagaagactctgagggaagaagggccttacattttgcatgtgggtacggtgagttgaagtgtgcccagatccttcttgaagctggtgctgcagtggacgctcttgacaagaacaagaacaccccgttgcattacgctgctggctacggccgcaaggagtgtgtggatcttcttttgaagcacggtgctgctgtaacgctccaaaacctggacgggaagacacctatcgatgtcgccaagctgaataaccaggacgaggttctgaagttgctcgagaaggacgccttcctttgaataccatgcctttcgtatacacttggactcttggtgtcatgttttttttttcataccggttgtttttgtctggatagccacatgtcatggtccttaaatctgttatgcctaaatgctattagcatgtgggtgttcgaactggcctgtaatggtctaccgttcgtgacttgtgttttcccactccatttctgatacttaagcacatatgaaaaagttgtttccggatcaaattcaatggtggtgtatcatggttatctgtcttatgcttaagagaca

SEQ ID NO: 120491 - DNA, 1474 bp, Zea Mays
aatcacatcaaccggactgcagtccatcgaaaagcccacgaggcgacgagcgtgcaacgaactcactccctcgaccgtatcggctgctcctctatccctttcctgccactagtccactactatctaagctagcatggccatgatgatgctagcgcgcaacctgtgctctcgtctccgcccaccgctcgccgccgccgcggcgttctcgacggtccccgcggcgtcggcggccgcagcggaggcggagaggtcgatacgggacgggccgcggaacgactggagccggcccgagatccaggccgtctacgactccccgctcctcgacctcctcttccacggggctcaggtccatagaaatgtccataaattcagagaagtgcagcagtgcacacttctttcaatcaagactggtgggtgcagcgaagattgttcttactgccctcagtcatcaagatacgacactggattgaaggctcaaaaattgatgaacaaagatgctgtcttagaagcagcaaaaaaggcaaaagaggctggaagcacccgtttttgcatgggagctgcatggagagaaaccattggaaggaaaacaaacttcaaccagattcttgaatatgtcaaggaaataaggggtatgggcatggaggtctgttgcacactgggcatgatagagaaacaacaagctgaagaactcaagaaggctggacttacagcatataatcataacctagatacatcaagagagtattaccccaacattattaccacacgatcatatgatgataggctgcagactcttcagcatgtgcgtgaagctggaataagcatctgctcaggtggaatcattggtcttggtgaagcagaggaggaccgggtagggttgttgcatacacttgccaccttgcctacacacccagagagtgtccctattaatgcattggttgctgtaaaaggaacacctctcgaggaccagaagcctgtagagatatgggaaatgatccgcatgatcgccactgctcggatcgtgatgccaagggcaatggtgaggctttcagcgggccgagtacggttctccatgccagagcaagctctctgcttccttgctggggccaactccatctttgccggcgagaaacttctcacaaccgcgaacaacgactttgacgcggaccaggcgatgttcaatatccttggcttaatccccaaggccccaagctttggagaggaagaggcggcggcagcggcggtggcggctcctgtgtgcaccgagaggtctgagcaagctgcttctatgtagaatggcaaaactagaactactgttattatagtttgatttgatctggtccctctatgaggtgtgtgtgtgtgtgcagaagagaatagagcaaagtgtgtgtgtgcagaagagaattgagcaacagagacagataagattacgggagagaacgcaggactgtgagagaatattcttctacgt

SEQ ID NO: 120492 - DNA, 402 bp, Zea Mays
aactctaccgacctccgctcaccgccccctttcctcctatccctcccagagccccgacccggccggccggccggccggaaccctagccttatcgcccctccctttcccgcctcgcctccgcgcgatctcccgatcgccggattcgtgccgcggctggatggactccgacgtggagatgaacaccgccagcgatgaggaggtgatggacaacgatgactactacgactactgctacagcgacgtgggcgacgacggtgggagcaacagcgggagcgaggagctggtggccggggactacgacgagggcctcgaggccgaggggaccgacgaggtggtctctaggcgcgagcaggtgagactgatgctgcgagcacgaagaggcggatagggcgatgccttgct

SEQ ID NO: 120493 - DNA, 2297 bp, Zea Mays
ctttcctcctatccctcccagagccccgacccggccggccggccggccggaaccctagccttatcgcccctccctttcccgcctcgcctccgcgcgatctcccgatcgccggattcgtgccgcggctggatggactccgacgtggagatgaacaccgccagcgatgaggaggtgatggacaacgatgactactacgactactgctacagcgacgtgggcgacgacggtgggagcaacagcgggagcgaggagctggtggccggggactacgacgagggcctcgaggccgaggggaccgacgaggtggtctctaggcgcgagcagacatttgtggttttaaacgaacaagttatatctgaacgtcaagccgaagatgtgagcaaggtatctgccgtcacactgattacaagggaggaggcgtgtgccctcctccatcactataaatggaacatcagcaagctgagtgacgaatggtttgcagatgaagaaaaagtccgccatactgttggcttacttttgaatggaaatcatgacccccgctctaggaagctagtctgtggaatatgttttgaggggtgttcttctgatatgatgagctctgctggttgtgctcatttttattgccatgaatgttgggaaggctacattagcgctgcaattggtgatggtccaggatgtttgtcattgcgatgccctgatccatcttgtagtgctatggttcttcaagggatgattaatgaattagctaaagatgaggatagaaaaaaatatgcacgatttctcttacgcgcatatgttgaaggtagcaagaagactaaatggtgtccagctcctgactgcacatgtgctgtggagttccttggtgatgaaaactatgatgtttcatgcaattgcatgttcagcttttgttggaattgcactgaggaagctcatcgaccagtgaactgtgagactgtttctaagtggatattaaaaaacagtgcagaatctgaaaacatgaactggatactggctaattctaagccctgtccaaagtgcaaacggccaatagagaaaaaccagggatgcatgcatatgacatgcacccctccttgtaaattcgaattttgctggttatgtctgggtgcatggtcagatcacggagagagaacaggtggcttttatgcttgcaatcgttatgaatcagcaaagaaagagggagtttacgacgagactgatgcaaggagggaaagagctaaaaactctcttgagagatatatgcattactatgagcgctgggcatccaatcagacatcgaggcagaaggcccaagcagatctgctaaaagcggaaaaggaccagattgcaaatttaactgacattttcgggataccagagacccagcttaagttcataatcgaagcttggtcacagattatagaatgcaggcgagtgttgaaatggacatatgcttatggctactatctggatgataagatcaagagtgaattttttgagtatctgcaaggtgaggctgagtctggtttggaacgcctgcatcagtgcgctgagaaagacttgcaaatttttttgccgtctgtgaaatctgacagcactgaaacaacgacacctacagtggctgaatttggtgaattccgcgtgaagcttgctggacttacaagcgtgactcggaattactttgagaaccttgttcaagctttggaagctgggttggaggatgtccgtgccacaggccaggctgctggtacatccagcactgccaccagctccaagaaaggaggaactaaatccaagaagaagcagcacactgcaccatcatctgaccacactgatgatgggtggccctgcgagcgctgcacatttcttaaccctcctacagtggatgcatgcagcgtctgcgaaaagagtaggtactagatgatggaatagctcaaagggagccagggaggcatcccaagaaaacctcaaagctcgtgagaagcatgcatgcatcggatgctgagaagaagagcttccagctgccgcaatgttgtacagagagttattttagggcctcggttggaaacggtgtggaggctcaagtggtcacatgtttgtgggggtcatttggttttctagttcttttctgttgttccttgtaaatatatttgttgtgatgtggtgacctgtgtttatgtgatgagtttttgtttctgacaaactgtgaaattaaactttaacaaaactgatgagaggtagctctgtttattccctcctaattgcgggcagggtctttgtctattcttccacattattta

SEQ ID NO: 120494 - DNA, 873 bp, Zea Mays
atgctggggcatcacgagcacgggatgtcgcgcccacacccgggtgctcgagcccacgtgcagcgcgtgcgccgccgtccccgccacccctcctccggacacggccacccctccggcgacgtagaacacgccgccggcgcccatgcccgcgcagccgtacctccggcgcagggcctccgcgacgatgcaccatgcttcggccgccgggtcgtactcctcgaccgcggcggtgcgcaccgagcttcccgccacgtagatccgcgcgcccacggcggccgccgcgaacttgctccgcgggaacaacgtcggcgcgcacgctcgctccgcgcacgtcagcgggtccacccgcagcgtggcgccacggtcgaccaggtacacgtgccgccccaccgccacggcgagcgcgtgcgcaaacgcagtgccgccgcagtgcgtgggcaggggcagcgcggcgacctcgagcgaggacgcggaggcgtggaggtggaggagaagtttgagagcggaggaggaggacacagcgaggaggcatgggcggaggatatccagcaggagctcgtcggggagtcccgcgatggggggttcgggctcgggatcctcgacgtcgggggccgtgaaggggaccgggacggcggtgtggcgggcggggtcggcggggatgcaggaccgcgtgaaccacgagagggcgcgcgggtggcagctctacgtggccatggtttcctggctgatgcaggggcaggcatcgcgaggacaggtgcgagggcaggcggggcacgcgaatcacgggagcggagccacggtgaagctgtggacgcctactttactctcttatggagtagtaaagatatcagattcaacaccaaattaatatag

SEQ ID NO: 120495 - DNA, 1476 bp, Zea Mays
ttatgaaggacgtgagtgcatgacgggtttgacacaacccaaacgtggccctttctcaacccggcgccgcaagggaaaaccctcgcgccgcttcgctcgtttcaattccaaaaaaaaaggaaaaccctttgcagtcggggaactctcgcattccactattccagtcatcgagagcgcggctgcggcggcgagggaaacatcctttctcgcatcatggccacctctacggagccggagggcgcgccgcccgcggctaaggggcctaaaggagaggccaacacgaaggggagcaacgaacatagagaggtcggcgcaggcagcggcggcggctcgcagaagcggaagaggaaggaggtcttcatctacggcaactacaggaactactatggctaccggattgatcgcaatgttggtgaagatcctcgccttgaggcgttcaagaaacagtggtttgaaaagaaggattgtctcgatattggatgcaaccagggtttggtaacgattggcttagccatgaaatttaaatgtcaaagcattcttggcgttgatattgattcaggtttaattgagactgctaagtggaatctgcgaaggataatgcggcaggataaggtggctacaaacaacgtcaaagctcagaaatcatcggattctcctcagagctctccagaagaattggcatctgagttatcgaatgggaacaagcaccaagatctttttaaaattgtctcttttcgacgtgaaaattttgtagcgagtatggatggatgttcagaacagtatgacaccatactatgtttgagtgtgacaaaatggatccacctgaactggggcgacgatggcctagttacgttatttgtgaagatctggaggcttctaagaccgggaggtgtttttatcatggagcctcaaccatggagttcatacaagagaaacagattagtttcagaggtcgccagaaataacttcaacaccatctgtatatacccagggacatttcgcgagattcttctagacaaggttggatttaggtcggtggagttgcttgccgaaagattagtgggcaccgtcagtggtttcgatcgtccaatagaagtttaccacaagtgatgaaactggattaaggattgtggcatgcctgcccaattgcacactcacctgaccaaattattgtgttgagctttgaaatgctcactgcctgactaggtacaagtacaacaatgaagcaagtatggtgctggacttgcgtttgtaaaacagaatatcagatggcgaaggatcaagatggaagaagaggtggtaggatgttgtgttctctagatggaagtgctgggaattttgttaatgggtctgtttttgtataaaatggataatggataccgtaccctgaaagggaaagagtccttcatgagtatcattttgcctgctatggatatcatgatttctcttgcttattgtttgccactccccattttc

SEQ ID NO: 120496 - DNA, 1494 bp, Zea Mays
ctttctcaacccggcgccgcaagggaaaaccctcgcgccgcttcgctcgtttcaattccaaaaaaaaaggaaaaccctttgcagtcggggaactctcgcattccactattccagtcatcgagagcgcggctgcggcggcgagggaaacatcctttctcgcatcatggccacctctacggagccggagggcgcgccgcccgcggctaaggggcctaaaggagaggccaacacgaaggggagcaacgaacatagagaggtcggcgcaggcagcggcggcggctcgcagaagcggaagaggaaggaggtcttcatctacggcaactacaggaactactatggctaccggattgatcgcaatgttggtgaagatcctcgccttgaggcgttcaagaaacagtggtttgaaaagaaggattgtctcgatattggatgcaaccagggtttggtaacgattggcttagccatgaaatttaaatgtcaaagcattcttggcgttgatattgattcaggtttaattgagactgctaagtggaatctgcgaaggataatgcggcaggataaggtggctacaaacaacgtcaaagctcagaaatcatcggattctcctcagagctctccagaagaattggcatctgagttatcgaatgggaacaagcaccaagatctttttaaaattgtctcttttcgacgtgaaaattttgtagcgagtatggatggatgttcagaacagtatgacaccatactatgtgtgacaaaatggatccacctgaactggggcgacgatggcctagttacgttatttgtgaagatctggaggcttctaagaccgggaggtgtttttatcatggagcctcaaccatggagttcatacaagagaaacagattagtttcagaggtcgccagaaataacttcaacaccatctgtatatacccagggacatttcgcgagattcttctagacaaggttggatttaggtcggtggagttgcttgccgaaagattagtgggcaccgtcagtggtttcgatcgtccaatagaagtttaccacaagtgatgaaactggattaaggattgtggcatgcctgcccaattgcacactcacctgaccaaattattgtgttgagctttgaaatgctcactgcctgactaggtacaagtacaacaatgaagcaagtatggtgctggacttgcgtttgtaaaacagaatatcagatggcgaaggatcaagatggaagaagaggtggtaggatgttgtgttctctagatggaagtgctgggaattttgttaatgggtctgtttttgtataaaatggataatggataccgtaccctgaaagggaaagagtccttcatgagtatcattttgcctgctatggatatcatgatttctcttgcttattgtttgccactccccattttcaaaactgtaagtcattttggcttttgtagatacataattttccatgttgatgccttgtgcttatttatgtgcgc

SEQ ID NO: 120497 - DNA, 789 bp, Zea Mays
atgggtgccggtggggaggaagcgccgcggataatcgtgcctatggcggtggagggtaccccgaatcagctggcgtttgtagaggagtcgaagctgcagaagcgcaaggagaacgtggactgggccgtgaggaaccgggagcgcagggcggccaagcgccagcgcatccgcgacgagcacaaggtcgccgtcaggcggcccgaggagttcgtcaccgcgttccgcaacaaggagcgcgacttcctgcggatgaggacccgcatcaaggtccgcagccagccgcccgtcgaggcgctcggctccaggctcgtcttcgcgattcgcatccctggctccgtggacttgcacccgcacatcaggaaggttttgaggaaactacgactgacgaaggtcctcactggggtgttcctcagggccaccgagttgacgctgaagaggctgcttgtggtcgaaccctttgtcacatacgggtttccgaacttaaagagtgtgaaagagcttatctacaagaagggccgcgggttctttgacatggaacctttccctcttaccagcaacgatctaattgagaaggctcttggagatcatggcatcatatgcttggaagaccttgtgtacgagatcgccactgtaggcccgcacttccgagaagcatcgaggttcctcatgcccttccagctcaagtgtccggagaggaggctgcagatgaagaggaaaccgtacagggatggtggcgactcaggcaaccggggcgacaaagtcaacgaactaattgaaaaattgaattaa

SEQ ID NO: 120498 - DNA, 2498 bp, Zea Mays
attcctgaatttatggaggcaaaatttttattgccaacatctctgacttttatgtacctaacaattttctgttttagcgcattgcacaacgtattcggcaagatggtgggactgcagatgcatctcttcgtcgtgagatccaaactgaatcggttcagctaggaatttcgatgcaacatttgggtgctatgttctttgagcttggtcggacgatgatgatgcttcgcacagggcaatctccttctgaggcttttgtaaattctgggcctgctgtttatataaactccacaggaccaaacccaatcatggttcagccatcttttcaaaacacccctccttttggtgtatctaatataccagttctgggtggaatttctggtgcttttggtattgttgatccttctcgacatatgaatatcccaagtaacggtgcatctgcaacaagtggttcagctgctggtactaccaccggttctgaaggagctatccacgggaaccgccaagatgcggcaagaactcaaggaggtaacccaccaggtttcctggctgcaacacgtggattgccaaccagaacagttgttgctgctgttccagcacggtcctcaggcgaggctccaaaccatatctttagtgttatcctacctgttcaagtgaggggtcaagttgtagtgcctaatcagtcctctcaaggttctcaaacagcagtgggcaatggagctcaaggaaattcaacatctgctattccacaagcttctgttggtggtgtttctggtgttcctcttatagcggcacaggtagccaatgcattggcaaatgcaccaagccaggtttctttatctacacaaagtgcagcagatcagggatttcacctgactacagacaacagagctgatgttctgagttcatcaacaccagccactacaccacagaatggtccctcaggtacttccggttccagtttgccatctcaagacaggaatactttaaatgttcccagtcttgatagtatacaacagcatccacaattgggagatacttgtgcagatacagctgacttatcaggagacgccacagccatcagtactcatgatgctccttcgaacccatcagttgacagttctgtgctgaagaacaaatcctcggatgaagtaggttcacagaccactgagccttctgcaagtggcagtgctgaaccattaggtcttggtggaggtctgattccaattccaaagaggcggagcaaagcagtaaagccatctgggagcacaactgatcctagtagggatttgtcctcagtcagccaaaaccaagatcctatttcagtagcccagcagtttctggaaggttttgcttcccgaaatactaatggtagcagaagcaacaccctctcctctggtcctccatcttctgtgccacaggctactgaagttcctccgagaagacagggtggtggacaacctgatattggcagcatgatatctggtatgctcaacaacccagttttcagcaacatgttgtcgaatgtggcaacacaggcagggggctctagtgctgatttgaagagcgtgatggaaggattacaaagccctgctattgtagatacgataagcaatatcgtgcagaatgtggatgagcaagacctgggggccatgtttggttcaggcagaggacaaggtggcatggatttgtcaaggatgttgcagcaaatgatgcccgttgtatcccaggctcttggtggtgcaggggggcgttctgctggtgcaaatggtggacagcataggtcgcggcctcagcgcattgacggtgaaggaaatgcaccagccagcagttctcagattgatctccatgaagctcgtcaaagcattgaacagcatgaatccccagagaatatcttccgcgctgtccttgaaactgctgctcaggcccatggtgaagataacagcattcagggcatggtcgaagaacttgccactgatcaagagcttgccgatgactacatgaaacttttgatggaacaagttcggcagaggatacagtcagagtcgcagtcggggagccagccttgaaggattgggcggcagggtcgtgtagccagccattcgctctgcgatatttatctatgggaaagaacagaaccaaagctgttgtctgggcgtttttcatgattaggtgcccggtgtacatgtggcgttgtaattttccgagataatgtatctgcagcagcatatctcgtactctggttagaactgtttttttttacgaattttgctagaggtacatacaacgagttttaaaggtggtgacgtctgaatttcgtggaattgacaatgacatgtctgtatgattggtgtcgcaactctccagttcggaaatttgttagcacaggttgtccttgttcctggcatgtgtttcaccttttagccattaaataccattttggttcatgtaaggtagtaaccttgtgcactgggtccggttataaatgattccttaagggc

SEQ ID NO: 120499 - DNA, 2433 bp, Zea Mays
atggaagatacatttgcagatcaaccacaaggggagccaggaagccagcagccatatgatccagctaaagatcctaaaagaaaggcaaaatcgaaggatccagcatggaactattgttattggccggatttgaacaaaaaagatgtgaagtgcatactttgtggcaaaatcgttcatgcaggtgttagaaggttgaagcagcaccttgttggtggtcatggtgatgttgctaagtgcccgaaaacaacatcggcaattagcaaagagatgagtgattatttgaagaagaatgctagacagaagcctattgacttggatgatgataaagatgatgaagttgaagtacttggagaaggggaaagtagagcatcccattcagttgttcacccagttccggaacagcccaaaagagaaggctctcagctgaagcaagccaaaacaatcaacacgcgtcgaagtcttctaagtcaattgcatccatgtttcgcaaagcacctgaagatgtgtggcttaccacttaatgtcatcaactcaagggcctttgagatcatgcttgaggcggttgggcaatatggtcctgggtatgtgaaaccctcctatcatgatgttagggtgccattgcttgagaaggcaaagagtgtagatgagataaaaacgactcatgagttggcttggactgaatttggttgcacacttatgtctgatggttggacagataggaggggtcgacacttgatcaatttccttgtcaatagtccaactggcacatttttcttggagtctgtcaatgcctcaagtgagacagcagatgctcagatgttagctgcactactggagaaaagaattgatgccattggtagagacaaggacattgggaaaattggagagttcaagaaatgcatttcccatgctcgccaagtgacaaccttcatatataggcatagcaagcttcttgatgccacgagggagaagatagggggtgatttagtgaggcctgcagttacaagatttgctacatctttccttactctccagtccatatataaacataagcaagctttgagatgtctctttgttagtgatgattggactaggtccaaactatcaagcacagaagcaggaaagaaggtcacagagatacttctttctacaaacttttggaactcagtccaagattgtattcgtgcatcacaaccactcctcattgtgttgcgaattgttgatggtgatgaaaagccagccatgccagaggttgccgatgccatggatatggcaaaagcaaagatcacttcgggttttgaagttagagaaggggatgatcttgcatgggctcatgtggatgatgcaatcggtgcttctagttcacttcaaggtcgcaactttccaagaagagcccgatatgagtctgtttattcaaggcgttgtcaagctgctgctacacaggaggagagagttatggaagaggaagagcaaagcaacaagggcaatgaacaagatgatgaagagtacatgcctaatgatgatgaagtggatgactttggtgaatccccacatgacagtccaactcaagctggtgctgattgtgaagaaaatgcaatggatgatcttgatttgggagatatttagggtatctaggggctgtttggtttgctacctaagacgccacaatgtgcctaacttttctgcctaaccttagttcttcaattcgagcgactaaggttaggcagattgtggcgtcttagctaagaaaccaaacaggcctctagtatctatctagctgcagcatcttagctatctaatggagtttatttcctttcaagtttgaactatattttcttgctatttgttttccaatttgaacatatggctgttatgacttatgagtttatgatttatcacttatgtggctgatttggttcagtttgaggcttcaaatgaggcaagacttgctatttatttcagtttcgttcaatttcatacttcaaaagaggtaaaacatcctctttcttcatatataattgatatattgtctatatgaagccattatataggcaaaacagccactatattggcaagtcgacgactagtcgactgacttatcgactagtcaccaagtcggtaccttgtcgactcgactcgacttaccgacttgaaaaccttgattttgatcaatagaaagtaattccaaaaacaaatctattgcaatcactttagcataaacttctcatatgattaaactaattgtcaatcaaagataaaaaaataatgaaatagtgcatgtcataaatttcaggacacgccgacaggagtattccaaaacaccaactacatctctatctctactaatataaagtgagagtttctcccttcgtacgtctgctcccctccatgcgcacagagagtgtcaccagagtttgacacgctaagcaaaat

SEQ ID NO: 120500 - DNA, 273 bp, Zea Mays
atggatgcacttaaagatgaatatcaccaaagagtagcaactcttgaaaggaaggaataccttatgattttcttttgtgctttacaatcagtcagctacaccaggcaccactcaccaatgatagattggttggtacatgacaaagaggttattgaacagatagtcgacatcgtggaggtcatgaccgctgaccaaccaaggcttctgacaccagtgacaccattagaaaggcagggatctgatgataggcccttggtcttgtctaagagatga

SEQ ID NO: 120501 - DNA, 2025 bp, Zea Mays
cgtgttttgtttctagtgatagctttgctcttgctcgctctcctcgcctgggcgactggactccgtgtgcgcctcctccttcatccactgcgccatctcctccagctgcagcaggccggcgcggcgttgcctccgcttgctcccccctcgcgctcgccgccggcattccggcagttccagctccggacgttccagagtgtagcgccgcgatgggtgacccgagcgcctccgccgaccccgccgccgcgcgccaccacctctcgccacagctcgcggggcagccgccggtgccgcgctcgccggccccgctcgacctggcctccgccgccgcggcgtccgggcaccgccgcctctcgccgtcgctccggccgccggcgcacccgcaggcgcgcctcccgtcgccctacggccagatctcttcgccaggcgccgccgcgcaccacgcgctctcgctctcccagccgctcttcttctcgctcgactcgctcccgccgccgccgccgccgtacgctgatctgggcgccgcgcccgccgtgccggcgccctccccgccgccgtcgacctcggacccgccgccgccgctcggcctgccgcccaggaggtccggccaccgccgctcgcagagcgacatccccttcggcctcgcgcagctcagcccgccgctgcccccgccggcaccggtcaagcgcgaggtcgccactgcggccgagggcggcgacggcgatgacgccgccttcttcgacctcgtcaacgcctacatggacctggacggtctggacccgctcaactcctctgaggaccgccacgacgaccgcgacagccgcgccagcggcaccacgcgcgccgggagcgcggcggagagcagcgagaacgaggcggagagccagtccacgtcggcggacaggaaggacgggggcaagtcccgccattgtcgcagcctgtccatggacagcttcatgggcaagctcaacttcgccgcaggggatgagtctccaaagctgccgctgccgtctcctcgtgccagtggcagcctcactaggagcgggagcggctcactggaaggtggtgctgtcgcgctgtttgacatggagttctccaatggagagtttactgagtccgagaagaagaaaatcatggcgaatgagcggcttgctgagatagctttgacggatcctaagagggtcaagaggattctggcaaatcggcagtcagcagcaaggtcaaaggagcgcaagatgaggtacattcaggagcttgagcataaggtgcaagtgctgcagacagaggctacgacactctcagcacagttgacaatgctgcagagggactcagctggactggctactcagaacaacgagttgaaaattaggctgcaagccatggagcaacaagcacagctgagagatgccctgaatgaagcgttaacgggcgaggtccagcgtctgaaactcgcaactggggagatgaccgatgggcctatgccgaagggcctgcagcagcagatgaactcccagatgctgcagctccagcagctgcagatccagcagcaggcgcccccacaacagacgcagcagcaaggccagcgacaacagccgcagaagtcggcgtaaagaccgtggctgagaggaggacgcggaagcgaattgagcattggccaaggccaactgaaggatgccgggtgggaaaagaaagaaccccaatcttttgccgtatatatatattatcagacaggttgtaggatagcagcaacagcagtagggcgggcgagggaccccgttggccccgcgcgatttgagttgttttcgccggataccgtaaccttagctggagtctgtcgtcgtcttggtgtcgtgcctgcctgcctagtgttgatgaggcgtcttggtagcgtcccttggaacgccctctcggagccggaggtgcttcttttgcttcttttgtctatatagataattatatgtgcatgggaacctgcgtagtactgcagttattattattatcattgttaatttattatatctatag

SEQ ID NO: 120502 - DNA, 3819 bp, Zea Mays
gaagacgaggactggcacgcggccgcgacggccggaaggacgcagcagccgccgccgccgctcacccacgacgacaaccgcagcttccttcggatgctgcgtgacatgaaagagaagctgggcgtggacgcgcccaaggtggaggtgcgcttcgagaggcttaccgtggaggcggacgtccgcgtcggccgccgcgccgtcccgacgctgctcaacgccgccatcaacgccgcccaggagttagcaacgtctgttcatatgtgtgttacaaggaaaagacctatcagaatcataaatgaagtaagcggggtgattcgaccatcaaggatgacactacttctaggagcacctggttccgggaagacgactctactaaaagcgttagcaggaaaattggattcttctttgaagttcaaaggaaaagtcatgtacaatggagaagaaattaattactcaacaccacagacacagtacctgcgtacttatgttagccagtatgatcttcaccatgctgagatgacagtaagagagacaatcgacttctcttccaagatgcttggaaccaataatgaatttgatatgctaggagaagcaataagaagaaaaaagggtgtcatcaatgaagtggatcaagatcttgattcattcattaagctcttctctcaggccaccacctttggagaaggaagcaacctcacaacaaactatattatcaagatacttggcctgtctgagtgtgctgataccctagtaggagacgagatgagaagaggaatatctggagggcaaaagaagagagccacagttggggagatgctagttggtctggcaagatgcttctttatggatgatatatcaacaggtcttgatagctccacggcatttgagatcatgaagtttctccaacagatggcccatttgatggatctcacaatggggcaaattgtgtatcatggtccccgagaaaatgctacggacttgttcgaaaccatgggattcaaatgccctgacaggaagaatgtagccgatttccttcaagaggtaacctctaagatggaccaaaagcaatactggactggtgaccaaaataagtatcagtaccatacaattgaaaattttgcagaatccttccgcacgtcatatcttcctcttctagtagaagacaaactgtgcagtccaaacaatactggaaagaataaggaggtaaaagtgaatgcaggtcgccgagtatccagatggaatattttcaaagcatgcttttcaagggaactgctgctgctgaaaagaaactctccggtccatatattcaagaccattcagataactgttatggctttggtgatctccacacttttcctgagaacaaaaatgagtcacaattctgtacttgatgccaacaagtacatgggagcactttttatggctgtcgtcatagtaaacttcaatgggatgactgaaattgcaatgacgataaagcggcttcccaccttctacaagcaaagagagctactagcattgccaggatgggcactcctttgttcagtttaccttattagcatcccaatatcgcttgttgagacaggcctttggacaggcttaacctactatgtgattggatatgcaccttctgctatcaggttcatccagcactttctggtactttttgccatgcatcaaatgtcaatgggcttgtatcgcttcttagcggccataggaaggacgcaagtgatggccaacatgctagggactgcagctcttattgcaatctacatacttggaggattcgtcatatcaaaagatgatctccaaccatggttgcgctggggatattggacgtccccgttcacctatgcacagaatgcgatcgccctcaatgagttccatgacaaaagatggaattcagaattttattataacggtgcaaacaccgtcggtgaagctatcctcaagatcagagggctgctcatggagtggcactggtactggatttgtgtcaccattttgtttggatactcgctggtcttcaacatcttcagcatatttgcattggagttcatcggctctccacacaagcatcaagttaacatcaagaccacaaaagtgaatttcgtgtacaataggcagatggctgaaaatggcaattcatcaaatgatcaagttatcctcccatttcgacccctctccctggtctttgatcatattcaatattttgttgacatgcctaaggtaatatcttgttcacttattaagatcttacctggtagcttcattaattcctatcacatactgaagacaagaatacaaatatcccaccaggagatgacaaaaaatggagcaacgaagaaaaagcttcagctgctacaagatgtcagtggtgcttttaggccaggagtactaacagctctgatggggataactggcgctggcaagacaacattgctcgatgtattagctggaaggaaaactgggggatatatcgaagggactattaagatagcaggctatcctaagaagcaggatacattctcaaggatctcaggttactgtgaacagagtgacattcattcccctaatctcactgtttatgagtcactgaaattttctgcatggcttcgtctaccttcaaatgttaaacctcatcaaagagacatgttcatcaaagaagtcatgaaccttattgagatcactgacttgaaaaatgccatggtaggcatcccaggagcaactggcctgtcagccgagcagcggaaaagactaacaatagctgtggagctagtggccagtccctccattatattcatggatgagccaaccaccggcttggatgctcgtgctgcagctattgtcatgagaacagtacgaaagacggttgacactggacgaactgttgtctgcacaattcatcaaccaagcattgagatttttgaatcttttgatgagcttctgcttatgaaaagaggtggccagctcatatacagtggttcggccataccaggcgttcctaaaataaacaagggacaaaacccagcaacatggatgttagacatcagttcacacataacagaatatgaaattggagtggactatgcagaaatttattgcaattcctccctgtacagcaaggatgagcaagacgtattaaacatacttggaatcgtatatggatcggcattgttcctgggtttcatgaattgcagcatcctacagccggttgtggcaatggagagagttgtgctctaccgtgaaaaggcggcaggcatgtactccaccatggcatacgctatcgctcaggtgtcggtggaattaccttacatgttggtgcaagtgatgatcttctcatcaatcgtgtacccaatgattgggttccaggtgacagcgagcaaattcttctggttcttcctataccaggtgatgagcttcatgtactacactctatacgggatgatgacggtggccctgacccccaacatcgagatcgccatggggctgtcgttcctcatctttatcttttggaacgtcttctctggcttcataatcgtgagagagatgatgcctgtgtggtggcggtgggtgtactgggcggatccggcggcatggacggtttatgggctaatgttctcacagctcgcagacaggacggagcagatcctggtgccggggctcggggagcagacggtgcgtgagttcctagaggggtacctgggcctgcaggatcgctactttgtgctggtgacctgcctccatcttgccatcattggcctcttcgtctttctcttcttcctcgccatcaagcacctaaacttccagcgcagtttttga

SEQ ID NO: 120503 - DNA, 2880 bp, Zea Mays
tgacttacaattctatgcatgagcataaaatgtcattgttctgcaatacacgtgcttttgcaaaataatgtaacaagttttctccaattggccactgaccaggtaacctctaagatggaccaaaagcaatactggactggtgaccaaaataagtatcagtaccatacaattgaaaattttgcagaatccttccgcacgtcatatcttcctcttctagtagaagacaaactgtgcagtccaaacaatactggaaagaataaggaggtaaaagtgaatgcaggtcgccgagtatccagatggaatattttcaaagcatgcttttcaagggaactgctgctgctgaaaagaaactctccggtccatatattcaagaccattcagataactgttatggctttggtgatctccacacttttcctgagaacaaaaatgagtcacaattctgtacttgatgccaacaagtacatgggagcactttttatggctgtcgtcatagtaaacttcaatgggatgactgaaattgcaatgacgataaagcggcttcccaccttctacaagcaaagagagctactagcattgccaggatgggcactcctttgttcagtttaccttattagcatcccaatatcgcttgttgagacaggcctttggacaggcttaacctactatgtgattggatatgcaccttctgctatcaggttcatccagcactttctggtactttttgccatgcatcaaatgtcaatgggcttgtatcgcttcttagcggccataggaaggacgcaagtgatggccaacatgctagggactgcagctcttattgcaatctacatacttggaggattcgtcatatcaaaagatgatctccaaccatggttgcgctggggatattggacgtccccgttcacctatgcacagaatgcgatcgccctcaatgagttccatgacaaaagatggaattcagaattttattataacggtgcaaacaccgtcggtgaagctatcctcaagatcagagggctgctcatggagtggcactggtactggatttgtgtcaccattttgtttggatactcgctggtcttcaacatcttcagcatatttgcattggagttcatcggctctccacacaagcatcaagttaacatcaagaccacaaaagtgaatttcgtgtacaataggcagatggctgaaaatggcaattcatcaaatgatcaagttatcctcccatttcgacccctctccctggtctttgatcatattcaatattttgttgacatgcctaaggtaatatcttgttcacttattaagatcttacctggtagcttcattaattcctatcacatactgaagacaagaatacaaatatcccaccaggagatgacaaaaaatggagcaacgaagaaaaagcttcagctgctacaagatgtcagtggtgcttttaggccaggagtactaacagctctgatggggataactggcgctggcaagacaacattgctcgatgtattagctggaaggaaaactgggggatatatcgaagggactattaagatagcaggctatcctaagaagcaggatacattctcaaggatctcaggttactgtgaacagagtgacattcattcccctaatctcactgtttatgagtcactgaaattttctgcatggcttcgtctaccttcaaatgttaaacctcatcaaagagacatgttcatcaaagaagtcatgaaccttattgagatcactgacttgaaaaatgccatggtaggcatcccaggagcaactggcctgtcagccgagcagcggaaaagactaacaatagctgtggagctagtggccagtccctccattatattcatggatgagccaaccaccggcttggatgctcgtgctgcagctattgtcatgagaacagtacgaaagacggttgacactggacgaactgttgtctgcacaattcatcaaccaagcattgagatttttgaatcttttgatgagcttctgcttatgaaaagaggtggccagctcatatacagtggttcggccataccaggcgttcctaaaataaacaagggacaaaacccagcaacatggatgttagacatcagttcacacataacagaatatgaaattggagtggactatgcagaaatttattgcaattcctccctgtacagcaaggatgagcaagacgtattaaacatacttggaatcgtatatggatcggcattgttcctgggtttcatgaattgcagcatcctacagccggttgtggcaatggagagagttgtgctctaccgtgaaaaggcggcaggcatgtactccaccatggcatacgctatcgctcaggtgtcggtggaattaccttacatgttggtgcaagtgatgatcttctcatcaatcgtgtacccaatgattgggttccaggtgacagcgagcaaattcttctggttcttcctataccaggtgatgagcttcatgtactacactctatacgggatgatgacggtggccctgacccccaacatcgagatcgccatggggctgtcgttcctcatctttatcttttggaacgtcttctctggcttcataatcgtgagagagatgatgcctgtgtggtggcggtgggtgtactgggcggatccggcggcatggacggtttatgggctaatgttctcacagctcgcagacaggacggagcagatcctggtgccggggctcggggagcagacggtgcgtgagttcctagaggggtacctgggcctgcaggatcgctactttgtgctggtgacctgcctccatcttgccatcattggcctcttcgtctttctcttcttcctcgccatcaagcacctaaacttccagcgcagtttttga

SEQ ID NO: 120504 - DNA, 1591 bp, Zea Mays
atgagcctcatcgaggcgccgtccccgtccccgtcgtcgtcgagcgggagcgatgactttgcggccttcctcgcctccgagctcgagctcgcctccggtgctgactccgccttccctggtgacccctcctccgttttccccgccaccgacgacgagggcgaggacgaggatccggaggagctagaggttgaagccatagaacaaaacggggataagcagatttgccccgatttgagcttattagggtttcgtgcttcatctgctggaggtgatgatgatgtcgaggacgacagtggcagcatagctgcttccatcggcctctacttcctccgaccgtcgctttctaggctttttatatgtcgttttctctcatacaaaatgagattgaggtataatatttccaaagggaagggatattcttttaccgctaaaagtgaccttgagatcagggagcttgcccgggctcaacacactaatcataggaccaagttgcatctgaggattttcttgaacaactcaaaagggaccggcatggtcactgagtatctgagcaaaatggagaaagaggttggtaagaagatgacactgaggtctcctcggaccattctaggaactcttctctttgccagtagaagaatttctcatcagcagttttacctgctacttgaagaggaaattgcctacacagggtcaagttttcttatctccaagaacaattgggttttattcaagcatgtttgggaggaaaacaaaattttactttctatgggaggatattgaagacatacagggaatacctcaatcaatatcatcatggagtccatccattataataactcttcacaaaggtagaggcatggatgcaaagcatggtgcaaagagcatggacaatggaaagcttaagttctgcttgcagtcttttgcatcatttagtgtggccaataggacaataatggcattatggaaggcaatatctctgagcatagagcttaaagtacagcttgctgaagaacaatcccaaattaacacccttcagagtgaggacagtggggtctttgttggtattgaggatgccaagagcctttagatgactgaagttttctcctcgaccatttcgaccaatatggcctcgcttatggaggtgtttgcaggaggatccttggaaatgaaggtaatggagaaagttggatgccagaagtactcggctacacagtgggaatcagataaacccaatgagtatcaacgacatatccattacaagttcagcaagaagctgtctcccgttggcggagaagtgacaggaacccagcagaaatctcttatgcctaataagaaaggatgggttatcgaagaggtgatggagctccaaggagtccttcttggcgacttctttacgctccacatcaagtaccaggtcgaggacctcgctcccaagcaaagagcaagcaatgtgcaggtctccctgggaatcgagtggtcgaagagcaccaggcaccagaagcggatcgagaagaacgccctttccagttcgtccgcgcgcctaaaggagatgttcaaccttgcgtcgagggagctctcgcacgccagatag

SEQ ID NO: 120505 - DNA, 853 bp, Zea Mays
atgtactaccacaccaggccagaggatagatttgatgcacatgcagccatcggcgatgatgaagcacgtgccttgatgatagtaacagctcttagatcctgtcagggaaccatttctgagcttgtacgtcattctaaggagttgatcaaccttgcagccgtggagttggaaaaaacaaagtctctacgagaacagatgatggagatcattgctatagctggttatataactgatgcgaagatgcatattgctcgagactatctagaaaagaatacaagacaggcttgtggcattaaggctgatcagttagataacttgaggtggaggccaagaaagaggagtagaagatctggctcaagaaagcagtcagatacaagcagtggaagcagcagcggggacatggacttgtccagccctggccctagtgggttttgtcaacttaatttagtgcccgacgaggagacatgcaagagcagtggagagcagccttttatgggcgtgcctgtgcaggtgcccaatcttgtgatgtccaggtgaaaaccgattctgcaccggttgaagatttacatattagcttctttctggagttacgccgaccttggcgggatgtggtttttgtgcatccccaggttatttttgccagcacaacctagatccaggtttctgcagttttttgaaggctcatcagctgtgatcagttagatgtgaagatgtctcaacaagaacaagtaatacagtttgtatgtattactgacttagataagttttcatatgttccctataatttctagggttgatagctttcttaacattttctaggaggaaaggctcagtttggtttctggttttagag

SEQ ID NO: 120506 - DNA, 2387 bp, Zea Mays
agggggcaggagaggccgcggccggccgggcggctcggccaactggaccccgctcgtcgctgtccgacccacatcagcaactcgccgaacgcaggcacaagaggttccatccatgaggcaaccatgctcgtgctcatcaacagatatttcaggagcaggaacagcccggcaggaggcggggacgagatggcgccggcggaccgcgaccacctgtgcctgcctggctgcgtgcccgtgcgcgccaagcgggccgcctccacggcggcggccacggtcaccaccacagcgagggcgtcgcggcacaacttcgtcaaggccgcggcgtcgggcctgctcgcgggggcgcactttaccaaccacgagtcgctgccgccgctgccggacgcctacgccgagttcgtcgcggcgttcccgcagtacgcccatggcgcgcttgcgcgggccgacgccatccggggcgaggagtaccagcacctggaccgccacgtgtgcctggactacaccggcatcaacctcttctcgcacgcccagatgaactcctccctgccatccacctcctccgcgccgccgccctcgtccgcctggcagccgcccttcttcgacatcgcgtacaagtccacgagcctgcgcacgcaggtgcaatgcggggacgccgcggcgggcggcatcggcgccgccgtcaccaggcgcatcatggcgtcgctcaagatccccgaggaggagtacgccatggtgtgcaccgccaacaggaccaccgcgtttcggctcctcgcggagtcctactcgttccagcccggcaagcagctgctccccgtgtacgactacgagagcgaggccgtgggcgccatggccgacagcgcgcgccgccggggcgccgaggtcacgtccgcgagcttcgcctggccgagcatgaggatccacggaaccgacctccgcaagaggctggccaggggctgccgccgtggcgcgggccgcgggctcttcgtcttcccgctcgcctcccgcatgacgggcgcccggtacccgtacctgtggatgagcgcggcgcacgagcagggctggcacgtcgcgctggacgcctgcgcgctcggcaccaaggacctcgacaccttcggactctccctcatccgccccgacttcatcgtctgcaacttcttcaaggtgttcggcgagaacccttccggcttcgcggggctcttcatcaagaagtccagcctcgccgcgctcgagcgctccgtgatcgcgcgcagcatcggcatcgtcagcatcgtgcccgcccgccgctggtcgctgcacgacggctactccaccgagctggagcactcgcggagcttccccaagctcgccgacccagccctggacgacggcgacgtcgagaccacgagctccttctccggcccgctcagctccaccgccgtcacccgcagcaggaccctgcagtctgacgcagcggagaacggcgacgccgatgccccggagatccgcgaggtcgacatcacgccagagaacggcttctacacgggggaacccagagcagagaacggacacgagacagagcagctggccaaggaggaggaagacaggcaggggggagagagcgtgatggaggtggagtgccggggactggaccacgctgacgcgctggggctcatcgccatcggcaaccggctccggtgcatcaccaactggctgctggtggccctgcagaagctgcggcacccgcacgccgacaacgggcaccaactggtgaagctgtacggcccgcgcgtcaaattcgaccggggcccgtcgctggcgttcaacgtgttcgactggaagggtgagcgggtgtcgccaatgctggtgcagaagctcgccgaccgtcacaacatctccctcacctgcggcttcctgtgcaacatctggttctcagacaagtacgaggccgagagaggcaccgtcctggagcacaggatcgccggcaattccgtttctgtgggcgccagagggaagaagagaaaggacgccggcggcgacgtggggattctcgtggtgaatgcgtcactgggtttcctcagcaacttcgaggacgcctacaggctgtgggcgtttgtggccaagttcctggacgccgactttgtggagaaggagaggtggaggtacaccgcgctgaaccagaagacggtcgaggtgtagacaactaggaagaggagaggacagcaatgctgattgcagccggtagcttcagctattggcatattggtacggttcggttcggttcactgtaaagcagcattctttggggatcagctcggccatccctttcagccattctttgggtgtaaactgcaaggtgcaaagagtaggttttgtttctggaataatgacatcatttggtatatgaaatc

SEQ ID NO: 120507 - DNA, 384 bp, Zea Mays
tagggaggggaattgaagtagttgttcgatatatttctcagcctgaaatcgttacggtgcctgcctgttcatagtatttaagtatcaactattacaaggttggacggcctattatgccacctagtcctctcctagaaacttggcattgggattcctgatgcgacgacccaactccaacccagccatgtccgacgacgacgcctgcttctcgacgcacggtacctagcgatgctgacaatccccctccataagaaggcgtttgtccccaagcggctgccgaaggaaaacgctggcgcagagcagcctcgtcctcccaagtatcaagggcagcatcataaccagaccagcgcactcgaacttattggtcgacgttgtggccgcccc

SEQ ID NO: 120508 - DNA, 1514 bp, Zea Mays
gccaaaaaagccgcgcaaatccacccaccagtccactaccccgcacgctataactgcaaccagcgtagcgtaggctcgcggcggccgccgacaactcgggcgggacacgggagacagccatggcgacgggcggccaggggaaggccgcgggctactaccagtacccgacatcgtacgccggtgctgcggacgaggagcgccggtggtggccgtggctcgtgcccaccgtgctcgtcgcctgcatcgcggtcttcgccgccgagatgttcgtcaacgactgcccgcgccacgggagcacgctcggcggcggcgccgggtgcgtggcggccggtctcctccgccggttctccttccagccgctccgcgagaacccgctcttcgggccttcctccgccaccttggagaagatgggagctctcaactgggccaaagtagttcatgagcaccaagggtggcgcctcattagctgtatctggctccatgctggcctagttcacttggttgtcaacatgctaagcttgctcttcattggaatccgccttgagcaacaatttgggtttgtgcgcattggtgtcatctacttgatatctggctttgggggcagtgtgttgtctgcacttttcttacacagtaactacgtctctgttggtgcctctggggctttgtttggcctccttggatctatgctttcagagcttattataaattggactatctattccaacaaggcagcggcaatcataactctactttttataattgtaattaatctggccattgggatattacctcatgctgataattttgcccacattggtggatttgcttctgggtttcttattggatttgtgctgctggcaagacctcaatttggttggatggaacgcagcgagctacctcagactagtcaacctccaaagtacaaatcgtaccagtatgtcttgtgggttgctgcactcctcttgctggtagttgggtttgccattatcttggtcatgctcttcacgggtaagaatgggaacgacagctgccactggtgccattacctgaactgcgtaccaacgtccagatggaagtgcgatacctgaattccgcaaagtatatgctccactggtgttcgtgtgttcgtggaaatgtacgaccaaatgtatcctccacttgaccatcctgcgcttcttttgcccggattctccctggttccatgaaatacaaatgttccagaattgtagcacgagcttgtaactgttgatttcggcataattgatgtattcatctcaccaaactctatagcaccaccttgataattttagacggccaatctaaagtattcagattttgcgagtgtccacgcactgacgatttcagccgaaagatcggtaaagttcaattgcatatgatggcactatgctgacggtttgtttgaagctctgaattgaggtgcatttggcctaatcctcttggtttcgaagataacataaacaaacttccaaattagacatgctcttctccggtgc

SEQ ID NO: 120509 - DNA, 483 bp, Zea Mays
attaaattggtgaaggtgaagcaggttccttacctgttcttcataggctataggaagtgcgtgctaggagaatgacatgtcagttggcttgaagctaaaaccagtcttccttaagccaatcacatatttcactggaaccgctaattgacggaaacttaaaacaaagaaaatgacaccaatccaaccaaaaagacaatactaccaaattggagttttcatataccagaatagaaacaatatcatgtcaattaaaggtgcactatctaggggaagagattgcttcaacttgtctgctttctcagcatcaaagacgtagagggtgtacaagtacttggatcaggagaccttgattttgacaacatccttgctcctcttgatcttcactgatcgggcatccttcctcctcacggtcagaaggaagtccttgatctcggattagacaaaacaaagagataggttgatacttgataatgaactacaaaa

SEQ ID NO: 120510 - DNA, 2681 bp, Zea Mays
ctccgcacaggactccaaccgcctcgccgttgcatcgccgcgggcgtcaacctaggctgctgccggtaccggtgcgtccccagccatggctcggccgccgcaggaggcgatcgacaccttcgtcagcatcaccggcgccgacgaggtcaccgcagtccgcgtgctcgaggaacatggtcatgatctaaatgaagctgtgaatgcttattttaatgaaggagataggaccaccaccagaatcaatcagaatcctgtgcctgccactgccagttatgatgacatgatggagctggatgaaccacttgatcccatgttcaacagacctttgttccctagaactttgggcaacccttttgcccttttggatccaggttttgctgacataactgctggtgatatatttggacgtggaccccgagttacacaacctagggacgtgaggcagatacctattgaagttaaggacagcaatactcaaacaggcagttctggtcagggtcccattattgaggatgttactggacgtgaatctttctatggtccagaggtccatgggaccgttatagttgacgaagatgatgaagacttgccattaacactatctgctcaggatcctaagatcccaagcagtgctttgcacccaaaccatttcatgcctagtgcgcctccagtggttgatgttagtgaccataacaatgatatagaagaggagatgattaaggcagcaattgaagcttcaaaaagggaagctgacgggatgaaaaatgttctaagtagtggtcaatctgaaaacatgtcacgtggcagaggtgatcatgagcttgctcgggcggtttctttgtccttggaggtagccttttaacttctaagatgtagctatgtatttttgttcatatacctatacctgcaatgtgttttttatgtggctatcagacagcagagcgagagagagctctgcgccaagagggaatgtatgtagcagatcactctcctgacttatctgataaagaaggcggtcaaggaggaagtgggataagcgaaaggtgaagtcacatttccaaatgggtagaacagtggtagtgtgtggattattacttatttataatcaattaatggctcaatttctgttcccctatcatttgtttttttgtatggtttcatttgcatggaagccatgcatcgtgtgggatatgatattgtttccctgtttgtgtgggtcacttctcatgcaatgttttagcgagcttttcctaacctttgtaagtataatctgtgtctaattggaatatacttggtagcagctgattcctcatacatgtccattcttattgtaggcgaggactaactacaggagaagtgggaacttctgagcaaacagtagatgaagagaacttccaagaggacaatgaagatggtgaagaacaacctttagttaggactcgttctaggcgacttcgaggcagaactattgagccagcagaaactgttcaaagggctgacagcccgccctcaagtccccaacctcatgttcaaattggtcatcagcgtaatgtggggtttccttcagtagagtggggtggtatttcttctgaagagcgtgatgaagctcttatgcttgaggctgcaatgtttggtgggattcctgaaggagcaccatatccattttccttcccagcccatggcaggtcgactcactatcccctagtagcacgtcctccatcaccatcattaacggcacagcggttgttaagggagcagcaggtactgagcagtattcatctgctggagagtagtacaactactgtatatgactagcaatatttcaattgcaggatgatgagtatcttgctgctctccaagctgatcgagaaaaagagttgaaggctgtgcaggaggctgaacttcgcagggtagaggaagctgcagcaagagaggctgctcttgaacgtcaaaagaaagaagaggaggagaagctaaagaaacaacgtgaggaagaggagttggaatccaagcttgcagccaaacaagcatcactacctaaggagccactacaaaatgacgagggggctgtcacagtggtagtccgcatgcctgatggtagtcgtcgaggacggcgctttctcaaatctgacaggcttcagtatctttttgatttcatagacatcagccggactttcaaaccaggaacttatagactggcgaggtcttatcccaggcgtgccttcactgaattggagagccagatgtcactgagcgatctcggtctcactagcaagcaggaagctctgttcctagaaaaactgtctgcgtagagtacaaggttctggagttatggtcgagtagtatatgcacttataaaatcggtcatttagatcgtgcctggcgtgtgttcatgaaaatactgcagcggttgaatgattactgatctctagagatcccgtcgccatcttctgtgctctgaaacggaggtgtttcgatctgactgtgcagatgggcagttctacattcagatttcagaacaactgtagctcttgcggttttaagacttgagtatggtttactttggagatagtggtttagaccatccgtgttggtctcctgagcggtattcttacgtgatcacgtgtcaaaacgaacagaatcctttgttgcagtcattatagttaaccgtctcgctggaa

SEQ ID NO: 120511 - DNA, 2451 bp, Zea Mays
gcctatctgatccagcgaccagcgtggcagcacgccagcgttcgcgaggcggcgagggcacctgtgtcatttccggcgtctgtcgttctcgcgcggcccaccggtgatggcccacggcccgcgagaggggaggaggagagcaataagcaagcaccacatcgccaccacttgaattaccgcacacggctccgctgcttcgcgactcctctccggctctccgcacaggactccaaccgcctcgccgttgcatcgccgcgggcgtcaacctaggctgctgccggtaccggtgcgtccccagccatggctcggccgccgcaggaggcgatcgacaccttcgtcagcatcaccggcgccgacgaggtcaccgcagtccgcgtgctcgaggaacatggtcatgatctaaatgaagctgtgaatgcttattttaatgaaggagataggaccaccaccagaatcaatcagaatcctgtgcctgccactgccagttatgatgacatgatggagctggatgaaccacttgatcccatgttcaacagacctttgttccctagaactttgggcaacccttttgcccttttggatccaggttttgctgacataactgctggtgatatatttggacgtggaccccgagttacacaacctagggacgtgaggcagatacctattgaagttaaggacagcaatactcaaacaggcagttctggtcagggtcccattattgaggatgttactggacgtgaatctttctatggtccagaggtccatgggaccgttatagttgacgaagatgatgaagacttgccattaacactatctgctcaggatcctaagatcccaagcagtgctttgcacccaaaccatttcatgcctagtgcgcctccagtggttgatgttagtgaccataacaatgatatagaagaggagatgattaaggcagcaattgaagcttcaaaaagggaagctgacgggatgaaaaatgttctaagtagtggtcaatctgaaaacatgtcacgtggcagaggtgatcatgagcttgctcgggcggtttctttgtccttggagacagcagagcgagagagagctctgcgccaagagggaatgtatgtagcagatcactctcctgacttatctgataaagaaggcggtcaaggaggaagtgggataagcgaaaggcgaggactaactacaggagaagtgggaacttctgagcaaacagtagatgaagagaacttccaagaggacaatgaagatggtgaagaacaacctttagttaggactcgttctaggcgacttcgaggcagaactattgagccagcagaaactgttcaaagggctgacagcccgccctcaagtccccaacctcatgttcaaattggtcatcagcgtaatgtggggtttccttcagtagagtggggtggtatttcttctgaagagcgtgatgaagctcttatgcttgaggctgcaatgtttggtgggattcctgaaggagcaccatatccattttccttcccagcccatggcaggtcgactcactatcccctagtagcacgtcctccatcaccatcattaacggcacagcggttgttaagggagcagcaggatgatgagtatcttgctgctctccaagctgatcgagaaaaagagttgaaggctgtgcaggaggctgaacttcgcagggtagaggaagctgcagcaagagaggctgctcttgaacgtcaaaagaaagaagaggaggagaagctaaagaaacaacgtgaggaagaggagttggaatccaagcttgcagccaaacaagcatcactacctaaggagccactacaaaatgacgagggggctgtcacagtggtagtccgcatgcctgatggtagtcgtcgaggacggcgctttctcaaatctgacaggcttcagtatctttttgatttcatagacatcagccggactttcaaaccaggaacttatagactggcgaggtcttatcccaggcgtgccttcactgaattggagagccagatgtcactgagcgatctcggtctcactagcaagcaggaagctctgttcctagaaaaactgtctgcgtagagtacaaggttctggagttatggtcgagtagtatatgcacttataaaatcggtcatttagatcgtgcctggcgtgtgttcatgaaaatactgcagcggttgaatgattactgatctctagagatcccgtcgccatcttctgtgctctgaaacggaggtgtttcgatctgactgtgcagatgggcagttctacattcagatttcagaacaactgtagctcttgcggttttaagacttgagtatggtttactttggagatagtggtttagaccatccgtgttggtctcctgagcggtattcttacgtgatcacgtgtcaaaacgaacagaatcctttgttgcagtcattatagttaaccgtctcgctggaa

SEQ ID NO: 120512 - DNA, 2389 bp, Zea Mays
gcctatctgatccagcgaccagcgtggcagcacgccagcgttcgcgaggcggcgagggcacctgtgtcatttccggcgtctgtcgttctcgcgcggcccaccggtgatggcccacggcccgcgagaggggaggaggagagcaataagcaagcaccacatcgccaccacttgaattaccgcacacggctccgctgcttcgcgactcctctccggctctccgcacaggactccaaccgcctcgccgttgcatcgccgcgggcgtcaacctaggctgctgccggtaccggtgcgtccccagccatggctcggccgccgcaggaggcgatcgacaccttcgtcagcatcaccggcgccgacgaggtcaccgcagtccgcgtgctcgagcaccagaatcaatcagaatcctgtgcctgccactgccagttatgatgacatgatggagctggatgaaccacttgatcccatgttcaacagacctttgttccctagaactttgggcaacccttttgcccttttggatccaggttttgctgacataactgctggtgatatatttggacgtggaccccgagttacacaacctagggacgtgaggcagatacctattgaagttaaggacagcaatactcaaacaggcagttctggtcagggtcccattattgaggatgttactggacgtgaatctttctatggtccagaggtccatgggaccgttatagttgacgaagatgatgaagacttgccattaacactatctgctcaggatcctaagatcccaagcagtgctttgcacccaaaccatttcatgcctagtgcgcctccagtggttgatgttagtgaccataacaatgatatagaagaggagatgattaaggcagcaattgaagcttcaaaaagggaagctgacgggatgaaaaatgttctaagtagtggtcaatctgaaaacatgtcacgtggcagaggtgatcatgagcttgctcgggcggtttctttgtccttggagacagcagagcgagagagagctctgcgccaagagggaatgtatgtagcagatcactctcctgacttatctgataaagaaggcggtcaaggaggaagtgggataagcgaaaggcgaggactaactacaggagaagtgggaacttctgagcaaacagtagatgaagagaacttccaagaggacaatgaagatggtgaagaacaacctttagttaggactcgttctaggcgacttcgaggcagaactattgagccagcagaaactgttcaaagggctgacagcccgccctcaagtccccaacctcatgttcaaattggtcatcagcgtaatgtggggtttccttcagtagagtggggtggtatttcttctgaagagcgtgatgaagctcttatgcttgaggctgcaatgtttggtgggattcctgaaggagcaccatatccattttccttcccagcccatggcaggtcgactcactatcccctagtagcacgtcctccatcaccatcattaacggcacagcggttgttaagggagcagcaggatgatgagtatcttgctgctctccaagctgatcgagaaaaagagttgaaggctgtgcaggaggctgaacttcgcagggtagaggaagctgcagcaagagaggctgctcttgaacgtcaaaagaaagaagaggaggagaagctaaagaaacaacgtgaggaagaggagttggaatccaagcttgcagccaaacaagcatcactacctaaggagccactacaaaatgacgagggggctgtcacagtggtagtccgcatgcctgatggtagtcgtcgaggacggcgctttctcaaatctgacaggcttcagtatctttttgatttcatagacatcagccggactttcaaaccaggaacttatagactggcgaggtcttatcccaggcgtgccttcactgaattggagagccagatgtcactgagcgatctcggtctcactagcaagcaggaagctctgttcctagaaaaactgtctgcgtagagtacaaggttctggagttatggtcgagtagtatatgcacttataaaatcggtcatttagatcgtgcctggcgtgtgttcatgaaaatactgcagcggttgaatgattactgatctctagagatcccgtcgccatcttctgtgctctgaaacggaggtgtttcgatctgactgtgcagatgggcagttctacattcagatttcagaacaactgtagctcttgcggttttaagacttgagtatggtttactttggagatagtggtttagaccatccgtgttggtctcctgagcggtattcttacgtgatcacgtgtcaaaacgaacagaatcctttgttgcagtcattatagttaaccgtctcgctggaa

SEQ ID NO: 120513 - DNA, 2825 bp, Zea Mays
gcctatctgatccagcgaccagcgtggcagcacgccagcgttcgcgaggcggcgagggcacctgtgtcatttccggcgtctgtcgttctcgcgcggcccaccggtgatggcccacggcccgcgagaggggaggaggagagcaataagcaagcaccacatcgccaccacttgaattaccgcacacggctccgctgcttcgcgactcctctccggctctccgcacaggactccaaccgcctcgccgttgcatcgccgcgggcgtcaacctaggctgctgccggtaccggtgcgtccccagccatggctcggccgccgcaggaggcgatcgacaccttcgtcagcatcaccggcgccgacgaggtcaccgcagtccgcgtgctcgaggaacatggtcatgatctaaatgaagctgtgaatgcttattttaatgaaggagataggaccaccaccagaatcaatcagaatcctgtgcctgccactgccagttatgatgacatgatggagctggatgaaccacttgatcccatgttcaacagacctttgttccctagaactttgggcaacccttttgcccttttggatccaggttttgctgacataactgctggtgatatatttggacgtggaccccgagttacacaacctagggacgtgaggcagatacctattgaagttaaggacagcaatactcaaacaggcagttctggtcagggtcccattattgaggatgttactggacgtgaatctttctatggtccagaggtccatgggaccgttatagttgacgaagatgatgaagacttgccattaacactatctgctcaggatcctaagatcccaagcagtgctttgcacccaaaccatttcatgcctagtgcgcctccagtggttgatgttagtgaccataacaatgatatagaagaggagatgattaaggcagcaattgaagcttcaaaaagggaagctgacgggatgaaaaatgttctaagtagtggtcaatctgaaaacatgtcacgtggcagaggtgatcatgagcttgctcgggcggtttctttgtccttggaggtagccttttaacttctaagatgtagctatgtatttttgttcatatacctatacctgcaatgtgttttttatgtggctatcagacagcagagcgagagagagctctgcgccaagagggaatgtatgtagcagatcactctcctgacttatctgataaagaaggcggtcaaggaggaagtgggataagcgaaaggtgaagtcacatttccaaatgggtagaacagtggtagtgtgtggattattacttatttataatcaattaatggctcaatttctgttcccctatcatttgtttttttgtatggtttcatttgcatggaagccatgcatcgtgtgggatatgatattgtttccctgtttgtgtgggtcacttctcatgcaatgttttagcgagcttttcctaacctttgtaagtataatctgtgtctaattggaatatacttggtagcagctgattcctcatacatgtccattcttattgtaggcgaggactaactacaggagaagtgggaacttctgagcaaacagtagatgaagagaacttccaagaggacaatgaagatggtgaagaacaacctttagttaggactcgttctaggcgacttcgaggcagaactattgagccagcagaaactgttcaaagggctgacagcccgccctcaagtccccaacctcatgttcaaattggtcatcagcgtaatgtggggtttccttcagtagagtggggtggtatttcttctgaagagcgtgatgaagctcttatgcttgaggctgcaatgtttggtgggattcctgaaggagcaccatatccattttccttcccagcccatggcaggtcgactcactatcccctagtagcacgtcctccatcaccatcattaacggcacagcggttgttaagggagcagcaggatgatgagtatcttgctgctctccaagctgatcgagaaaaagagttgaaggctgtgcaggaggctgaacttcgcagggtagaggaagctgcagcaagagaggctgctcttgaacgtcaaaagaaagaagaggaggagaagctaaagaaacaacgtgaggaagaggagttggaatccaagcttgcagccaaacaagcatcactacctaaggagccactacaaaatgacgagggggctgtcacagtggtagtccgcatgcctgatggtagtcgtcgaggacggcgctttctcaaatctgacaggcttcagtatctttttgatttcatagacatcagccggactttcaaaccaggaacttatagactggcgaggtcttatcccaggcgtgccttcactgaattggagagccagatgtcactgagcgatctcggtctcactagcaagcaggaagctctgttcctagaaaaactgtctgcgtagagtacaaggttctggagttatggtcgagtagtatatgcacttataaaatcggtcatttagatcgtgcctggcgtgtgttcatgaaaatactgcagcggttgaatgattactgatctctagagatcccgtcgccatcttctgtgctctgaaacggaggtgtttcgatctgactgtgcagatgggcagttctacattcagatttcagaacaactgtagctcttgcggttttaagacttgagtatggtttactttggagatagtggtttagaccatccgtgttggtctcctgagcggtattcttacgtgatcacgtgtcaaaacgaacagaatcctttgttgcagtcattatagttaaccgtctcgctggaa

SEQ ID NO: 120514 - DNA, 372 bp, Zea Mays
atggaaacacttcttattcctctcccctcctgccatccattgcagcacgcgtgccaggtccctgcttcaagcggctcagttggcttgggcgaggtggcaccggccgggcaggctgttgatgatgcccatggtgctgcaggcgcactcgtgcgacacggcgctcagcgcgctgcagcagtccgcgctggggtccggcgcgccgggcaccaggtacgcgcggcacgccaggaggcggttcagctgcggcaggcactgcccgccggcctgcgccccggcgccgcgcagcaccgacgacgggccggtgccgccgccgaggaccagcaggacgaggcacgcggcgaggagtgcgcggggggcggtggctgcttctag

SEQ ID NO: 120515 - DNA, 219 bp, Zea Mays
atggaagccttttgcagtctcatcccacctgctcgccatttcttgaaaccagtcatcgattctctggcagattcaaacacccgagtttcttcttttgtaaggcgtggaacgaacttgggcactgtcatcatggaagaactgtgggacttacttagaacctctttgtacctactggtgaatgcatatcgcaagaacaggccaatgctcttgtcactcacc

SEQ ID NO: 120516 - DNA, 258 bp, Zea Mays
atgtcctccgcctcgtgcctcgtccatcccgctccaaggttccgggtttggctcctgcctctcccctcctccatcgccgtgaggccgttgcttggcttcaggcctcggtgtggggctccagcgaagagctctggtggtgcagaggtgaaaaaggaagaggtgagtagcttaaacggggagcaggagcagaatttgaaggacgacgattggttcctgcaactgcagaaggcaagtctgatttgcttgaattgtttgtaa

SEQ ID NO: 120517 - DNA, 696 bp, Zea Mays
atgaccaagtcgaagggtggttcggtggacgcgcgcacgctggtggcgcacgtcctggcagcgagcgccgtcgtgctggtgctcctgtggtgcatccacttccgcggcggcctcgccctccgctcccaggacaagccgctcatcttcaacgtccaccccgtgctcatggtcctcggccccatcgtcctcggcggagaagccatcctcagctaccgctctctcccgctcgcccgcgacgccaggaagaaggtgcacctggcgctgcacgccgcgggcctcgctgcgggcgtcctcggcgtctacgccgtcttcaagttccacgtcgagagcggcatcccaaacctctactcgctgcactcctgggtcggcatcgccgccatcaccctctacggcctccagtggaccgccgggttcctcgcctacttcttcccgggcgcctcccccgccaccaggcgcagaacgctgccgtggcacgccgtcttcggcctcctcgtcttcgtgctcgccgtcggcaccgcgcagctgggcttcctcgagaagctcaccttcatgcagggcccgccactgcgcctgcccaagtacggcgcagaggcgctgctcgtcaacttcacctccgtcaccgtgctcctcctcggcgtcgccgtcgtgcttgccatcgtcgatattgacgggacccggtacaacaccatcatctga

SEQ ID NO: 120518 - DNA, 1240 bp, Zea Mays
cgatctcctctccctgcctggacatccatcaatcctcatcgccacccaacccgccgagtccccaagcaagttgagcatccatccatccatggcgggaggcaagtccaccggcaatgccgcgcgcagcaggaagcgcgtcgaggcaaccgtcctcaagcgctccagggacgggagcgccttcaccagatgcgaggcctgcaacaaggatgtccccgtcgtcctcatcgacatgcacagctgcagcctcgacgagaagatcaggatgacgctcgaggcgcaggtcgtcgagaagaccgtcgaggtcgccagtgcggaccgcaagaagtcctccgccaagggaggtggtaacaaggacgccaagcgcaagcgctcgcccaccgccttcttcctcttcatggacgacttcaggaaggagttcaaggccacccatcctgacaacaagagtgtcgccaccgttgcaaaggaaggaggggagaggtggaagtccatgacagacgaggagaagaagccttacattgaaaaggccgcggagctcaaggctgaggccgagaatggcgagggcagtggtgagaacaatgttgccactaagaaagccaagacagatgaccaggaggtggatcagccagcaaagaagctcagaaagtgcaaggctcttcacgaggacgaggatgacgatggtgaccaggaagacgaggatgagaagaacgagttggatgacgacatgtagatggcagaggccactctcccatctctgtaaatggatggcagatgtgagcgtctagttagaaatgtcacttgtttcaagctagagggaagaggaagatagtcagtagtgaatatcccccgttatcgttgctacatgaatgaactattctatgatgcagttctgtctgctttcatctccatccaacacatgtactcaatgcccttttcttttctggattttctatattacatccattgctcctgcccctagaattgaaggttggttcatgtttggtggaagactaaaaaggacaaaggaaggaggcgttgtatcagtagcaccgttgcctagttacattagcatcaccatcagcatcaaccaaacagtacaatagctgcatttcacaaacatattatcggaatacttaatggtcctagttttacaatacttgcctagattattagaatcctcggatctgtactttaccggacggtcaccaaaatacttagcttaacatactagtaaaatatgaaa

SEQ ID NO: 120519 - DNA, 863 bp, Zea Mays
cattccattccattccatcttttgcttcatcccacccaatttattctgctaatcttttttttttctgttgattgaaggttgcaaaggaaggaggggagaggtggaagtccatgacagacgaggagaagaagccttacattgaaaaggccgcggagctcaaggctgaggccgagaatggcgagggcagtggtgagaacaatgttgccactaagaaagccaagacagatgaccaggaggtggatcagccagcaaagaagctcagaaagtgcaaggctcttcacgaggacgaggatgacgatggtgaccaggaagacgaggatgagaagaacgagttggatgacgacatgtagatggcagaggccactctcccatctctgtaaatggatggcagatgtgagcgtctagttagaaatgtcacttgtttcaagctagagggaagaggaagatagtcagtagtgaatatcccccgttatcgttgctacatgaatgaactattctatgatgcagttctgtctgctttcatctccatccaacacatgtactcaatgcccttttcttttctggattttctatattacatccattgctcctgcccctagaattgaaggttggttcatgtttggtggaagactaaaaaggacaaaggaaggaggcgttgtatcagtagcaccgttgcctagttacattagcatcaccatcagcatcaaccaaacagtacaatagctgcatttcacaaacatattatcggaatacttaatggtcctagttttacaatacttgcctagattattagaatcctcggatctgtactttaccggacggtcaccaaaatacttagcttaacatactagtaaaatatgaaa

SEQ ID NO: 120520 - DNA, 1794 bp, Zea Mays
cttggcccttggcctcctttcgtcgagagagagagagctgtgctggctgctgctgccccgggtccgtcgggacgggtagatgaggaggaagagaacagctcgtgactgactgactccctccctcagcgtgagtgggttgcggacgaccacatccatccgttcccaccattcccttctcccacctcgcctcctccccttgcccttgcccttccacagccggaatcagggggtaatgggccagatgggaggacccgacggcgacggcgacggcggcgcgggcccgcaccaccagtaccactaccaggcgcttctcgccgccgtgcagaaccccagccagggcctgcacccctttcccctccccttccacgtgcctctgcacgcaggagcgggagcacccgccgccggaccaggacctggagctgatgctgatgcctccacacacaatgccaatgccgctcaccactctcaacctccaagaggtttcaccgattggagcgcgtccaacagtgccttcgccgccgttgcctcacagcccgcacctgctaccaccaatacacccttccattacaacctctcccagtcttatgccctatggacccattacatgcttaacaagaatgtatcctactctacttaccctacaccacatgaggagcatccccacccattgcgccatacccacatccaggagaatccccacccattgcgccatacccacatcccggataaggattcaggttgtgcatctagccttggatttgactctttcactacaatgtcccttggaccaaatatttgttcccacatgacgcccatggaaggatctatatctgccaaagaacccgagaattcagaggatttgcctgcaatagttaggagcagtgatgaaatggacactagaaacagtggcaaagttcatcgtgacacagttggcactcttcctgagtcgaagcagagccatgaaagttgtgcttccgtgaataataagttcaactctggagagtaccaagtcattttgcgcaaggagttgacaaagagtgatgtcgcaaattccggacgaattgtgcttcccaagaaggatgctgaggctggtcttccaccattggtgcaaggggatcctctgatactgcagatggatgacatggtgcttccaattatatggaaatttaagtatagattttggccaaacaacaaaagcagaatgtatatcttggaagctgcaggtgaattcgtgaagacacatggccttcaggcaggggatgcgctcattatctacaaaaactccgtgcctggcaaatttattatccgtggggagaagtccattcagcagacaaacccctagacacaatttgatgtgactgtgcaccatcagatatggcgtccgaggatacaccatatgttcacgttccagttgttatcgacttttctaatgtctcaccgtcacactgagataagtcgaaaaaggagatacaccgtgtggatggagaaaaggagaagaaattttgggagacattggaagtgctgccagtgagcctacgtctaagctcagaacaaatggtttatgttttttcccctaattcggtcgtatttggatgcttgagtcctgcattgcatgatgaagaacattctcagtctctctttttttgtaaatattttaattcaggatctataaggtaaaggaagtggtttggaagcagatttctgattcagcgttctcttgtctcattcattttaccaacatttttgttaaatttgtgattgtgctatgctcgtagggcgtatgtctattgtccc

SEQ ID NO: 120521 - DNA, 4873 bp, Zea Mays
ccgccgccgccaatgcctcccggcggtaggcgcggcgccaagcagcgctccaactggaccagggaaccccagctaggcgaccttgtcctcgccaagatcaagggatacccgtcctggccagctaagatcagcaagcccgaggactggaaacgtaagccaacgccaaaaaagttcttcgtctgcttctacggcaccggggagattgcctttgtacctctggcagatcttgaggaatttactgagaagaaaaagaacgatctgttagatcgagctcttaaagttcaaagaaaatatgttcaacaatttaatgttgctgtggagcagatctgcaaggcttataatgaattgccaaaaacatctgaagccgcaaatgtagcattgcctgatcagagtgaaaagactacagagcacctggtgaggtcacctgatattggtgggactccaggactgggacaaatggaagatgatccccctactgattgctcaagtacttcagggcaagggtcagggaccgaggaggatgtcaaagatggtggtcatgaaataggtgataattctttggcagttcctcaaaagaaagcatctttacaacaggatcctaagcatcccaagacaaagaagtctgctgcatcaaagtctggttttgacatgtacacagaacaggagcattcaccaacatctctgcgggcagaaaggcagattgaagaggtgaaaattgaagaagagagctgtcatctagaaggttttgttttggaacctaacttggaggtggtttgcgcccttgaagtgccaaagaattttaaatccaacaagctgttgaggaatgctgaaagtaaggaaaatgagcatgttggtgttggtagtcctactggaaggattgctgttgaggccgcatctgatgttgtattaaacatgagtgctgaagaagagagcagagaatttaagaagtcaaaaatcatgacaaaacaatcactgactactggttcagagaaaagggataataaaattgtccatggaaagcctgacaagcaattgactggaaaatcatctgcagggttttctctcaatcagaaatctctgacaggtagcgggcagcacaagatggacagtagtgctgatacacgtccggcaaagaaggcaagacttatggacagggctggtgaaacagataagacagttgccaagagtgagacgaagttaaacatcaattatgaaaatcataatgctgtgaaacatgagcaatctactgctgtggaaacatgtaaaaacacaattcttaagactggtatcggtgatgatagggcacggaagtcaggtggtgctgtatcacccatatcaaagcttcattctgagatcatggaaccagcatctggttcttctgtaactcagtctactgttgctgattctcttaaaaagggttccagcaggaaggaggatgtctcacgtgttgataggaaattggttaaacctaagagaagagcgtgtcgttttgatgatgacgaggatgaaggacagcaaacaccacttcatagaacttctgccaaatctctctctacgcatatagtcccaactgagaaaccaggtagtcggggaaattttgcttcgcatgttggcaacgcttctggaaaaaaaccaggccctgccagagaagagaaatcaagaagtgttaggatgtcacctgtgaagcatgagccagttttttcttcaccgagtcaggataaagtgcatgctagacaccagttaatggggagaaatctgatcacagggtcggttgagactcctgtcattggtaacaaaatgagcctggttgatggcaaatcctctgctcaagtaaaaatgccggcatgctctgaggtgaagaaacttcatagtacttctaaaccattgcaagtaacatctgggaaatcccattcccgaaactatcctgcttcagaaaagatcgccttggtgcccaagtcagaagaaacaaaggctaaatctaaaccagctacatctgttgagcataaggtggccaccactttgtcaactgaacggactgggaagcgggaccacctgaaagaggaaagatcaagttctgttgataaagcagcttattctgaacctaaccctgactcggccaagtcaataaaacatcttattgcagctgcccaagcaaggaggaaccttatggcttctgctcttgcaaaatttgatgggtcttcgactgataatagtgctattacctctacatcatatggtttgccaagactaagccctagtcctgtttttcgcattccatccccacctagaattgcttttcctgagagtcctggtcaacgtattctgaaaagcccaatggagcttgataatggtcatggaaagagtcccaaatctaggcaggccagcggttcacctagtggtggttctgatgcagcaattgctcgtgatgctttggagggaatgatagagactttatcaaggacaaaggatagtataggccgtgcaacacgccatgcaattgagtgctctaaatatggcattgctggagagattgtcgagcttctcatacagaaattggagaacgagcataatttgcatcgcagaattgacctcctttttcttgtggattccataacacaatgttcccattctcatagaggagttgccggggcttcatatgttcccactgttcaagcggcattgcctcgtcttttcggtgctgctgctccacctggagctggtgctcgtgaaaaccggcgccagtgccttaaagttttaagattgtggcttgagagaaagattatgccagaagacatactccgaaagtacatgggtgacattgaggtgccaaatgatgatactagcactagtttaatgttaaagcgaccatcccgttctgaacgttctgtagatgatcctattagggagatggatgacatgcttgttgatgaatatggaagcaatgcaacttttgagctttctggaattttatcatcaaaagtgtttgaagatgatgaagacttccctcaaaacaatgggtcatcatcatttgtttcacggcctgttgaaggtggtgtcatacatgaaactgaagataatattgctccagcatctgttgaggaacacattattagagtagaacatgtagctactgatgctgctatggaagatgctttagagttacttggcaacaaccaacagactcatggagctgtcattattgaacatgactctagtcaaggtccaggttcagagcaggcattgatcgcccagaatgagcttccccctctacctgatggccctccaccacttccatcagattcaccaccacctccacctcctttgcctccttcaccaccacccgctacaccgccaccaccacctccactctctccagcttcaccacttccgccaccacctcccccactaccatctggaccacctcctcagcctgcaccaccacctctgccaacccaggacccacctcttccttctattccgctgcctgtttcttcatctccgttgtcattgggttatcagcctccagcgccagagtacttcatgacgcccaatggtaatcaattggcccagatgacagtaaacacatcaattcaagctattggaaatacaacaaccttcattcctggtggaccagttaatggacaagctgcagttaattttgttacttcaatgccggcagaatttggaaatactagcgtatttatggcgcaagcttctaatggtaattaccagtttcggccaactggtgtaccttttcagcaagggaatttcagtgcctttccatctgcacaaacacctccagttcatccccattctcgtatggcacacatgaatcccatgggccaacaagctgttgcacctccacacaatccttatgctgcacagtcctttccaaacagtcagagccattatccatctgaagaacattggcggatggcatctggtaacttcagtccagatgaccagcataattggatagcaagtggcagatcattaccttgctcagaagggccatttgtgcatgatggatattcaagatcaaacattgacagatcttcaatgaatcctatgaatcatcaacatactgttctgaatcatttgccatctggagcaccactaccaggccatatttctcagatgctaccagccaggtctgatatgcacactcttaattgctggaggccctcttgatagagttgtaaactgaacttcttgtttgtgattttgacatggaaagctcagggcattggaggcaatttgaattgagttcaacaactggtggctgttagtctgagatggagatgcacttgccagggtttaacgatgagatctgtcatagtatgtggaatggacattttacaatgtaactagtcctgacaacagtatccagcagacaatctctcttagtgtgagctcatcttttcacatgacgcaaatgtcctccagttttttagatgttgcttccagtatggatcaggacagcgaactgttcctatgctatggtagtaaatatcttgtgcagatacattaattataaatagaggtctggtagtaaataccaggaactggtatcatcaaggcattttgtcacggtgcctatgctatggttcgcttttttctcttaactgttgtgctcaatttgcgaaattcatttcaaatttcagttagctaatcacatatattctcaacaaccgtattttatgtttggtgtttagactagaattgtgcttagacaacatgtacatcactgagtttagatttaagagcggaagttagttttgattctgttaggacggcgaaatatgtgctgatatttaagagctctagtttattcttgtttccaaagactgctgatagcgttggttttctaagc

SEQ ID NO: 120522 - DNA, 1536 bp, Zea Mays
cttcagagtctggtgaatcaacagatattacaataggagctcttcccatgcagaaaagaagattgcaggatttagttcgaactgatgatgccagtgaaactatttctgggcgatcatcaccttgttctgagtcatcgacaactgaattaattgctggacatagtacagattcatctattgaagggaaccatggctgtcaagggctctgtaactctagaacacatctagcccagatgctcagggttgtaaacgatgcctgtaaagttcaggttggtgcagatgttctccttgctgctggttatccaatttctgatcttgagaaatttatatgctctgcaactcccgttattggtcgtgcaccttgcatgataagcaacacttgttcattggaccaagtagttagtgactcagtttgtcagcatgacatctctaatgtttccttgaggagaatatgggagtggtatgaagagccagggtgctatggattggaagtaaaagctcttagcaatctcagctctaaaacatccagcagcagcagttcagagttctttgcatactttgtgccttatctatctgctattcagttgtttgggttgtctaggaataacatgcatcacagttttggtgtgcaagggagggaattactgatatcatcaaatactgcaagctctatgagctctcatcctgtgcatgcaaaagcgcatacactgcttgaggaaagtaatgcatgcttgccagagtcatctttagttgtagaagatcctggagaactcatatttgagtactttgaaacagagcaaccttctctccggcctccattatttgaaaagatcaaggagcttgttagcagtgcaaatgtttctgaccaccgggtttttggggacactgaaaaattgcaaaatgcgaaattgtgtgagcttcatccagcttcctggttctgtgttgcctggtatcctgtttatcgtgtgcctcgtgggaatttccgtgcggcatttcttacttatcattcactggggaagttggttcataaaaaatgctccatggatacgaatgacgggcatacacaagtagtttcaccagttgttggtctccagagttacaacgacaagggagagcagtggtttcagctgagatgcccagatttgaagcaattgccaatagaagattctttaaaaaccagtcctgctgaagttcataaagagaggctgaggacgctgaagatgggtgcattggccatggcaagagctgttgtcccaaagggaagtggggagtcggtgaaccaccatcctgattacgagttcttcctgtctcgttgcgcctaggctaagcggttgtgatatgaaggaagaggggcttttctgcttctagctcctgaatgtagtagtgaccatgaaaatgaaaaaaaaacccagagtagtgactaaccagagaccggctatagatacagtttatcttagagagaggagagcctggggtgatgcatatcactgactgtataggagatagactcgaatattagatactctaacctgattc

SEQ ID NO: 120523 - DNA, 1327 bp, Zea Mays
agggtaagagaagaaaaaggaaggagattagacgtacacgacaaagagacgaagacagtgtggaggggaggcagggtagcccccgcggcgccgctccgctcgaaatccccaaaaaggcaagatcaaatcaaatcagatctctccacccccagcccatccatggcgatcgtgtacgccctggtcgcgcggggcacggtggtgctggccgagttcgccgccgtctcgggcaacgccggcgccgtggcccgtcggatcctcgagaagctgccgcccgacgccgagtccaggctgtgcttcgcgcaggaccggtacatcttccacgtcctccgatccgacgccgccggcatcaccttcctctgtatggccaacgacaccttcggaagaaggatcccctttctctacctggaggacatccaaatgaggttcatgaaaaactacggcagagtcgcccactctgcgctggcttacgccatgaacgatgagttctccagagtgctccatcagcaaatggagttcttctccagcaacccaagcgccgacacactcaaccgtctccgtggagaagtcagcgagatacacaccgtcatggtcgacaacatagagaaaattcttgacagaggcgatcgcatctcgctccttgtcgacaagacatccaccatgcaagacagcgcctttcacttccgcaagcaatccaagaggctccgtagagctctttggatgaagaatgccaagcttctagttgtgttgacagttgtcatagtagtgctgctctacttgatcatttctgctttctgtggaggcctttccttgtcatcatgcagatcatgagtaacacaccagatggctttgcccctcccttaaatggagggtagaacaccatggaatgatgcctgctgtgttgagcaccggagcttccggaggcaaaaaaaaaaggagatcgatggataccactgtggtttccagtaacttggatcagtttgtacagtggacgagtggagttggccgttgctgtttttgatgtcgccatggttgtgggtgaactcaaaccttaaatcgtggtgtgcttagcatctttcttggcgtgtcaaactgtcgttgtgacttgtgagggatgggactagtgagttgggttttgtagagttacttggttatcaatgtgcagacatatatgtatgccgcgatgagtgttagtacatgcctactatggttatcggtgtacgaaagtgtcttagctgctgttgtttgagactgccatggatggatgtggttgtgttttgaaggagctgcccttgtggccatgtgatgaataaaagcacgtaaagcaagc

SEQ ID NO: 120524 - DNA, 669 bp, Zea Mays
atgacaagcgaatccgccaccgccaccgtgatccagatggacgacggcagggccccggttgttgcagcgccggcaccagcacaagcactgggagcggcgccgcgcaagacgaccaccggtctcccgttcctgctgcgctcgggcgccaaggggttccggtgctgcctggccgtggtggacttgctgctgaggttggccgccttgggcaccacgctggcggctgccatctccacgggcaccgccgacgagaggctgtccgtgttcaccaccaccttccagttccacgcgaggttcgacgacttcccggccttcacctccctcctggtggccaacgccgtcgccgcggggtacttggtgctgtcgctgcccttctccgtggtgggcatcgtccggcccagtaaggcggcgacgggcgtggggctgctgctgctgcttgtctgcgacgtggtggtcatggcgctgctcacggcgtccggcgccgctgccgcggccatcgtgtacgtggcgcactcaggcaaccggcgcgccaactgggtgcccatctgcatgcagttccacggcttctgccagcgcaccagcggctccgtcgtcgccaccttcctcgccgtgctcatcttcgtcgtgctcgtcctcatggccgcatgcgccatcagacgcaggcccagctag

SEQ ID NO: 120525 - DNA, 2309 bp, Zea Mays
atggccatcgtcgtcgtcgtcttccacaatccaatcggtgctcaccccgccggccggccggccggagcacctctataaatactagcctagggtaccccggaccggccggccggccggctgcacgcacgcatcctccgcctgccgcacccgccaccgcaagaagagggttcaaaatactcaagatggctccgccggcacggccgccacgtgctggggaggacttggaggagggcacaggcgagagctccccacctcctcggtcgccacgtgcgtccaaccccgactgccacgaggtgcagaggaagatctgcgagcgcctccgccagacggggcggcacgaccgtacgctcgccgaccccaccttcaacgcccgcttcgcccgccacctcgagaggttgccgcggaggtacctactcgacctcgacctggacgacaagctcgaggatgtcttgctgcactgggggattctcgacgagtgcgccgaccccaataagcgacccgtctttcgcgcgcggttcataaagtataagacagttcctagggaggatgacggcattggtcatgatcaagatcacgaggagccgtgtcaaaagttgttggaggacctcagtttggaaagaagaaagatcgcggacagaaatgattccctgtctatctcctctaggggcgatttgaaaactgtcctccttcatgagatcattttctcctccatcgacaagcccaagctcctaagtcggctaactgcgttgctctctgaggttggactgaatatccaggaagctcatgtgtactccacgaaggatggtttttgtttggatgtttttgttgttgatggctggaagacagaggagactgatgagctgatcgcggcgattaaggagacattaacacaaaaaaatgcatcaccatctaattcaacaaattcttcgacgccggagaaaatagttgacctacaacaacaggttggagattatgaaattgacttaagcatgctaactaggggggacaagatcgcatctggatcatccgcagacttatatcgaggaacttataaaggccatgatgttgctatcaagtgtctcagatctctatatctcaacaatccttcagaagttgagtttctgcaggaagtacttattctaagtggtgttaatcatgaaaatattctgcaattttatggggcatgcacaaaacatccaaactattgcattgtaacagaatacatgcctggagggaatatatatgactttcttcacaagcaaaataacttcttggacctccataaaattctaagatttgctatcgatatctcaaaaggaatggattatctgcaccagaataacattatacacagagatttgaagtctgcaaatcttctgctaggccatgaccaagttgttaagatcgcagactttggtgtggcgcgacatggaagtcagcaggggcagatgactgctgaaactggaacctaccgatggatggcaccagagataattaatcataagccgtatgaccacaaagcggatgtattcagctttgccattgttctttgggagctggcaacttcaatggtcccatatgacaacatgacacccttgcaagctgcattaggagtaagacagggattgcgcttggacattccgggcagcgtgcacccaagattgaccaagctgattcgacagtgctggaacgaagatcctgatgcgcgtctgacttttgcagagattactaaagaactccaagatagtctacaccatatcgaggcacccaagggagccagccgtcgatctagagcaaagatgcagaagaaataagagggcaaggtttcctacttttttttgggtgtgttacactagttgcagtatgagtgtttaaggtgtatgtcgcggttataaatattttaaggccaaggaagtgttaaaaaccgaccttagctcagttggtagagcggaggactgtagtggattgcagatgaaatccttaggtcgctggttcgaatccggcaggtcggagttgtttttaaaataacatttttttgctcaacaatgttaggctactcgcctactcacctgtcgctactctgtactcactacggttaaagtcgtgctctttttcttaacatttttacaaatgtcattttgcacaaaaaaaggaaaaaggggatgcatatgtggtcacattattatttgcataaaagccatgcagatcaatattcaggaacagaaaggccaaacgcctgcgaaagttgttgtgagagaccgttgcttaataaaaggcaaaacagaatgtaactatcccgtgaacaaaaa

SEQ ID NO: 120526 - DNA, 2238 bp, Zea Mays
atggccatcgtcgtcgtcgtcttccacaatccaatcggccggccggctgcacgcacgcatcctccgcctgccgcacccgccaccgcaagaagagggttcaaaatactcaagatggctccgccggcacggccgccacgtgctggggaggacttggaggagggcacaggcgagagctccccacctcctcggtcgccacgtgcgtccaaccccgactgccacgaggtgcagaggaagatctgcgagcgcctccgccagacggggcggcacgaccgtacgctcgccgaccccaccttcaacgcccgcttcgcccgccacctcgagaggttgccgcggaggtacctactcgacctcgacctggacgacaagctcgaggatgtcttgctgcactgggggattctcgacgagtgcgccgaccccaataagcgacccgtctttcgcgcgcggttcataaagtataagacagttcctagggaggatgacggcattggtcatgatcaagatcacgaggagccgtgtcaaaagttgttggaggacctcagtttggaaagaagaaagatcgcggacagaaatgattccctgtctatctcctctaggggcgatttgaaaactgtcctccttcatgagatcattttctcctccatcgacaagcccaagctcctaagtcggctaactgcgttgctctctgaggttggactgaatatccaggaagctcatgtgtactccacgaaggatggtttttgtttggatgtttttgttgttgatggctggaagacagaggagactgatgagctgatcgcggcgattaaggagacattaacacaaaaaaatgcatcaccatctaattcaacaaattcttcgacgccggagaaaatagttgacctacaacaacaggttggagattatgaaattgacttaagcatgctaactaggggggacaagatcgcatctggatcatccgcagacttatatcgaggaacttataaaggccatgatgttgctatcaagtgtctcagatctctatatctcaacaatccttcagaagttgagtttctgcaggaagtacttattctaagtggtgttaatcatgaaaatattctgcaattttatggggcatgcacaaaacatccaaactattgcattgtaacagaatacatgcctggagggaatatatatgactttcttcacaagcaaaataacttcttggacctccataaaattctaagatttgctatcgatatctcaaaaggaatggattatctgcaccagaataacattatacacagagatttgaagtctgcaaatcttctgctaggccatgaccaagttgttaagatcgcagactttggtgtggcgcgacatggaagtcagcaggggcagatgactgctgaaactggaacctaccgatggatggcaccagagataattaatcataagccgtatgaccacaaagcggatgtattcagctttgccattgttctttgggagctggcaacttcaatggtcccatatgacaacatgacacccttgcaagctgcattaggagtaagacagggattgcgcttggacattccgggcagcgtgcacccaagattgaccaagctgattcgacagtgctggaacgaagatcctgatgcgcgtctgacttttgcagagattactaaagaactccaagatagtctacaccatatcgaggcacccaagggagccagccgtcgatctagagcaaagatgcagaagaaataagagggcaaggtttcctacttttttttgggtgtgttacactagttgcagtatgagtgtttaaggtgtatgtcgcggttataaatattttaaggccaaggaagtgttaaaaaccgaccttagctcagttggtagagcggaggactgtagtggattgcagatgaaatccttaggtcgctggttcgaatccggcaggtcggagttgtttttaaaataacatttttttgctcaacaatgttaggctactcgcctactcacctgtcgctactctgtactcactacggttaaagtcgtgctctttttcttaacatttttacaaatgtcattttgcacaaaaaaaggaaaaaggggatgcatatgtggtcacattattatttgcataaaagccatgcagatcaatattcaggaacagaaaggccaaacgcctgcgaaagttgttgtgagagaccgttgcttaataaaaggcaaaacagaatgtaactatcccgtgaacaaaaa

SEQ ID NO: 120527 - DNA, 2682 bp, Zea Mays
taggttttcctagccgccaccccttttcacctcagcaggacaccagccgtcagggcctgccggcgccgccgtcctcgtgaggttcatcgttccctcccgggggcgaccccctccccctggcttccccctcccgtcgaagacccttccgacgccgacactctgctcaccctcaagtcctccctcatccgcccgccgacagtggggcatagcctctgatggtccgagtcatgcctccggatctgccccgcgcctgccgttcgggccgcactggctgcctcgacccgccaccggatccgccccacacccgcgccaggccgtcgcgcccacggttccacacgcagtcgcggccccacccttgcctctgctatgtcggaggcgcgactgcccccccttccccagcctcggcgcggtggcccctccccgcggactccctccctcccggcaacgcacccgaccccgcggcggcttcccctgctgcgaccggagcggccccgcctcgtgcaacaaccgccaaggcctcacgggcgcgcgtgcagcagccgccgcgagcttgccctggtatggtcggggatcccctgcgagcccccttctcgaggctctacgacgcagcctaggacgtggtcgccgtcctcaaccgcgcggtcgtggcctagatccggcgcacgtgctccccttcgcccggccgacaagcctcctcttcctcccctggcagcggcacggatcgagtcgtcactcttcgacgcgtcctcgctcccctccccaacgtcatcgccgacgaccgtgatgaccaggctcctctgactgcaccttcacgcttcttctgtcatcgacatcacccatcccctgccaggcccggcgcaagcccctgcccggctggacccgtcccgtcgctctcccgttcatcgccttagttggatccgtcgctgccgtggccttctatgctggattcaccattgatgcgtgcgaccttcccggctagatccgtcgtccctttggttgggtcgccatcttctcggctgaatccatcgttgtcgtggccttcccggccggatccgccgctaccccttctattctgcagtgggtgcggccaccatgaccggtgcagacgcgtgcgctaccgtcggcctccctagcggggctcctcgacattcgaatgatcgaagaagctagaaggtcggccttgcggtgctcttttgttgtgtcgccctgctgcccgttgacgctagaacgtccaccgctcccgaagaataggctattgctgcgtgtctcccgaccacggccacctcaacttcggctacctcggcatccaggggctatcgtcttcttggagtccacaccggtctctactacattcgcaccttcacggcgctgcgactgcggggggatttgaacccgtcggctcctaccttcggcttctactctagtttcatcgtgtgcggtgcccccgttgcgactgcggaaggatgttagactgtgtgtgtgggccggcaccactgttgggctgccgacccatcagatggtgttaatcatgaaaatattctgcaattttatggggcatgcacaaaacatccaaactattgcattgtaacagaatacatgcctggagggaatatatatgactttcttcacaagcaaaataacttcttggacctccataaaattctaagatttgctatcgatatctcaaaaggaatggattatctgcaccagaataacattatacacagagatttgaagtctgcaaatcttctgctaggccatgaccaagttgttaagatcgcagactttggtgtggcgcgacatggaagtcagcaggggcagatgactgctgaaactggaacctaccgatggatggcaccagagataattaatcataagccgtatgaccacaaagcggatgtattcagctttgccattgttctttgggagctggcaacttcaatggtcccatatgacaacatgacacccttgcaagctgcattaggagtaagacagggattgcgcttggacattccgggcagcgtgcacccaagattgaccaagctgattcgacagtgctggaacgaagatcctgatgcgcgtctgacttttgcagagattactaaagaactccaagatagtctacaccatatcgaggcacccaagggagccagccgtcgatctagagcaaagatgcagaagaaataagagggcaaggtttcctacttttttttgggtgtgttacactagttgcagtatgagtgtttaaggtgtatgtcgcggttataaatattttaaggccaaggaagtgttaaaaaccgaccttagctcagttggtagagcggaggactgtagtggattgcagatgaaatccttaggtcgctggttcgaatccggcaggtcggagttgtttttaaaataacatttttttgctcaacaatgttaggctactcgcctactcacctgtcgctactctgtactcactacggttaaagtcgtgctctttttcttaacatttttacaaatgtcattttgcacaaaaaaaggaaaaaggggatgcatatgtggtcacattattatttgcataaaagccatgcagatcaatattcaggaacagaaaggccaaacgcctgcgaaagttgttgtgagagaccgttgcttaataaaaggcaaaacagaatgtaactatcccgtgaacaaaaa

SEQ ID NO: 120528 - DNA, 1092 bp, Zea Mays
gaaagctcagcggttttactgtgcgtatactagctatacaacccaagcaagcatgatggggattaattaatgggacgattgattgaaaaccaccaaaaacctgggcggcatggcacccatcctcaccacacaagcaccagtagtggcagctgtactatatatatgcgtcgttaccttcattcatcgattcttcttcttcttattcagacattatcaagaagttggcagcagcagcggcagtagccatgggcatcctggaccacctgtcgcatctgtgcagcatcacggagacgaaggaggcgctcaagctcaggaagaagcggccgctgcagactgtgaacatcaaggtgaagatggactgcgaagggtgcgagcgccgcgtgaagagcgcggtgaagtcgatgcgcggcgtgacgagcgtggcggtgaacgccaagcagagcaagtgcacggtgaccggcaacgtggagcccgccaaggtgctggagcgcgtcaaggccaccggcaagaacgccgagatgtggccctacgtgccctacgcgctcaccacctacccctacgtcggcggcgcctacgacaagaaggcgcccgcgggattcgtccgcagcgcgccgcaggccatggcggaccccggcgcgccggagctcaagtacatgaacatgttcaacgacgacaacgtagacgcgtgcacagtcatgtagtttcttctcttcttctctttccgtggatcgatcggatatccctgtcactgtcatcaccggccggccggccggccttattattattcctactgaaaccaacgtcaattatatccgttcatgcatcttctcctccaaaagtttctgcttttaagaaaacactactccctcctcgattgtcgttttatcccttaatttttatatctatatttaaataaatgataataaatctagacacatatataaaataaatacattaattattgtatgaattatttaaaaagtaaaactaattttattttaagacggagggagagtatttattatagcaaccgtgacatctaacataatcgaaactcgcgcaaagtcttagttactcttggtggttgtcatc

SEQ ID NO: 120529 - DNA, 861 bp, Zea Mays
gaaagctcagcggttttactgtgcgtatactagctatacaacccaagcaagcatgatggggattaattaatgggacgattgattgaaaaccaccaaaaacctgggcggcatggcacccatcctcaccacacaagcaccagtagtggcagctgtactatatatatgcgtcgttaccttcattcatcgattcttcttcttcttattcagacattatcaagaagttggcagcagcagcggcagtagccatgggcatcctggaccacctgtcgcatctgtgcagcatcacggagacgaaggaggcgctcaagctcaggaagaagcggccgctgcagactgtgaacatcaaggtgaagatggactgcgaagggtgcgagcgccgcgtgaagagcgcggtgaagtcgatgcgcggcgtgacgagcgtggcggtgaacgccaagcagagcaagtgcacggtgaccggcaacgtggagcccgccaaggtgctggagcgcgtcaaggccaccggcaagaacgccgagatgtggccctacgtgccctacgcgctcaccacctacccctacgtcggcggcgcctacgacaagaaggcgcccgcgggattcgtccgcagcgcgccgcaggccatggcggaccccggcgcgccggagctcaagtacatgaacatgttcaacgacgacaacgtagacgcgtgcacagtcatgtagtttcttctcttcttctctttccgtggatcgatcggatatccctgtcactgtcatcaccggccggccggccggccttattattattcctactgaaaccaacgtcaattatatccgttcatgcatcttctcctccaaaaatcatttgaaaaaactcaaaaaa

SEQ ID NO: 120530 - DNA, 425 bp, Zea Mays
tcccactaattaactgatccacataatttattcataagctggatatgttacacacaagagcaagagcaagcgaagcgacgacgcagagcgcttgcttagcatttggggatggctatgccgcacgaggtaaaggttttggcggtgttggggttgttgatgtattttgcaaacttggggtctttggcgtacacgcacaagcatgcctcctgcgcacgcagggtggagcagcatgctgccgcgggtttcgctccgtccatgaacgccggatcgcacaccaccagcggcttgggatcgcacgccgctgccgccctgccaccgcctgtgctcgtcgtcgccatcaccaccaccagggccagggcggctacaaacatcgcggtcgacttggccatggtatcttcagtacagtgatcgaagagagtgagtga

SEQ ID NO: 120531 - DNA, 1922 bp, Zea Mays
atttcgggactgttcctcattcacgtgtctcctcccctcccctcccctccccttcccccatgacctgtccgtctcaatctccctcttccccgcaccaaatcgaagctacccctgttcctctgcgatttgggctcgtcctgtgtccttcctgttgctcaaaagctcgctcattcgatgtccctgtctgaaaggcgacaaatcccactggaattcggagcacagagctttgaatccaggggccaaaactttttgctcatctcccttgcggaaaagcgcctcctctgcgtctgaaagtcggatcttttttcacagattcgatttgaagttcccgagcagctcgaggaccgcggtgtcgcatagtccgtgatgttagggaaagctttggtagcttatcaagacggagccttgaggtcaggatttctggtttgcctggtctgtctggtggtcatcatagagggaaatctgttggatctgtgagtgacctgcgcgacagacctgtagtagttgatcaaagcaggtgggttggtcttcctcctgaattgcttcgagatgtaatgagaaggcttgaggaaggtgagagcaattggccatcccggaaaaatgttgttgcctgtgcagccgtctgtggaacatggagagagatatgcaaggatatagtgctgagcccggagttctgcgggaagctcacttttccagtatcacttaaacagccgggaccaagaaatggaataatccagtgtttcataaaaagggacaaatcgacatcaacttattatctttacctatgtcttagccctgttgtcctcagcgaggatgggaagtttctgctagcagctaagaggaatcgccgtacaacatatactgagtacatcatttctgtggatcctaaaagtatatcacgatcaagtgatggctgtgttggaaaaatgaggtcaaattttcttggcactaaattcatcgtgcatgacactcgagcaccacacaatgctgggagccttgtctcctgtgagcgcggcagccgcagaatctcctctaggagggtttcccccaaggtacccactgccagctaccccattgcccgggtgaactatgagctaaacctgcttggcacaagggggcccaggcgtatgaattgcacgatgcattccatcccagcctcaacgctggaccctcaaggcatggtgcctgagcctggccaacccaagcagatcttcgtccctggctcgtcgtccttcgaagattcctttcgcagtgcaaacaacaccccttccagctcaaggttctcggtcgcagaccgctccttggattggagctcctctcgattctcagagacgagcggattggctcagcaggacgacgatgacagtgaccaggctaaggagaggcctttggttctctgcaacaaggagccaaggtggcacgagcagctgcagtgttggtgcctcaacttccatggtcgggtgaccgtggcttctgtgaagaacttccagttgatagctgcaccacaactagattctgaaccgtcacagcaagctcagcagcaaacccagccttcgaattcgtcttcagcatcggatcatgacaaagtgatcctgcagtttggtaaggtcgccaatgacatgttcactatggactaccgatacccactctcggcattccaggccttcgccatctgtttgaccagcttcgacagcaagctggcttgtgaataaattgtacataaagaacaggaatacatgtagattgtatctctgcagtaagtatttacagtgtgtgtgctggtgtagtttattgccgcgttgattcagtcctttgttggctttagtctaaggtcactagaccggttataccactgttttgcaatgtagactaccaaaatggagtttaaaatgaaagttaaagatagaaaagctgatgaccct

SEQ ID NO: 120532 - DNA, 2184 bp, Zea Mays
atttcgggactgttcctcattcacgtgtctcctcccctcccctcccctccccttcccccatgacctgtccgtctcaatctccctcttccccgcaccaaatcgaagctacccctgttcctctgcgatttgggctcgtcctgtgtccttcctgttgctcaaaagctcgctcattcgatgtccctgtctgaaaggcgacaaatcccactggaattcggagcacagagctttgaatccaggggccaaaactttttgctcatctcccttgcggaaaagcgcctcctctgcgtctgaaagtcggatcttttttcacagattcgatttgaagttcccgagcagctcgaggaccgcggtgtcggtaagacttgctttgaagatcttgatcaccacaagagatttgctgaatttccggtcactgtactttttccactggacatgtcctttcgcagcatagtccgtgatgttagggaaagctttggtagcttatcaagacggagccttgaggtcaggatttctggtttgcctggtctgtctggtggtcatcatagagggaaatctgttggatctgtgagtgacctgcgcgacagacctgtagtagttgatcaaagcaggtgggttggtcttcctcctgaattgcttcgagatgtaatgagaaggcttgaggaaggtgagagcaattggccatcccggaaaaatgttgttgcctgtgcagccgtctgtggaacatggagagagatatgcaaggatatagtgctgagcccggagttctgcgggaagctcacttttccagtatcacttaaacagccgggaccaagaaatggaataatccagtgtttcataaaaagggacaaatcgacatcaacttattatctttacctatgtcttagccctgttgtcctcagcgaggatgggaagtttctgctagcagctaagaggaatcgccgtacaacatatactgagtacatcatttctgtggatcctaaaagtatatcacgatcaagtgatggctgtgttggaaaaatgaggtcaaattttcttggcactaaattcatcgtgcatgacactcgagcaccacacaatgctgggagccttgtctcctgtgagcgcggcagccgcagaatctcctctaggagggtttcccccaaggtacccactgccagctaccccattgcccgggtgaactatgagctaaacctgcttggcacaagggggcccaggcgtatgaattgcacgatgcattccatcccagcctcaacgctggaccctcaaggcatggtgcctgagcctggccaacccaagcagatcttcgtccctggctcgtcgtccttcgaagattcctttcgcagtgcaaacaacaccccttccagctcaaggttctcggtcgcagaccgctccttggattggagctcctctcgattctcagagacgagcggattggctcagcaggacgacgatgacagtgaccaggctaaggagaggcctttggttctctgcaacaaggagccaaggtggcacgagcagctgcagtgttggtgcctcaacttccatggtcgggtgaccgtggcttctgtgaagaacttccagttgatagctgcaccacaactagattctgaaccgtcacagcaagctcagcagcaaacccagccttcgaattcgtcttcagcatcggatcatgacaaagtgatcctgcagtttggtaaggtcgccaatgacatgttcactatggactaccgatacccactctcggcattccaggccttcgccatctgtttgaccagcttcgacagcaagctggcttgtgaataaattgtacataaagaacaggaatacatgtagattgtatctctgcagtaagtatttacagtgtgtgtgctggtgtagtttattgccgcgttgattcagtcctttgttggctttagtctaaggtcactagaccggttataccactgttttgcaatgtagactaccaaaatggagtttaaaatgaaagttaaagatagaaaagctgatgaccctagcccgcttagtgtgacttgtcaaaagctcaaagctaagaatcggcactaattatgacttatgagctgcagttgtgtatcacttttatgtctgtaacttggtaacacgaattatcggcactaattatcacttttcagccttacacctgtgtaaagctatatattattggct

SEQ ID NO: 120533 - DNA, 1713 bp, Zea Mays
ctattgtataaggtcaggagttactgatgctttgtcatttgcatactctgttctgttgctagcagacttgctttgaagatcttgatcaccacaagagatttgctgaatttccggtcactgtactttttccactggacatgtcctttcgcagcatagtccgtgatgttagggaaagctttggtagcttatcaagacggagccttgaggtcaggatttctggtttgcctggtctgtctggtggtcatcatagagggaaatctgttggatctgtgagtgacctgcgcgacagacctgtagtagttgatcaaagcaggtgggttggtcttcctcctgaattgcttcgagatgtaatgagaaggcttgaggaaggtgagagcaattggccatcccggaaaaatgttgttgcctgtgcagccgtctgtggaacatggagagagatatgcaaggatatagtgctgagcccggagttctgcgggaagctcacttttccagtatcacttaaacagccgggaccaagaaatggaataatccagtgtttcataaaaagggacaaatcgacatcaacttattatctttacctatgtcttagccctgttgtcctcagcgaggatgggaagtttctgctagcagctaagaggaatcgccgtacaacatatactgagtacatcatttctgtggatcctaaaagtatatcacgatcaagtgatggctgtgttggaaaaatgaggtcaaattttcttggcactaaattcatcgtgcatgacactcgagcaccacacaatgctgggagccttgtctcctgtgagcgcggcagccgcagaatctcctctaggagggtttcccccaaggtacccactgccagctaccccattgcccgggtgaactatgagctaaacctgcttggcacaagggggcccaggcgtatgaattgcacgatgcattccatcccagcctcaacgctggaccctcaaggcatggtgcctgagcctggccaacccaagcagatcttcgtccctggctcgtcgtccttcgaagattcctttcgcagtgcaaacaacaccccttccagctcaaggttctcggtcgcagaccgctccttggattggagctcctctcgattctcagagacgagcggattggctcagcaggacgacgatgacagtgaccaggctaaggagaggcctttggttctctgcaacaaggagccaaggtggcacgagcagctgcagtgttggtgcctcaacttccatggtcgggtgaccgtggcttctgtgaagaacttccagttgatagctgcaccacaactagattctgaaccgtcacagcaagctcagcagcaaacccagccttcgaattcgtcttcagcatcggatcatgacaaagtgatcctgcagtttggtaaggtcgccaatgacatgttcactatggactaccgatacccactctcggcattccaggccttcgccatctgtttgaccagcttcgacagcaagctggcttgtgaataaattgtacataaagaacaggaatacatgtagattgtatctctgcagtaagtatttacagtgtgtgtgctggtgtagtttattgccgcgttgattcagtcctttgttggctttagtctaagctcaaagctaagaatcggcactaattatgacttatgagctgcagttgtgtatcacttttatgtctgtaacttggtaacacgaatta

SEQ ID NO: 120534 - DNA, 793 bp, Zea Mays
cgatagttgtggatcttcatttggctgggtatgcaaccatcccaagggttgaaaatcgttaaaaaaactcatgctcagtacgatttctggcaaagtcacgatctggtgtgttccatgttgtcgaggagatggatatacacgtaatcttttgacttgaggattgtcctgtggactcagcccatacaagaatccagtgatttgtgtacacagatatgctatgcgtatgaatttattctatatgttctttggcataatgtaagtgtaaccggtttttggcaatcaaaacgaatgccagttggtaaccattcaacatttcttttgttgtgtgagttagagagaggctatcactatactaaccttaatatcatcagaattgacataaatgtgatttacacgaagataaaatttgtggcagagatggctctaacacatcaatcagtcttcgatgcgaatgcttgttgctcatatggacttgtggttgtgataatgagttcatctccgtgcacattcgctatccttgtgattacagcagctaactgagcagtctctcgactgcaaaataaggtaaaatcaagagtgagcaaactaacaaaagtatctctaaaaacaaaaacatagagggaaattttttatgctttacctgttgctgtgatggtggagcaattcagcaccaaggatgatatctcgcatttcagattgtgttagtgcagaagtattgacattgtttttctttgcataatcagatagaatgaagtcccttagtgcacatacggcaccaaaggctccccatcag

SEQ ID NO: 120535 - DNA, 830 bp, Zea Mays
acaaggtgtggcctacctcggcggcgcggcaggagcagagcacgtggagtctagacctcgacgcggcagtacgtggtggtctggaacctgagcccgtgcgcgccgacagcgccgcggtagccggagccggcgccggagctgatgaagtaagccgggcaggtgacgaacatgtggtagtggcccgacacccagctgccgaccttccagcggaccctcccgtcgatcctgagctgcaggacgaggtaccccgcggcgaggtccttggcgagcgcgtcggcgaggaagggcgcgaaggggacggcggggccggccagcacgggcgaccagacgtcgacgtcgccgtggccctggtacaccgcgggcagcctggacgccagcgtcacctgctggtacttgtacgtggcgtagacgtcgaggcggtcgtagtagacgccgacgcggccgttggggttgcgggacgccacggtgacctgcgccgccgtggacagcagcggggccgagccgttgctcaggtccagctgccgcagcgccgcgtcctgcaggtagaagcgcgggtgcgtggggcggagcaccaggtacacgatcagcgccacgacgcccaccagcagcgccatggtcagcaggatggccagcaggcgccggcatgactgccggaagtcatcgtccccgtggttgccgcagtccttgcccatggctgcctggctcgctgacggctgcctgccttggtcctctctctctctctgactctgggttggtggagaggcttcaagggaaagggaggctgggctgagctgtgtagcttgtggtcgtttgggaatggggtttttttt

SEQ ID NO: 120536 - DNA, 86 bp, Zea Mays
atggcatagcgtggatgcattgaacacggcggggcggggcgggtctggtctggtctggtctggtatcggcacgggtgcgttggtga

SEQ ID NO: 120537 - DNA, 549 bp, Zea Mays
atggtcaacaagccgctcattggcctcctctcggatgttgtccccatgccctacgtcgccatcggcggaaatgaacttccatcggacttgatagacacactactaaagtggatctcaagcaatgatgaggagcttaggcttcgactgtcctcccgtagcaccgccacaccgcacgcgtccgcggcggcgtccgcctcggcgccggtctcgcacaccgctccctggctagggaagttcatctcctccgagtccttcaacgtgaggggattcgactgggcgatctacttctaccccaatgggaagagcggcgaggatggcgctgcctacgtctcgctcttcatagccctggtcagcgaaggcaccgatgtgcgcgcgctgttcgagctcacgctcgtcgaccagagcggcaaggggcaagacaaggctataatagtaggtggggcagacactgatgggacacctattattgcagggattgcaaagttcatggatatattaactactggacttgttacatccccattatattgtaacactaaattacaatga

SEQ ID NO: 120538 - DNA, 601 bp, Zea Mays
caattttattgcaacatatggttctatactgatgaaaacaatacttctacggcacccaaaaaaaatccttggtgttggaactgctgattgtgaacccacaaggccacaaccgtagaggtctcgttcttttaccttttatagatcaacactaataagtttaggaacctccagcaagaaagttccaccaacacttttttgccgttagctttccgttccagccacccaaatggcgagaaaagaaacttaggcgcgctttttctgagaaaagaaaactaggtagtgcctgcacagcagacgtttatgtcactatatattatatgtagtgcgagaaggaactggtggttgcttcggaagaaatctgtgctgttgaacttactggcatctggctgtactcatgccgtcactctcactctatgttgctcagcgcttttgctccgcccattgctgcccttcgaagaactggcctagaagttggtccactgcttctgggctgtaccgcacgtacttctgcgggttcttgttgttgtccacaagattgctgcaagtcacaatgatactacagtcacatcttactagcactgttagtggcaagatgtagcaa

SEQ ID NO: 120539 - DNA, 960 bp, Zea Mays
atgaaggcgtggggggtcatgcgcgagcgcgcctacgcgttcgaccttgtcctcaccgaggtcgccatgccctccctctccggcatccagctgctctccaggatcgtcgccgccgacgagtgcaagaacatccccgtcgtcatgatgtcatcccaagattctattggcacggtgctcaagtgtatgcagaagggtgcggtggacttccttgtgaaaccagtgagaaagaatgaactgcgtaacttatggcaacatgtgtggaggcggcatgcaatgaattgccagacaaatggatcagaaaataatgcagccagcaatcatattagtgccaacgttgctaatgggtcaaagacaggagaaaacagcgacgaggaaagtgatgcccaaagctttggtagcaagagggatactgaaattcatagtgttgaggcggtacaagatattcgtagagatgaagtggctggctcatccaaaaataacgaactacaaaataagtcttatgatggagtaaacacaaaagtggatgtgtcaaaatataccaatggtgctccaagtggaagtgagaagaatgtgcggtccaaatgccttaacggtattacttctgcaaaggtggctgagcaaattatggataatgccttgaggatcacggatgcaagttcacgccgtccaacaaatcttggcaatggtttggctatgactgagccagcagctgacagaaaatgtcaatcttcggtcatggaaaataatgctgtcacagaaaataaccctggtgataagtcgaagggtgctgcaataggtcatgctgattcttgcccctccgaatttatggtgaccaacttggggaaggaacaccatcttaatggttacaaaaaccaagaattcagggaaaaagatatctttaatcactcgaattcctctgccttttcaaggtactttgtgctgatgggttttaaactttag

SEQ ID NO: 120540 - DNA, 1329 bp, Zea Mays
gtttgtccatggcttcaacatgacacagatatggcaataaaaggatagaaccatcaggtgagattcagtttttcccttctccctgcgtcattgggcaagggcatgttaatggcaagaacccagttttccaacccaatggggtgttgctgcctcccaatgaacataatacaggtgagagtacaaggcaagctcgaatttctctggacagtaggacagagggtgctgccatcctgtgttccactagtgccagggaagatgctggtgcaaatagttcttcccatagaaaggacagtatgagccatccctcatatgggtttatacctgttccaattcctgttggtgccacgatgccgtaccattatggtgcgattctgcagcccgtatactacccacagagtcctcttatgcactgtgattcagctggaatcaacaaggcagcaatccagcatgcctctgggcaacctaattaccatgaagctcccggtaaaccatctcatgttcttattgaacacaaacagtcagaggaaaaccaccagttgcatcattcaagacaaattcttcgggaatcaggagaaccaattgacatggcgagagctcacgtggatcgtgctaaccagactgcaagctgcagccaaggtatctgtaaaggaagtggatgcacatgtagtggtgaagccgatatcaacgcaaacacaatggttgccctagagagtggcaacgagagtggaatccaaaatggtgacaggtctcgccgtgaagctgcgttgatgaagtttcgcatgaaaaggaaagatagatgcttcgagaaaaaagttaggtatcatagcaggaagaagctcgcagagcaaaggccaagagttaagggacaatttgtaagccaaaagctgaactcagctacaacaacagacgcagaagctgactcgtgaccggcgtcaagtcatcactgtaacttattcttcccttcccaccaggtgtgggcaatcggacttgtaagactgaaggctggcagaagttttttcccttccatggttagcctttctgcacaatgggtgaactcttgtgtcgggtgtttggtgccgttgtggccttatttttgtaaagtgcatcaaattgacaaatgttcagaggggaatgggttgggggtttaggaaaacggtgcagctgccagatttcgcctatgtacttagatgtttgtggggggtgagaaagcagagcctgtacagcttattcacccattttgttgccattacactagtagtgacttgtactatgacaacagtagacattgttgtacagccttaccagtcagcagcgggtctttctcatttt

SEQ ID NO: 120541 - DNA, 976 bp, Zea Mays
cgggaatctcacctgtgaaagcgagcacacgcaacgcagctacgcaagcaagcctgttctctgtcgattgaggccgctacacggcggcaatggagggaagaagggcggccgtgtcgttggtggcagcagtgtcgctgctgctggcgtgctcgcgatccccattcccggtcgtcgccgctgatgagggcgagccggcggtgggggccccggacacgaaccagctgtgcgtgagcaagtgcgggacgtgcccgacgatctgcacggcgtcgccgccgacgatcctgccgatgacagcgccgccgccgccggcccttgcgctgctgccgctgtccgcgcccccgccgccgtacctgcaactggtgctgccgccgccgccaacgggggacgtgtacgacctgctgcctccggtgacgcctctcacgagcccgccggagtccccgtgcacgaccccgccttcgtcctcatcgtcgtcgacggagcctccgccgtcgccaccctcctcctcctcgccgccgtcgccgccgccgccgaagagcggcggcgacggtggcagtggctcgtcctcgcacttctcgtccccgccgtcgtcgtcaaacccgtactactacctgtacctctccggcggcgccagggcccgcggcggcgcgtccagcagcgcttgcgcggcgctcgtcctcgccgcgttcctgcccgccgtcgccctcttcaagtgacgcgcgctctgttggttactagttacgactgccatccatcagtcggctgtccagaccggccggcgtaaagactaggacatgcattacgtactctcttcgttttggcatccgattcgatgatgatctgtcgacctttccgatgccagatgattgtccatgcagacagtacgtagttgtgtttacattttgtccattgtaccttaatgattttgtaaagtggattctgatgatggtttattgtgttcgttctgcctttggcttcg

SEQ ID NO: 120542 - DNA, 1609 bp, Zea Mays
cagaaggggaaccccctagctcccctccgaaacgaagcaaactcacgagctcccgccaaattaatctcctccatccataaatacgaatttcgacgcagaagacgacggagcgtcgatccatctcgatcgatcgagttgttcgtccgtcgcatgcaacttgcagcaggcgccttcttcttcggcgcgacgaactagctagctaggaccccatccggcggtgcaccatgctgcggtccaccggcgaccgcgtcgtcgtcgtgggcggcggcatcgccggcgccctcctcgccaagacgctccagaaccacgccgacgtcgtcctcatcgacccgaaggagtacttcgagatcccgtgggccaacctgcgcgccaaggtggacccggcggcggtggagcgcacggtgatcgcgcactccgactacctgacgcacgccaaggtggtcaccgcctccgccgtcggcctggacgactccgtggtgctcacctccatcggccgcgccgtggcgtacgacttcctcgtggtcgcgacggggcgcacgtgcaaccggccgcagaagcggtcggaccggctggagatgttccagcgcgacaaggaccggatcgacgcggcggagtcggtgctgatcgtcggcggcgggcccatcggcgtggagctggcggcggagatcgtgatgaagagccccgagaagcgcgtcaccatcgtccacggcgcgccgcggctgctcaaggtcatgggcgcccgggcgtcggccaaggcgctcgagtggctgcggtccaagaacgtcaccgtgctgctggaccagacggtggacctggcgtcggccaccccggacacccggacgttcaccacgtcggcgggggagacgctggaggccgactgccacttcgtgtgcacgggccggcccgtggcgtccggctggctcggcgggacgatcctcggggagcacgtggacgaggagggccacctccgggtggacgaccacctgcgcgtcggcgggctgcggaacgtgttcgccgtcggcgacatcacggacgtgccggaggccaagcagggcaacctggcgcagcggcaggcgatggtggtgtcccggaacctccgcctgctggtcaagggtgccccccgggaggagaagctgcaccggtacaagccgtccccgaggacgtccatgaccgtgacgctcggccagcgcgacgcgctggcggagctgccgttcatgacgctcatcgggcacatccccggtgccgtcaagccacgggacctcttcatcacgaggacgcgcaggatgatggggatcaagagcaaaccctacggcacgatgccgcacgtcatgtgagggagatcccatctatcgacgatgacgtccccggccccggtccggcgatccttcaattccgatgaccaaacggagactagctagctaggctgaggctctgtctctggattttgccacgttctagttctagctgatcatttgatctggtcgtctgagatgtacgcttggtgttatgagtgaacccggaatatggaagcacgatcacttgctatatgtattatacaggtacattctggacagtatttttaaagggagccgtttacctttttttacct

SEQ ID NO: 120543 - DNA, 867 bp, Zea Mays
tcgctgtggcgttggatgcagctcatttatgactaacaccgccccgtcctttgcatcacgacggcctctataaattcatgggtatccgagggcggcataacctgacaacttgtgcggtgcaattcagaagctgtagccactctcgccgtacagcgaccacaaacactcacgggggcagggagaggccgctgctggagggagctgcttattacggtgaaggccatggaggtgcagccggagctctcgctggggtttgctcctgctgtgaaaattccaaggaggtcgtcctccaactcggaaggcagcggtggcggcgccgggaacaagaggaagcactttgcctgggagtcccatggcagcagcctggacctccagctcggcgatcccctgcccctggactgggagcagtgccttgacctacactctgggaggatgtactaccagaacaggaagaccaagaacaagagctgggataggccgagttccaaagaggagcagggcaccctgaacctggaactcggcatctccacgaccccggacaccttcaagagccacacatccggtggccacatggtggccgtaccgtgcgtcaactgccacctcctcgttatgctctgcaagtcctccccggcgtgtcccaactgcaagttcgtgcagccctccgtggcagggatgcccaagacgcctcctcgccgccggctggaaaccgtcaagccactgcttgagaccttgagcctcctgcactagcagcttgcgcgccatgcagtaacggcgggcgtgtggtttattacaaagggcaaatgcaaatcgagttgctcaaactcaatactcctactagtaaaagtaatgatgagatagatttgatag

SEQ ID NO: 120544 - DNA, 2720 bp, Zea Mays
ctcggccgaaagggcaagagaagcatccccttgacaagcatgcgctgcgattcctcttgatgatggctactagtctactactatagcaggcttagctagcagctgtacagtgcaccacacgcaacacctgtgagcagacacgcggcgagctccgattcgcggcggctgcctatttgaggcgggcaacaggagcgcgctcattgaataaactcccgctactacgtcgctctcgcacccgccttcgtcaacatcaacgccggccgcagctataataggctatagcatggcggcagcgacgctagcactactactagtgacgctggcggcgctgcacggcgcggcgccagtactggccgtggccggggacccgccgttctcgtgcggcccgtcgtccgcggaggcgtcggagggcctcgcgttctgcgacgtgacgctggccccggcgcagcgcgcggcggacctggtgtcccggctgacggccgcggagaagatcgcgcagctgggcgaccaggcgccgggggtcccgcggcttggcgtccccgggtacaagtggtggaacgaggcgctgcatggtctggccacctcgggcaaggggctccacttcgacgccgccgtccgcgccgccaccagcttcccgcaggtgttgctcacggccgccgccttcgacgacgacctctggctccgcatcggtcaggcgatcggtcgggaagcccgtgcgctgttcaacgttgggcaggcggagggtctcacgatctggtccccgaacgtgaacatcttccgggacccgcgctggggccgcggccaggagacacccggcgaggacccggccgtggcgagccgctacgccgtcgccttcgtccggggcatccagggaaacagctcgtcctcgctcctgcagacatccgcgtgctgcaagcacgccacggcctacgacctggaggactggaacggcgtggcgcgctacagcttcgtggcccgcgtgacggagcaggacctggaggacaccttcaacccgcccttccgtagctgcgtcgtggaagcaaaggccagctgcgtcatgtgcgcctatacggccatcaacggcgtgccggcgtgcgccaactctgatctgctcaccgggaccgtcaggggggactggggcctcgatgggtacgtcgcctcggactgcgacgccgtggcgatcatgcgcgacgcgcagcggtacgcgcccacgccggaggacgccgtcgccgtctcgctcaaggctggactggacatagactgcggctcctacgtccagcagcacgccgcggccgcaatccagcaggggaagctgacggagcaggacatcgacaaagccctcaccaacctgtacgcggttcggatgcggctgggacacttcgacggcgacccgaggaagaacatgtacggcgtcctcggcgccgcggatatctgcacgccggagcataggaatcttgcgctcgaggcagcgcaggacggcatcgtgctgctcaagaacgacggcggcatactcccactcgaccggtccacggtgacctccgccgccgtcatcggccccaatgccaacgacggcatggcccttatcgccaactacttcggcccgccgtgcgaatccacgacgccgctcaaggggctccaaagctatgtgaacgatgtgaggttcctggccgggtgcaattcggcagcctgcgacgtcgccgcgacggaccaggctgttgcgctggcgggctcggaggactacgtgttcctgttcatggggctgagccagaaacaggagagcgaagggaaagataggacgagcctgctccttccggggatgcaacagagcctcatcactgccgttgccgacgcgtcaaagcgaccggttatccttgtgcttctctccggcggaccggtggacatcacgttcgcgcagtcgaacccaaagatcggtgccatcttgtgggctgggtaccccggacaggccggcgggctcgccatcgccaaagtgctattcggcgaccacaaccccagcgggaggctgccagtgacgtggtacccggaggagttcaccaaggtgcccatgacggacatgaggatgcgcgccgacccgaccagcggctacccaggccgcagctaccgattctaccagggcaataccgtctacaagttcggctacggcctcagctactccactttctcccgccggctagtccacggaaccagtgttcctgcgctctccagcactcttctcactggcctaagggagacgatgacaccacaggatggcgaccgtagctaccacgtcgacgccatcggcactgaaggatgcgagcagctcaagtttccggccatggtggaggtgcagaaccacggccccatggacgggaagcactcggtgctcatgttcctccgctggccaaacacgaaacaaggtcgcccggcaagccagctgattgggttcaggagccagcatctcaaggcaggggagacggctaagctcaggtttgacatcagcccgtgtaagcatttctccagggtgagggcggatggcaggaaggtgatcgatattgggtctcatttcctcatggttgacaaccatgagatggagattaggtttgagccttgagttgtagatggagggtaacaagtatagttcaatacgacgccattgtttcttagtatgatactccagcttcattgttcattcatgccatagaaagtggagtagagtaaaacaa

SEQ ID NO: 120545 - DNA, 1146 bp, Zea Mays
attttatataaataaaacaaaaaacaaaaccgcagcagctcctccactggcacactccccctctggcctctaccctgcctgccgtttccatctccatccagttctccgcacccacccacgaccacgacccacccacccactcctttccccaacccatggccgccgccgccgccgccgccggcacccgggaggagatggtctacatggccaagctagcggagcaggcggagcggtacgaggagatggtcgagttcatggagaaggtcgcggccgccgcagagctcaccgtcgaggagcgcaacctgctctccgtcgcctacaagaacgtcatcggcgcgcgccgcgcctcctggcgcatcgtctcctccatcgagcacaaggaggagacgcggggcgcggcggggcacgccgccgccgccagggggtaccgcgcgcgcgtcgaggccgagctctccgggatctgcgcggggatcctgcgcctcctcgacgagcgcctcgtgccggcggcggcggccgtggacgccagggtcttctacctcaagatgaagggggactaccaccgctacctcgccgagttcaagaccggcgccgagcgcaaggacgccgcggactccacgctcgccgcctaccaggccgcgcaggacatcgccgtcaaggagctgccgcccacgcatcccatcaggctcggcctcgccctcaacttctccgtcttctactacgagatcctcagctcgccggaccgcgcctgctcgctggccaagcaggccttcgacgaagctatttcagagctggatagtcttggggaagagtcgtacaaggatagcacactcatcatgcagcttcttcgtgacaacctcaccttgtggacttctgacatgcaggaggatggtggcgatgaaatgcgggatgcaaacaagcctgacgaggagcagtagtagccaaacatctccatcgatcatgccatgccatgccatgcttgtacaaggaccattttcgtgtgtcctttccttcaatcgtcgacctttcgttttgttgttatactgctattgtggaaccctgttactgttactgttagtgtatcctattggcaataatcaaatgtggtatggttgactactatactaatgggtgatcattattcatcat

SEQ ID NO: 120546 - DNA, 1026 bp, Zea Mays
aaataaaacaaaaaacaaaaccgcagcagctcctccactggcacactccccctctggcctctaccctgcctgccgtttccatctccatccagttctccgcacccacccacgaccacgacccacccacccactcctttccccaacccacggccgtggacgccagggtcttctacctcaagatgaagggggactaccaccgctacctcgccgagttcaagaccggcgccgagcgcaaggacgccgcggactccacgctcgccgcctaccaggccgcgcaggtagcagttcggcaggcagtcatggattgcctctcctctcctaaacgagacctgtcttatcttaattaatacgtacgtataaaggacatcgccgtcaaggagctgccgcccacgcatcccatcaggctcggcctcgccctcaacttctccgtcttctactacgagatcctcagctcgccggaccgcgcctgctcgctggccaagcaggttccccttctccccattctcctggtgatttgagggatgacatgctgttttatgatttgagggctttggtcccaggccttcgacgaagctatttcagagctggatagtcttggggaagagtcgtacaaggatagcacactcatcatgcagcttcttcgtgacaacctcaccttgtggacttctgacatgcaggtaaacacttggaattctgctgtcatgtcagtacgtaagtgatgctaatcatgctgtgtatcaggaggatggtggcgatgaaatgcgggatgcaaacaagcctgacgaggagcagtagtagccaaacatctccatcgatcatgccatgccatgccatgcttgtacaaggaccattttcgtgtgtcctttccttcaatcgtcgacctttcgttttgttgttatactgctattgtggaaccctgttactgttactgttagtgtatcctattggcaataatcaaatgtggtatggttgactactatactaatgggtgatcattattcatcatttgattaagttagataattg

SEQ ID NO: 120547 - DNA, 1844 bp, Zea Mays
atgacggggacgaacggtggcatggccaaggagggcggggacaacgacagcgctaggctctgcggctggactggaggtgtcattgttgccatcctgaaccgtgttgccatcctttcgatccctgctgattcgttccgttcttgtatcgattcctgtcgccaatccataagctgcgtttctgttgacgtcaggcagagtcagggtttcatgggggaatcagacgtgaaggaacagcagccgaacaggctgcaggaggagctgaggaaggagaaagagaaggcacgcgccctagacgagatacaagacctgcaaggcgaactggaggcagcaagagattcagagaagaagatgctgctgtcattgcaggctcaaacaaagcagcttgagcagaccaaagtatccctggaagaggccaagattgagatagcttcgctacgagacagtaggcagccgttcaagaatttcaggagaaggggtttgatgtcattctcctttgccgaccctggcgaggcggagacatggtcgctacagcgtgagctcaggttagctgtggaatccgaggagaagtgcaacaaggccatggatgacttggccattgccttgactgaacaaaccacagaggccagagaagcaaatgtgaagctttcattggcgcaagccgagttgaataatgcaaggacccaagtggagaccttgaaggcctcgctagaaagcacagagggcaagctccagttggcactggaagaggcagaccggctaaaagtcgagtcagatgaattggcagctgcctcaaaagaaaaagagagagggctcgttgattgcatcaagatgtttgaggaggacctaagtaaaggaaaggaagagaacgataagctgattgaatcacagagggtgaccagagatgagaattctcggctgagagagatgctgaagcatgcggtgggcgaagctaatgtagcaagagaatcgctggagattgccagagtggagaattctcgccttaacgaagagatgtttaagaaagagagtaccttgcagagtatcaaccaagaatatgaatccctcaagatcagcgaggcagccgcacagagtagcattaaagaattgaaggatatgattgatgctatgttcagttctgagtcgaccaaaacgtcagcagaagcatcacctcgtgaggccaagggaagcaagatgaaggaaacttctgtggcagcagattatgtgtattctgatgtcgaaagatctactcgtctggacgacataaaaaaccctggaaagcagaaaaagaagacaattctcagaaaatttggtgaaataatgaagaaaagaaactcctaaattgtaatctagtattacgaaagcagtatatcttccattttgtttgttcagatcccttgagcacacaggacagctagaatgccaagatttacaatgatgaaaagatgtgtggggtaacattttttttctttttttacttcatgccatggatttagactacaaagaatggagcatactgtacatacatgtcaaaatacagagaatgaaataagaaagtgtcatagcctttttttatggttttataagtttctgcattttagaatctctataaatccttggcctgctatatgcaactaagtagcccatgttcccagagtacagtatgcccaaattaccccatcgttctgggaaatatgttgataatgaggatatttaacttgtgtcaaggttctgcaaagagcatatttacaagttaattatgtgtgatttatggagcactggaatccgccaccaactggataggcctaagtaaaactgcataaaagtatttcattacgaggtttaag

SEQ ID NO: 120548 - DNA, 831 bp, Zea Mays
ggggcacggtggtcggtgggttgagggttctcagctggctggagactggagcatatgttttctttcaagtccagagtcagggtttcatgggggaatcagacgtgaaggaacagcagccgaacaggctgcaggaggagctgaggaaggagaaagagaaggcacgcgccctagacgagatacaagacctgcaaggcgaactggaggcagcaagagattcagagaagaagatgctgctgtcattgcaggctcaaacaaagcagcttgagcagaccaaagtatccctggaagaggccaagattgagatagcttcgctacgagacagtaggcagccgttcaagaatttcaggagaaggggtttgatgtcattctcctttgccgaccctggcgaggcggagacatggtcgctacagcgtgagctcaggttagctgtggaatccgaggagaagtgcaacaaggccatggatgacttggccattgccttgactgaacaaaccacagaggccagagaagcaaatgtgaagctttcattggcgcaagccgagttgaataatgcaaggacccaagtggagaccttgaaggcctcgctagaaagcacagagggcaagctccagttggcactggaagaggcagaccggctaaaagtcgagtcagatgaattggcagctgcctcaaaagaaaaagagagagggctcgttgattgcatcaagatgtttgaggaggacctaagtaaaggaaaggaagagaacgataagctgattgaatcacagagggtgaccagagatgagaattctcggctgagagagatgctgaagcatgcggtgggcgaagcta

SEQ ID NO: 120549 - DNA, 1368 bp, Zea Mays
cggccgcctctccagggctaacgcgcggaagggcattgggcacgggcagccaccgcgccgctcgcgtccacgtgaaccccaccgcgccgctcgcgtccacgtgaaccccaccgccgccaccacccgccgcggcacgccccacccacaaaaacccaaccgcccaccacccatacccagccgcgccttatcctccaccgccgccgccgccccctccccccaactactcgtcctcacccgcacccgtagtcgccgcccgcccccagatctagatctgagcctcccgtgaccagacgatggccgacgagcctccgccaccggcgctagcgaggaagagcgcgccggcgcagccgtggtcgcacgtggagaccatgcacctcatcgacgcgtacgaggagcgctggacggcgctgcgccgcggccagctcaaggcgcaccagtgggaggaggtggcgaccgaggtcgccgcccgttgcgccgccaacccgggggtcatcgctcagcgcaagacgggcacgcagtgccggcacaagctcgagaagctccgcaagcgctaccgcaccgagggcgcccgccccgtcacctcgctctggccctacttccgccgcatggatcgcctcgaacggggggccctcgcagcctacccggccgcggctagctcgccgcctgccgccgacggcgacgaagaggaggacgaggaagacgtgcaggaggaggaagaagtggaagagctcgtcccccgcaacaacacccggagcatcaacggcatcatccgggaattcggcaccggcctcgccccgcgccacccgcagctgcagctccacccgccgccttcttccatcacgccgtccaccgctcccccccgcaagagggtggcctacgaggcattccaggccaaggacgaggccgtggccgtggagatgacccgccgcggcggctctgggtgggctgtcgcgcagctctcggttgtggtgagggatttcggcgagggtgtcatgcggctggagcggcggcgcatggaggtgcagtgggagatcgagcgcgggtggcaggaggcggacgcccgccacgccaggatgctcaaggacgcgttgcgccagttccgcgacactgccgccgccgccgcctgcgtcttgccgccgaagaaggccaggagagaccatggagactcgtagtaataggctaatagcgattgatttgatcctgatgctgatggtgatgctagcagggaaggcatccccatccaccccaattggatgttcctccctcttctgtccatgtcgtatatgaatatgagtggtagtacagtactgatttgcagcagcattatgttcatttgtgacctcatttatgttaagcttgcgttgcgtt

SEQ ID NO: 120550 - DNA, 802 bp, Zea Mays
tgatggtgcatctagtgcatcttcccattgcggatcgaccaataaaatctatagttcgtatggcacaacaagcaaaacccaagctgttggctccagatgcatcagtggaagctatgagccttatggtgaagattgtggtgctcttaaagttaacccttttgccagcaagaacaatactgctgtgtatcagtctaaattgggcacacaacctgtctatgttgtggcaactagggcaaattgttttgcttctggttcgatgcagacaaataacagtgataaagaacttgcatccagtgccatggaacggattgatagcgtgaagaacagaacaagtaaagaaacaggatttgtcactgaagcttataacaatgatgcctttagtggtggtattactgaaaagggttttgcgcagttcagtaacagttctactcacataaagcccaatgcttctggccattgttcactacctgaatcaaaaactccaacaaatggaagtgatatcaactgcatcaagggctcttcggttaatagaggtgatgttagcttcacaaatggctcgtttgtcaataggcccatcaacaacaatgaaccaaatgtagctaggcttgaggtgatggagaagttgaataatgtgatgcaaaaccgttataatgatcacgctcctggttttgatcctcatgctgcagctagtgctagccggaatgccaatggtcttatgcctatgcatgccaattttggttgcatgtcctctacagttcaatctgttgctaatgtttcaacgaccagcacatctcaagatcag

SEQ ID NO: 120551 - DNA, 1058 bp, Zea Mays
ggaagcaaagcccaatctagttctgcaccccttgctaaaacctctcagttcaagggcatggctggaccaaattctgtacctcctgctgagccctctcagtttgggagcatgattagacctaatttggtacctcccgcatcttctcagtttttggggagcatggttcgaccaaattctgtaactccagaatcctcacagtttggaagcatgaccagaccaaactctgtacctcctgtatcgtcacagtttgttaacatgcccagtcaaaattttgtgagcgcatccgagccaactctagttttggggtacgcaccgcagattggaagtgaccctccacatcaagtccagttaggatgggatttgtccttgccaaggatggttactggcggcagcatggtcacttgtttatgtatatggtgcaacagtcagttccatcattttggccctgttgatggacagcaggctagttcttttggcttcatttgccccacctgtaaagataggatgtctggtcatcacagtatgcccagcaatggttcatggcagccttgaggtgcagtgctgtttgttaatcatctgcatttctgcatctgagggatctcgtggttttctgtacaccatgtctggcgactgttgaggacagaaaattgtccgcacaagcagaagtggtcccgcctccaagttcagtggactgtcaagggtagctgggagctggaatgtatttagttggtactagggtatgcaatgagagaagttgggtttctctactacttgtcaaagatagcaatgggagaccatgatgaattcaggccatctttttttttcttgaatccaccagttaagctggcatgtttgtcggagctatatctcaggttattttgagctctagcttcgatggggagttgacttcattattggtactgaacttaaaatgactccagtccagtgtcttgttggttgtgtaaattatttgttagctcaggtggattaggcgcctagctcttgctgtaatatttccctaacactgggcagcctttgtctatcctttcctgatgagg

SEQ ID NO: 120552 - DNA, 2887 bp, Zea Mays
ctcggcaacagtcaggacttaggacgcaactcatccccgccgcgagcaacgccaatgctccgaccgctacacgctacagccgccgccaccgctagctaggcccagccgcctcctcccttcccctccacgacgatggacccgaccacgcccgtccttgcgctctccaaggccttcgcctcctcccgcaccaagcccttcctcctcctcgccccgcaccgccgccgctccctcttcgccgcccgcgcgtctgccccctcctcgtcctccgtgccgggcgacctcctcatctcgctcgcgcggctcgcgctccgcggccccggaccccccgcggcgcctcggcggtggttcgcgagtgtctcttctgcctcgcctctcgcctcgggtggtccgccccgcggcggaggcggtcgggggaacggtgatggtgacggcggtggtggtggcgacggctggaagcgcccgcgcgcttcccagggagcgggtgtggtggaggaagcggcagcgcagggagccgatgtcatcgtccttgacgttgggggaatgtcgtgtggtggatgcgcagcaagcgtgaaacgtattctggagagtgagccccaggtacggtcagcaactgttaaccttgccactgagatggcagtcgtctgggcagtgcccgaggatagtgttgttcaggattggaaggagcagctgggtgagaagcttgccaatcagttgacgacatgtggctataaatccaatcttcgagattcttcaaaggttggttcacaaacagttttcgaaagaaagatgcaagacaaacttgaacagctgaaacaaagtggtagagaacttgctgtatcatgggcattatgtgcggtttgccttgtgggacacatttctcacctttttggagttaatatgccactgatgcacgtcattcattccactggatttcatttgtctctgtcaatatttacatttgtcggtcctggtcgaagactaatacttgatggcctaaagagtctgttgaaggggtctccgaacatgaatacgctggttggtttaggtgctttgtcatcctttgcagtcagctcaattgcagccttcattccgaagctgaatctggagcagagggcaaaacttaaagctaccagtgatatgactggactgcttagtattcttccatctaaagcacgcctaatggtggataatgatgctgagaaatcatcattgattgaagtcccatgtgatactctagctgttggggactatgttgttgtgctacctggggatcacatcccagcagacggtattgtgaaagctggaaggagtacagttgatgaatcaagtttgacaggtgaacctatgcctgtaacaaagataacaggggcagaagtatcagcaggaagtattaacttgaatggtaaactcactgttgaagttagaagacctggtggtgagactgtcatgtctgacatacttcacttagttgaagaagcccagacaagggcggcccctgttcaacgattggctgacaaggttgcagggaactttacatatggagtcatggcactttctgctgctacttacatgttctggagtattttgggttctcaacttgtacctgctgctatccaacatggaggtaattgcttgtccttgtgctcttgggcttgccactcccactgctgtactggttggcacttcattaggtgcaacaagaggacttcttttacgtggtggggatgttttggagaagttctctgatgttgatgccgttgtgtttgacaagactggaactttaacaattggtagacctgtgataactaaagtaataccttctagaggcatgggcgatgcgaatacaaaggatttgggggccaaccagtgggcagaggctgacattctgagttttgctgctggagtggaatcaaatacaaaccacccgcttggaaaagccatcatggaagctgcaggggctgccaactgcgtcattatgaaggcaaatgatggatccttcatggaagaaccaggatctggtgctgtggctaccattggtgagaagcaggtttctgttggaacattagattggattagaaggcatggggtcattcacaaccccttcccagaagcagagcattttggccagtctgttgcatatgtagcagtgaatggtgctctggctggtcttatttgttttgaggataagctcaggggagattctcgtcaagttatcgagacactatctaaacaaggaattagtgtatatatgttatctggggacaaggaaagtgctgctatgaatgtggcttcagttgtcggtatccaggcagacaaggttcttgctgaagttaaaccacatgagaaaaagaagttcatatctgaactccagaaagagcacaaggtagtcgccatggttggtgacggcattaatgatgccgcagcactagcttcagctgatgttggaatcgcaatgggtggaggtgttggggcagctagtgatgtatcttcagttgtacttatgggcaacaggttatcccagcttatcgatgctttagagttgagtaaagagaccatgaagacggtgaagcaaaatctttggtgggctttcctgtataacattgttggactacccattgctgctggagcattgcttccagctacggggacgatactgacaccatcaatagctggagctctgatgggttttagttcggtcggtgtgatggccaactcgttgcttttgagggtgaggctgagctcaaggcggaagcgagaaccactgaaagccatctctgatgaggttgagaaaaattactcatcgaaatggagtacctgagtagttcggatcttagaccatgttcacgttcactcattcatatgatttggacacacgcatcaaaggcag

SEQ ID NO: 120553 - DNA, 3176 bp, Zea Mays
ctcggcaacagtcaggacttaggacgcaactcatccccgccgcgagcaacgccaatgctccgaccgctacacgctacagccgccgccaccgctagctaggcccagccgcctcctcccttcccctccacgacgatggacccgaccacgcccgtccttgcgctctccaaggccttcgcctcctcccgcaccaagcccttcctcctcctcgccccgcaccgccgccgctccctcttcgccgcccgcgcgtctgccccctcctcgtcctccgtgccgggcgacctcctcatctcgctcgcgcggctcgcgctccgcggccccggaccccccgcggcgcctcggcggtggttcgcgagtgtctcttctgcctcgcctctcgcctcgggtggtccgccccgcggcggaggcggtcgggggaacggtgatggtgacggcggtggtggtggcgacggctggaagcgcccgcgcgcttcccagggagcgggtgtggtggaggaagcggcagcgcagggagccgatgtcatcgtccttgacgttgggggaatgtcgtgtggtggatgcgcagcaagcgtgaaacgtattctggagagtgagccccaggtacggtcagcaactgttaaccttgccactgagatggcagtcgtctgggcagtgcccgaggatagtgttgttcaggattggaaggagcagctgggtgagaagcttgccaatcagttgacgacatgtggctataaatccaatcttcgagattcttcaaaggttggttcacaaacagttttcgaaagaaagatgcaagacaaacttgaacagctgaaacaaagtggtagagaacttgctgtatcatgggcattatgtgcggtttgccttgtgggacacatttctcacctttttggagttaatatgccactgatgcacgtcattcattccactggatttcatttgtctctgtcaatatttacatttgtcggtcctggtcgaagactaatacttgatggcctaaagagtctgttgaaggggtctccgaacatgaatacgctggttggtttaggtgctttgtcatcctttgcagtcagctcaattgcagccttcattccgaagctggggtggaagacattttttgaggaaccagttatgttgatagcttttgttcttctagggaagaatctggagcagagggcaaaacttaaagctaccagtgatatgactggactgcttagtattcttccatctaaagcacgcctaatggtggataatgatgctgagaaatcatcattgattgaagtcccatgtgatactctagctgttggggactatgttgttgtgctacctggggatcacatcccagcagacggtattgtgaaagctggaaggagtacagttgatgaatcaagtttgacaggtgaacctatgcctgtaacaaagataacaggggcagaagtatcagcaggaagtattaacttgaatggtaaactcactgttgaagttagaagacctggtggtgagactgtcatgtctgacatacttcacttagttgaagaagcccagacaagggcggcccctgttcaacgattggctgacaaggttgcagggaactttacatatggagtcatggcactttctgctgctacttacatgttctggagtattttgggttctcaacttgtacctgctgctatccaacatggaggtgcaatgtctttggcattacaactttcttgcagtgttctggtaattgcttgtccttgtgctcttgggcttgccactcccactgctgtactggttggcacttcattaggtgcaacaagaggacttcttttacgtggtggggatgttttggagaagttctctgatgttgatgccgttgtgtttgacaagactggaactttaacaattggtagacctgtgataactaaagtaataccttctagaggcatgggcgatgcgaatacaaaggatttgggggccaaccagtgggcagaggctgacattctgagttttgctgctggagtggaatcaaatacaaaccacccgcttggaaaagccatcatggaagctgcaggggctgccaactgcgtcattatgaaggcaaatgatggatccttcatggaagaaccaggatctggtgctgtggctaccattggtgagaagcaggtttctgttggaacattagattggattagaaggcatggggtcattcacaaccccttcccagaagcagagcattttggccagtctgttgcatatgtagcagtgaatggtgctctggctggtcttatttgttttgaggataagctcaggggagattctcgtcaagttatcgagacactatctaaacaaggaattagtgtatatatgttatctggggacaaggaaagtgctgctatgaatgtggcttcagttgtcggtatccaggcagacaaggttcttgctgaagttaaaccacatgagaaaaagaagttcatatctgaactccagaaagagcacaaggtagtcgccatggttggtgacggcattaatgatgccgcagcactagcttcagctgatgttggaatcgcaatgggtggaggtgttggggcagctagtgatgtatcttcagttgtacttatgggcaacaggttatcccagcttatcgatgctttagagttgagtaaagagaccatgaagacggtgaagcaaaatctttggtgggctttcctgtataacattgttggactacccattgctgctggagcattgcttccagctacggggacgatactgacaccatcaatagctggagctctgatgggttttagttcggtcggtgtgatggccaactcgttgcttttgagggtgaggctgagctcaaggcggaagcgagaaccactgaaagccatctctgatgaggttgagaaaaattactcatcgaaatggagtacctgagtagttcggatcttagaccatgttcacgttcactcattcatatgatttggacacacgcatcaaaggcagttgtcagttgaacaaatgaaacagatgtagtatgcaattgctgaggtcagtcagttcctgtggtttggtagatcttcatggtgtgctataatataataccccctctattccaatttataaattttttgacttttttttaccaagtttgattagcttgtcttatttattttttttcgaaaaaatagaaa

SEQ ID NO: 120554 - DNA, 1126 bp, Zea Mays
atcgtctcttgttcctggtataccttatgtaaatgctatctgttttaaagttttctccctgcactgtcttgtaaaagtgtatgttgagcctgtttgctagtaaaattataatatttcaggcatggggtcattcacaaccccttcccagaagcagagcattttggccagtctgttgcatatgtagcagtgaatggtgctctggctggtcttatttgttttgaggataagctcaggggagattctcgtcaagttatcgagacactatctaaacaaggaattagtgtatatatgttatctggggacaaggaaagtgctgctatgaatgtggcttcagttgtcggtatccaggcagacaaggttcttgctgaagttaaaccacatgagaaaaagaagttcatatctgaactccagaaagagcacaaggtagtcgccatggttggtgacggcattaatgatgccgcagcactagcttcagctgatgttggaatcgcaatgggtggaggtgttggggcagctagtgatgtatcttcagttgtacttatgggcaacaggttatcccagcttatcgatgctttagagttgagtaaagagaccatgaagacggtgaagcaaaatctttggtgggctttcctgtataacattttactctgcaggttggactacccattgctgctggagcattgcttccagctacggggacgatactgacaccatcaatagctggagctctgatgggttttagttcggtcggtgtgatggccaactcgttgcttttgagggtgaggctgagctcaaggcggaagcgagaaccactgaaagccatctctgatgaggttgagaaaaattactcatcgaaatggagtacctgagtagttcggatcttagaccatgttcacgttcactcattcatatgatttggacacacgcatcaaaggcagttgtcagttgaacaaatgaaacagatgtagtatgcaattgctgaggtcagtcagttcctgtggtttggtagatcttcatggtgtgctataatataataccccctctattccaatttataaattttttgacttttttttaccaagtttgattagcttgtcttatttattttttttcgaaaaaatagaaa

SEQ ID NO: 120555 - DNA, 1023 bp, Zea Mays
ccacgttccctctctgctccagcctggttccgttttccaacacataatcctattatcatcccttggtgttctgttttgcattttgatctatcggtcatcgcattccattccattccatcccatcccatcccgccatccatccatccatggagtccttctcccacatcaccggaggggacgacgacgccggcggcgagggctgcaacagctgcgagtcgggctggacaatgtaccttgcctcgcccatgcatatgcatggccacgacgatgacgacgacgctggcggtagcgccaaccaagggagcagcgtcgacgatggctacggttacatgatcaacgggggcggcaataagaagcaggattacgacgacgacgatggcgacggcgactccctcgcttccgatgcctccaccggcccagctaaagccgccaacaagtcgccgtcgcccccgccggaacacaaacacggcaaagaagacgacgatagagggcatcgtggtggtggtggcggcggcaaggaggagacaaagctcgccaccagctcacgcaagaaagctgctgctggcaatggcaagctcatggacaaagcagcagcagcagcagcaggaggaggcgagggcaactcgtcaaggcgaggccacggcaagggaggcggcggcggctcttcaaggagaagcttcttcctctggtagaattaacaaacatatatggacgacaccattgctggcgtggcggtcgatcgagctcgaaacctcttgtttgttagaagaagaagaagaagaagcaacaacaagcatgcattcattcgtggagatggagatcatcaatgggaaggctatttttttttggcccttgattttgccttctccatgcatacgtacggccatctcctcctcgtggaaatccactgttgttcttcagtgtcctgactttgtttttgttttttttaacaaaaaaaaacaaatgttgcttgcaatctcattctgtgtttttagatattaaagaacacgctgctctttacct

SEQ ID NO: 120556 - DNA, 781 bp, Zea Mays
attgaaaaaaaaggcccgttttcattggtcaatcggtcagcaggatttccctcttccatatgccgatctcccggacacggtggcctcccgctgccggagcgccatcgccgccgcagcaagcggcgcagggtacggtttccgccgtggcgccgaagcgtcgacccgtcgtgggttcccgttctcggcccgcgaaggaggcggaggccacggctcgacttccgtctgcggactactactcgtaaaggccttctcacttgctccccctttctcgtgctctgtgtttatgcaaatgtccctcagggtcgtgctactgcatcgggaactgcctagctggttccgggttcacgaattaagcggtgctggtgactcctacgtgcgcttctttatatgcacgcgtgtgcccaattgtgggtgcttaattgatactggcaactgacgagggtagtctctaacgtacatgactactttgagatgttttaggtcttgcagtttcttgtttgcttttccttgtagctcgctcagagtttgggaaaccacattgcatgtgtccaggaccaatgtggcaatgtgtccaaggccaagacgtttctgccagatgtcttatgtgctttgtaaactaatgaggattagttttcgaattgttgacaatataatttctgtttttcgacagttatgtgaggattgcttggtctttctggtttgacagttttaacagcacattgcagtgaattttcatctctgcaagttcatatggctacacaagttgtcaatagtacaaaac

SEQ ID NO: 120557 - DNA, 783 bp, Zea Mays
attgaaaaaaaaggcccgttttcattggtcaatcggtcagcaggatttccctcttccatatgccgatctcccggacacggtggcctcccgctgccggagcgccatcgccgccgcagcaagcggcgcagggtacggtttccgccgtggcgccgaagcgtcgacccgtcgtgggttcccgttctcggcccgcgaaggaggcggaggccacggctcgacttccgtctgcggactactactcgatacgtgttcgaagaaattgttatagggtccaagaccatccggctaagcaggtggccgtttacaaggttgtttgcagatccagcaaaattttgccaagaaaagagctctactgtgaaggacatgtctccatctctgactggtgaagccatgtgaaatggttcagtaactcatttagctcatgaccacccgacggataagaactcagtagctcgtgtcactaacttctatctgttatccttcaaatcagtgactgtatgttttcactaggcccaagttaaccttgtacagttttgaaccaaaggtaggtttcgtttggtggacctgtttaattacaggtatactgagatccattgcctatatatatctatggaagtacactgacattgaaattattcctccacagggatgtttcagcttttcacctgatacatgggtgtcactcatatccatgaccttggcatagtttcctattccttttcttctgaaatgatgtaatttgtggggcgccagcaccttgtctcctaatattctgtttgcagtacc

SEQ ID NO: 120558 - DNA, 889 bp, Zea Mays
attgaaaaaaaaggcccgttttcattggtcaatcggtcagcaggatttccctcttccatatgccgatctcccggacacggtggcctcccgctgccggagcgccatcgccgccgcagcaagcggcgcagggtacggtttccgccgtggcgccgaagcgtcgacccgtcgtgggttcccgttctcggcccgcgaaggaggcggaggccacggctcgacttccgtctgcggactactactcagagctaaagaccctggagcatgtagagaaaaccaaaaaatatcagggtaagcttgcagcacagttgaaggccaaatatttttccaacaagacttttgaaaaaggatacgtgttcgaagaaattgttatagggtccaagaccatccggctaagcaggtggccgtttacaaggttgtttgcagatccagcaaaattttgccaagaaaagagctctactgtgaaggacatgtctccatctctgactggtgaagccatgtgaaatggttcagtaactcatttagctcatgaccacccgacggataagaactcagtagctcgtgtcactaacttctatctgttatccttcaaatcagtgactgtatgttttcactaggcccaagttaaccttgtacagttttgaaccaaaggtaggtttcgtttggtggacctgtttaattacaggtatactgagatccattgcctatatatatctatggaagtacactgacattgaaattattcctccacagggatgtttcagcttttcacctgatacatgggtgtcactcatatccatgaccttggcatagtttcctattccttttcttctgaaatgatgtaatttgtggggcgccagcaccttgtctcctaatattctgtttgcagtaccaa

SEQ ID NO: 120559 - DNA, 1414 bp, Zea Mays
attgaaaaaaaaggcccgttttcattggtcaatcggtcagcaggatttccctcttccatatgccgatctcccggacacggtggcctcccgctgccggagcgccatcgccgccgcagcaagcggcgcagggtacggtttccgccgtggcgccgaagcgtcgacccgtcgtgggttcccgttctcggcccgcgaaggaggcggaggccacggctcgacttccgtctgcggactactactcagagctaaagaccctggagcatgtagagaaaaccaaaaaatatcagggtaagcttgcagcacagttgaaggccaaatatttttccaacaagacttttgaaaaaggatacgtgttcgaagaaattgttatagggtccaagaccatccggctaagcaggtggccgtttacaaggttgtttgcagatccagcaaaattttgccaagaaaagagctctactgtgaaggacatgtctccatctctgactggtgaagccatgtgaaatggttcagtaactcatttagctcatgaccacccgacggataagaactcagtagctcgtgtcactaacttctatctgttatccttcaaatcagtgactgtatgttttcactaggcccaagttaaccttgtacagttttgaaccaaagggatgtttcagcttttcacctgatacatgggtgtcactcatatccatgaccttggcatagtttcctattccttttcttctgaaatgatgtaatttgtggggcgccagcaccttgtctcctaatattctgtttgcagtaccaacgtcctttagcgctctggtgccaattattgcaatgcatcttgtggacaacacgaatggcaatctggaggtgccataatgacgagcagcggagcagatgaatgaacacacctgaactgcatgagctacctgttatcttcatgcatgcaacggtttgtcggagtgctatgccctcttgtactttccagttgtttcgtttcttggtagtataaggaaaggtccatgggcagcactgtgagacatggcatggtggatggtgggtgcatcggtgcttgttccaccggccctgtgatgtgagcatctcacgctggtgttcagttcacacgtacgtgatgccgcacttgctgctcagatctgttttgctttgctctgctgctcagtgctcgtgcacaggttcctctctctctctctctccagccacacaataattttgcacttgatatgtatgcaatgcagtttcagaggctgtaacatcgtttgtgtgagaataaaggcatgccttgttcatgtcttccttattatgaacggacgagggcagtctttcattttcatttgagataaaaactaggactccacttttaatttattattatgttcatttggcattggattgtatgccaaaaaggtct

SEQ ID NO: 120560 - DNA, 980 bp, Zea Mays
atttgaattgaatacagtatgtatttattggtttgaatttcaaatgctggcatcaatcttgaggcacatgtttaggcgtttattgtgcacttaccaaacatgtaaaaatgacactcctaatctaaaattcaagctggcacactaattatgtggagactgaaataaaatattttcttggtggccaagcctaatagtattgttgaactgcaaagttctgaataatcatggcatgagtatatggatcacactttattagctgatgaataactcgacgccttacggttatgtcatattgtagtttcataagaaatgaatttcaaattcccttctgttttttcttcttctttttaatctgactgatcagttggctgcaagtgggaggcctatactggcaatgcagtcatatgtaattatgattctctttactgtgaacaggatacgtgttcgaagaaattgttatagggtccaagaccatccggctaagcaggtggccgtttacaaggttgtttgcagatccagcaaaattttgccaagaaaagagctctactgtgaaggacatgtctccatctctgactggtgaagccatgtgaaatggttcagtaactcatttagctcatgaccacccgacggataagaactcagtagctcgtgtcactaacttctatctgttatccttcaaatcagtgactgtatgttttcactaggcccaagttaaccttgtacagttttgaaccaaaggtaggtttcgtttggtggacctgtttaattacaggtatactgagatccattgcctatatatatctatggaagtacactgacattgaaattattcctccacagggatgtttcagcttttcacctgatacatgggtgtcactcatatccatgaccttggcatagtttcctattccttttcttctgaaatgatgtaatttgtggggcgccagcaccttgtctcctaatattctgtttgcagtacc

SEQ ID NO: 120561 - DNA, 1213 bp, Zea Mays
atcgagcgagcgaccatggcccgtgctctcaccctcaccgtcttcctcgtcgtcatcgcctctgctgtcgtgtcgttcgctgcggatgaggcaccggctgcctcgccaaagcattcggcctccacaccgtcaaaggcacccagcacgtcgcccgacaagtctgagaaggcccccacggcgtcgtctgaggatggtgcggctacccccgctaaggccccagcttccgcggcctccaactcagaggcgtcaccttccgaggcacctacctccgggtctgagtccggtgccgcctcacctaacgagagcgctgcgtcagaggaggcccctacaagtgcccccgaggactcatcatcggccagcccttccacgtccccgtcggaggctgaggctgcagtatcgcccgatagtagcagcggtggtggtgccacctcgaaagagccttccgccagcgaggctggtgccgcagaggagccgtcgacggccgaggccggcggcgcatcggccgacagcccgcctgagccgacccacacttcttcagactcgccagcggagtctcctggcccggccgctgaccacgagagcggcagcccgagcatgttgggtggcactggccttgccctggtcatgctggtcgcgaccgtcacgtcctccgccatgctttgtttctaaacgaccacgatcgctctgagtttaatatggtcatgcatgcatggttgtgggagccgatgactacgccttattacgagtctctgaatctctccttagggttttttaggcttttcgattcatccttttcggggttaccttatttctatgtttgttttttgggtattgttttgtaatttttaactacgataaatgaattgttgcatagctgtgttttatgtatccactcgtgtaatactatgtgttttaacagtcttctcttctagcatttgttttgttttttcgtgatctgaactttaactctggaagtgaggaaggtcgcggtggtggtgtcgcctcgacatttgtttggtaattagaatgatggaaaatgaaaatgaataccaagatgaaaaagtggatcctgatggctttatgctagttcaatctagaaagaagaaagaaaaattgaaaagcaaaataatgtctccttcctttaaggtagatgaaaattttgaccttagaaagaagaggaaaggtaatgggaaaatgcctactaatgaagacg

SEQ ID NO: 120562 - DNA, 1531 bp, Zea Mays
ttcctctagcctggtttctttgtggcgatgagctgagcaacaagtctggtttgtgtgaaggtatttctttctgtaaaatcacaaagccagcccatcacctcagtcctcacactgacatttcactctcggctgctggagtgtcggccgctgccatctgcctgccgctcactcccacgcgccgcaatgtgccactccccactcggcgccgccaccaccaccgcgggggcgctagcgctcctcttcctcctgccgctagcctcggccgccgccgccggcggcggcaccgcggcgaaggcgacgcccaacatcacggcgctcatgtccaagggcgggtgcaaggcgttcgcgtcgctgctggacaagtcccccgacgctctgtcggcgttcgagtcggcggtgagcggcggcgtgacggcgttctgcccgacggacgaggccgtgcgcgggttcatgcccagctaccggaacctgagcgcggacggcaaggcgtcgctgctgctgttccacgcggtgcccgtgtactacacgctgcggggcctgaaatccagcaacgggcccatgaacacgctggccaccgacggcgccgccagcaactacaacctgacggtgcagaacgcgggcgaccaggtgacgctgcggacgccggcggccgacgcgccggcccgcgtgcgctccaccgtctacgacagggaccccgtcgccatctacgccgtggacgcggtgctggagcccgtggagctgttcgaccccgtggcggacgcgccgacccctgcgcccgcgccggcgccggcgctggcgcctaggtccgccaagcggacgcggcaccagcggcggcgcggagcggacgcgcctggcccggccgccgccgacgcctcgccggccgaccagaggaaggactacaagaagaacgcggcggccccgtgccgcacgcggtggctcgcgaccgccgccgccgctatcgccgtggccgccgccttggctgcttagggcggggtggtttaaagattgctcggccacccagctgttgtctttggatggagacgccatgcctttttggttcttggtcatgctcggttgcttattacttcatcgattactgccgttgttagtatgaagtatgaacaaggtcgatatgtgacctggtggtgtacatcaaaactcaaatcttgttgattcgtaagggcgtggccaggtttggttatgctgactcagagagagcgagcagttcattcttctagctgcaatgggtgtgtagagagcagaggttccatatccatggtcgacgagcagcagctagctagctagctgcagtgtgcaagtgcaactgggcatgaatcctggggtgaaaatgcataaaacatctgcaggaccattttggttggtctgctgccaccaccatgtcggtggcgtgaatactgattcgcatggacggatctacgggcggagaggattccaacggccgtagtacagaaccgaaatgttctccgatttcaaagccatatttattgtttactacgtactatattttttt

SEQ ID NO: 120563 - DNA, 89 bp, Zea Mays
tttcctttttctttgtcaaagcttctctacgctcggttgatggggtcggccatcatgtagccatattagtagtcccctgcgcacaacag

SEQ ID NO: 120564 - DNA, 1419 bp, Zea Mays
gcaaacgagcttctcttgtcactcatcagcacggttagtatagctagccaccatgaaggtagagcgcgatctccacatgagccggggcgacggcgaggacagctacgcctccaactcaaggcttcaggagaagtccatactgaagacgaggccggtgctgcacaaggccgtggcggcggcgcacgccttgtcgctctcctcaggaggacccggcggcggcgccatggtcgtcgcggacctcggctgctcgtcggggcccaacacactgctcgtcgtctcggaggtgctagcagcggtggcgatggtggccggcggcagcgcccaaccgcagcacgtgcagttcttcctgaacgacctccccgggaacgactttaacctcgtcttccggtcgctggacctgttgaagaacaagaagctggccgccaaggacaggcgggaggagtcgctgctaccgccgtactacgtggccgggctgccgggctccttctacacccggctgttcccggaccactgcgtccacctcttccactcctcctactgcctcatgtggcgctccaaggtccccgacgagctcgccggtggcgcggtcctcaacgagggccacatgtacatctgggaaaccacgccgcaggcggtggtggccctgtacaggaggcagttccaggaggacatgtcgctgttcctcaggctttgccacagggagctcgtgcccggtggccacatggtgctggcgttcctgggcaggaagaagagcaaggacgtgcttcgtggcgaggtcagctacacgtgggggctcctcgcgcaggctctccagtccctcgtcaaacagggccgtgtgaagaaggataagctggactccttcaacctgccgttctacgcaccttcgatggacgaggtgagggacgtgatcacgcggagccaggcgttcgacatcacccacatccagctcttcgagtccaactgggatccacacgacgacgacgacgtggagatgaagatggaagaagacgtcgccgccgtccagagcggcgtcaacgtcgccaggtccatcagggccgtgatcgggcccctcatcgcccgccactttggcgagcacatactcgacgatctcttcgagctgcatgccaaaaatgtcgcagtgcacctgcagaaagtgaagaccaagtaccctgtcatcgtcgtttccctccaggcgaaatgagccgcgcgccaaataaaggaccaagctagctgatgcaaaatctggcgtcaagttagctattagtaccgctactattatatgcatgcagaataattagtcaaacaatcagaaaaataaagtgcctcagagactgttagtggcagatccaatgtttcgttaattatatgtagtgtaatggtaatggtaatggtaatggtagacatcaggtttcatcgtcc

SEQ ID NO: 120565 - DNA, 1354 bp, Zea Mays
ccttccctctcctgctctgcaaaccatacctttcattagcacggtatacgtacgtagcgtagccatgaatgtagagcgcgatctccatatgacccggggcgacggcgaacacagctacgcctctaactccaggcttcaggagaagtccatactgaagacgaggccggtgctgcacaaggccgtcgtggcagcggctcacgcctgcttgtcgctctcctcaggacccggcggcgctatggtcgttgctgacctcggctgctcgtcggggcccaacactctgctcgtcgtctccgaggtgatcaaagcggtggccgactgctgccgacacgagcagcagctggccgccggcggccaaccacagcacgtgcagtttttcctcaacgacctccccgggaacgacttcaacctcgtcttccagtcgctggagctgatcaggaagctggccgccaaggacgggctggaggagccgctactgccgccgtactacgtcgccgggctgccgggctccttctacacccggctgttcccggaccgcaccgtccacctcttccactcctcctactgcctcatgtggcgctccaaggtccccgacgagctcgccgctggcgccgtcctcaacgagggccacatgtacatctgggagaccacgccgccggcggtggtagccctgtacaggacgcagttccaggaggacttgtcgctgttcctcaggctacgccatagggagctcgtgaccggtggccacatggtgctgacgctcgtgggcaggaagagcaaggacgtgctccgtggcgagctcagctacacgtggggcctcctcgcgcaggctctccagtcgcttcttaaagagggccgtgtggagaaggagaagctggactccttcaacctgccgttctacgcaccatctttggacgaggtgagggacgtgatcgcgcggagccaggcgttcgacgtcacccacttccagctcttcgattccaactgggatccacacgacgacgacgacgacgatgacgcggagatgaagatggaagaagaagacgccgtccagagcggcgtcaacgttgccatgtccatcagggccgcgatcgggcccctcattgcccgccacttcggcgagcacatacttgacgatctcttcgagctgtatgccaagaatgtcgcggtgcacctccagaaagtgaagaccaggtaccctgtcatcgtcgtttccctccaggcgaaatgagccgcgcgccaaataaaggaccaagctagcagatgaaaaataatattaaatctggcgtcaccgctactactatatgcacgcagaagtattaatcaaccaatcagaaaaataaagtgcctcagagac

SEQ ID NO: 120566 - DNA, 3425 bp, Zea Mays
aatcctggggtctcccgctctacaatcccaaggcgacgaggaggtgccgctcaccacccacccgcggcctcgggccctcggccaccctctgctctgctcccccaatgcctcagcgcctgggcgccaccacggcggcgaggctggtcgcgctcctcgtgtgcctctccccggcgctgctcgcgccctgccgcggtgtcaacgagcaaggccaggcgctgctgcgatggaaagggtcgtcggcgcgcggcgcgctggactcgtcgtggcgggcggcggacgcgaccccgtgccggtggctcggcgtggggtgcgacgcgcgcggcgacgtcacgtcgctgaccatcaggtcggtcgacctcggcggtgctctcccggcggggccggagctgcggccgctgagctcgtcgctcaagacgctggtgctctccggcaccaacctcaccggcgcgatccccagggagctcggcgacctcgccgagctcaccacgcttgacctcagcaagaaccagctgtccggcgccatcccgcacgagctctgccggctgacgaagctccagtcgctggcgctcaacagcaactcgctgcggggcgccatcccgggcgacattggcaacctcaccagcctgacgaccctcgcgctctacgacaaccagctcagcggcgccatcccggcgagcatcggcaacctgaagaagctacaggtgctgcgcgccggcgggaaccaggcgctcaagggcccgctgccgccggagatcggccggtgcaccgacctcaccatgctcggcctcgccgagaccggcctctccgggagcctgccggagacgatcgggcagctcaagaagatccagacgatcgccatctacaccgcgatgctcaccggctccatccccgagagcatcggcaactgcaccgagctcaccagcctctacctgtaccagaactccctctccgggcccatcccgccgcagctcggccagctgcgcaagctgcagacggtgctgctgtggcagaaccagctcgtcggcactatcccgccggagatcgccaactgcaaggacctcgtgctcatcgacctgtcgctcaactcgctcacggggcccatcccgagcagcttcggcacgctgccgaacctgcagcagctgcagctcagcaccaacaagctcaccggcgtcatcccgccggagctctccaactgcacgtcgctgaccgacgtcgaggtggacaacaacgagctgtccggggagatcggcatcgacttctcgcggctgcgcaacctgaccctgttctacgcgtggcagaaccggctgaccggccccgtgccggcaggcctcgcgcagtgcgagggcttgcagtcgctggacctctcgtacaacaacctcaccggccccgtcccgggggatgtgttcgcgctgcagaacctgaccaagctgctgcttctgaacaacgacctctccgggttcataccgccggagatcggcaactgcaccaatctctaccggctccggctcaacgacaaccggctttccgggacgatacctgcggagatcggcaagctgaagaacctcaatttcctcgacctgggcagcaaccgccttgtcgggccgttgccggcggcgctgtccggctgcgacaacctagaattcatggacctgcactcgaatgccctgtctggcgctttgccggacgagctgccccgcagtctacagttcgtcgacatctccgacaacaagctcaccggtatgctgggccccggcattgggttgttgccggagctgacgaagcttaacctcgggatgaaccggatctccgggggcataccgccggagctcggttcctgcgagaagcttcagctgctggacctcggcgacaacgcgctctctggtggcatcccgccggagctcgggaagcttccatcgctggagatttcgcttaacctcagctgtaaccgtctctccggggaaattccagcgcagttcggcgagctggataagcttggcagcctcgacatctcgtacaaccagctctctggcagccttgcgcccctcgcgaggctcgagaacctcgtcatgctcaacatctcttacaacacgttctctggtgacctcccagacacgcccttcttccagaagcttccgctcagcgacatcgcgggcaaccacctgctcgtcgtgggcgccggcggtgacgaggcctcccggcacgcggccgtttcggcgctgaagctggccatgacaatccttgtcgtggtgagcgctctcctcctcctgacggccacctacgtgctcgcgcgctcgcggcgccgcaacggcgccatccacgggcacggcgccgacgagacgtgggaggtgaccctgtaccagaagctggacttctccgtggacgaggtggtgcgcgcgctgacgtcggcgaacgtgatcgggacggggagctcgggcgtggtgtaccgcgtggcgctcccaaacggcgactccctcgccgtgaagaagatgtggtcgtccgacgaggccggcgcgttccgcaacgagatctcggcgctgggttccatccggcaccgtaacatcgtgcggctgctcgggtggggcgccaaccgcagcaccaagctgctcttctacgcctacctccccaacggcagcctcagcgggttcatccaccgcggtggcgtcaagggcgccgctgactggggcgcgcgctacgacgtcgcgcttggcgtcgcgcacgccgtggcgtacctccaccacgactgcctgccggccatcctgcacggcgacatcaaggccatgaacgtcctcctcggcccccggaacgagccgtacctcgccgactttggcctcgcccgcgtcctgtccggcgccgtcgcgtccggctccgccaagctcgactcgtccaaggcgccgcgcattgccggctcatatggctacatcgcgccagagtacgcgtccatgcaacggatcacggagaagagcgacgtgtacagcttcggcgtggtggtgctggagatcctgacggggaggcacccgctggacccgacgttgccgggcggcacgcacctggtgcagtgggtgcgggagcacgtgcgcgccaagcgggccacggcggagctcctggacccgcgtctgcgggggaagccggaggcgcaggtgcaggagatgctgcaggtgttctcggtcgccatgctctgcatcgcccacagggcggaagaccggccggcgatgaaggacgtcgtggcgctgctcaaggagatcaggcggccagccgagaggtccgatgaggggaaggagcagccggcgtgcaacaccgcggcggcggcgaccgccgccgccgctgagccactggacgggcaggcgcaacggtcgccaccccggagcccgctgcccaagggcggctcgtcgagctgctcgttcgccatgtccgactactctagctga

SEQ ID NO: 120567 - DNA, 462 bp, Zea Mays
atggatgcatctttggcagtggcggagcacaacccaaagtcaaggctgaaactgacagcctcactggtcaccagcagaccggaagggggcacacagggagacgttgtggcagcgactggcaaggcacgaacaagctccggaggtcggctgcaacgcaccgccacagatgagctcgagacagactgggaacagtggaagctaggaagcctgggaacgacgatggttcttggtgattggaggtgggcaggagtgcccatttctgcagcgcgctaccactaccaagtccagcaatgcaaagaagacgagcagctggagctcagcgtggggcagcgttgccggcaattgattggaggttggcccaagggtgagactcactggagtaaccaaatgtgccacaaactcgcaaccactggaaggctcaaacctgcaaagcatccttcagttggcattcggattcgttag

SEQ ID NO: 120568 - DNA, 1571 bp, Zea Mays
tcagcgttccactcgcgtagaagtaacagcgctcgcagctcggtccgggtacgtcgccaatgccgttgcgtggcggattcactctctctctccccccggccccctcctccgcccatccaaccaccatataacaacctagtagccgccaacgccacaccaccagtagtcctactggtccttgacgtccgtggccactcaggttgtgttctctgagttctttcgccggggccggggcggaagcggagtgcgcggtcgaggaaggcctaggccttagcggtcggatcgatcggcgccgtgcttgactgcctgtacatgaggagcggctgcggcggcggcggagggagacaacctggggaaggaggcgggggaggcgctggggctgctgggctgcgtcaatgaggtggtggcggcggtggcagccacgtgggggcccatgaccgacggcgcgcgcgtcgagacggcgcccaggctcgcccaatggcgcgtcgacccgctcccctgctacacctaccgcaagtcactccccttcctcatcggcctctggaactggtgcatatctgtggagagaaataacaagcaaacctgtgttaagctctttgcagagaatacaagttctctcaagaacggttcctcagccccaatagcttcctttatcgccaaacttattgtatctcttccacctaatcagcagaccatagtccacccaggaatttttgacaaacagctgaaatacgacggttttgtgtggacaatcgatagcaccgtcactgggaggtttgtgattgagatagagtttcttgacctgaaggtcgctgatccgtctggcggggagccggcctcgatttgggcctcccgccaggtcaagcagtgctcggacagcacggccctgtcgtccctggctcggatgctgcacgaggacgtcctcaccgacatctacggcgacgtgcgcggcggcgaggagttcctggcgaaccggctggcgctcctccgcgccgccgacaagtacgacatcggcgacctcagggaggcctgccacgagagcctgctggaagacatcgacgcgcgcaacgtgctggagcggctgcagacggcgcacctgtaccggctgccgaggctcaagggcggctgcctgaggttccttgtggacttcaggaaggtgtacgagatgcacgacgacgacctcaacgcgttcctgcagacggccgacagggaactcgtggccgaggtgttccatggcgttcttgccgcgtggagcgggcggtaagccgggcgcatgccatggcactgccgctctgctgcaggtgttgcacatctggttggttcagttcgtcacaactcagaagcgttgtttgcaactggaggattcttgctgggaaagcgtgtaaatatttgcaaactgtacatgcgtgccagtggttggtctaaaatttactgtgcatgccttgattggattttgttcctatgatgtggaaatcagctcatatgctgctcatattcacgttttgaggaatttcagacttgatcttcaggtttacacatggcatggcaacagagagaggcaatgctcaata

SEQ ID NO: 120569 - DNA, 1248 bp, Zea Mays
acatcgcagaggtgtctcctttctcccctgttgttgttgatccaaaaagccacctccccccaacccaatcccgtcgtcactctctcactccactgcctccggaacaccctagcaatggagcccaactccagcatccctcccccggtgatgggcgcggcggtggcgtaccctccggcggccggcgccgcgtactccgccgggccgtacgcgcacgcgcacgcggcgttgggcgcgctgtacccgcctcccccggcgccgggtcccccctcctcgcaccagggcggcgcggcggcggcgcagctgcagctgttctgggcggagcagtaccgcgagatcgaggcgacgacggacttcaagaaccacaacctgccgctggcccgcatcaagaagatcatgaaggcggacgaggacgtgcgcatgatcgccgccgaggcgccggtggtgttcgcccgcgcctgcgagatgttcatcctggagctgacccaccgcggctgggcgcacgcggaggagaacaagcggcgcacgctgcagaagtcggacatcgcggccgccgtggcgcgcaccgaggtcttcgacttcctcgtggacatcgtgccgcgggacgagcccagggacgccgaccccgccgccgccgccatgggggcagcagcgcccgggatcccgcagcaccccgccgccgccgaccccaccaccatgggctactactacgtccagccgcagtaaccgatctgccctgttggtattggtacccacgttcttgttgttgttgcccttgccaaccaataactcttaagatggcgttccatcgccgcatctcgtttctggtttcgtaatcaagagggaggcttgtgtgatggtcatggctcatgccatgcttaacagagtgtaagggggtttgcctgtggactgtcgtaactggagtattaatcagtgtattactacttaccctgtccatgcaactcccaactgcctgtcttgttactttgtcatgaacctatctgtataatgtcatgctgttctttagatctctggtaggatagagaagcagtgatctcaggcttgttggtgtcgcgcgcaaatttgatccattttctatgtgtgtgtgtgtgtgtttttccccactggtgtgtaatcatgctcctccttggaatagtttcagggacctaattatgtctgctaaatttccagaacatgaatgcgtttgtcgccaaaattccagattatggctgtatatcctgttttctcgtt

SEQ ID NO: 120570 - DNA, 942 bp, Zea Mays
atgacccgggagtcggggcaatgcgagcaaatcccgcagctctccagtctggtggcagcagattcagtccccgtactccaaagcagtctcagcgatggtaggtcaacgctgatctgcataatcgatcatccagacatgtcgcgaccagtgagttttcggtcgagctgtggagccagccccgggaagatgttcatgcactgcttgagcttgagtagctcaacgccatggacggacgggctcgaggacgagttctcggaagattccagctgcatcagcagcacaattagatcagggatgcttgcaccattcagcagcgagcaggggatacccatcaccaccacaacgccgccaccatcgaacagtggcagtatcggcagaaaggtgcggcggttcagtccgaagagcatggtgacatcgctcgcgccgacgtccacggtcggcggctccgccctcgcgctgcactacgcgaacatcgtcatcgtcatcgagaagctgcttcggtatccgcacctcgtgggcgaggaggcgcgggacgagctgtaccagatgctgtcgtggagcctgaagctggcgctgaggaggagcctgagagcccgcgcgaggagcacggcgatctacgacgcgttcctggcgcacaactggcgggagacgctccagaagacgacgctggcgtggctcgtccccatggcccacaacacggtccggtggcaggccgagcggagcttcgagttcgagcagcagcagcagcggcgggtcgtgttggagcggagcgtgctgctgcagacgatgtacttcgccgaccgggagaagacggaggcagcagtctgcgagctgctcgtcggcctgaactacatctgcatgtacgagcggcagcagaacgctttgctcgactgctctagcagtctcggcttggatgattgtgtggagtggcaagtccagtag

SEQ ID NO: 120571 - DNA, 2559 bp, Zea Mays
gcagagacagcaagggaacagggaagggagagagagaggaacagctccgagctctcgcctctgccctagctgccaagacagtggcggtagaagattgggtgcgggagcgcgacgtctcagctgggctatccaggaatccagaatttacttcggtggcgaggatgtctgtgagccatgcgcaggacattgaaatatcgctgtgcgacggcaactcggaggacgagcggcggcggcgcaagatcggctcgctgcggcggaaggccatccacgcgctcaagaagcgagggaggcgtcgcgtcgactcccgcttcccgccgccggccatttccatcgaggacgtccgcgacgcggaggaggagcgcgctgtcgcctccttccgggagcggctcgcggcgcacggcctcctccccgagaagcacgatgactaccacatgatgctaaggttcctcaaggccagaaagttcgaagccgagaaggcaatgcagatgtggtcagagatgctgaaatggaggaaagagttcggaactgacaccatccttgaggattttgattttgaggaactggatgatgtgctacgctactaccctcagggctaccatggtgttgaccgccaaggccggccggtgtacattgagaggctagggaaggtggatccgaacaaccttatgcagatcacgtcagtggatcgctacatcaagtaccatgtccaggagtttgagagggccttcagggagaggttccctgcctgcacattagctgctaagaggcacattgactccaccactaccatcttggacgtccagggtgtggggtttaagaatttctccaggactgctagagaacttgtaaaccgaatgcagaagattgatagcgattattatcctgagacactccaccaaatgtttgttgtgaacgctggcagtggattcaagtggatctggaacagtgtgaagggcttccttgacccaaaaacttcatccaagattcatgtgctcggttcgaactaccagagtaggcttcttgaagtaatagattcgagtgagttgccagaattccttggtggttcatgcacatgtagtgacaagggtggttgccttggatcgaacaaagggccatggaatgatccttatatattgaagctgatccacaatttggaagctggatgcatgagggaaaccaccaaacccgtttctgagggcggagaaagaagcagctcttcctttcggttggaacagatgaaatggcagggcatgttaagcgatacatcaaatgctgaatcaggatccgatgttgatgattttggtccatcatttgttcataaagtttcaggctatggttgcttgactccggttcgtgaggaggtaaagggcacagattgtgcaacatacttgagctgcgatgatcaaagtcacccggatatggttcctgaattttaccatggagtgcaacggactactgaaatggtgcagaaacaaatggctgatttcaggcaatattccaccaacagaaggcctcgtgaattagggaacggctctcttaatgccaatggtacagcagctgctcagaggggctgggaagacgtggcgaagctagtagtcacagccttgatcaagctcttctccttcatccggctgttcctttccagagccgccgagagtaggctagagaaggtccgtcgcactgccccaccaccagcagcagagaagccaaagccgccccgagccgtcagcgaagaagaggtgcgcgcctgcctgcagcgcctggacagtctcgagtcgctgtgcggccaccttgccaccaggcctgcgcagatcccggaggacaaagagcgcgttctgctgagctcgttcgagcggatccggtctgttgaggctgacctcgagaggaccaaaagagtgctgaacgcgaccgtggcgaagcagaaggcgctggtggaggaggtggctctggagtctgtgcaggagctgcctagagccaagaagaggatgttctgttgataggacatggaggtcaacagcacgggaccccgaaccatgtcgtcgacattaaccgaccgaccaaccgaccgtgaagctgacgcgactctctgccaccagccagccggagccatttttgacctcgctgccgccgccgccgaagccgacgccgccgactctcacctaacaccgaaatggaagagaagaccggcggcgccccctgttggctgctgcttcccttttcatgccgccccttttttgtagtgcctccatttggccgtactctgctggcggggcccgggccgggtggcgcctttttgattggtgaatgctgcggcggtcgccaagcaccacccttgtttcttggccaggcgcgcgcgagagagagagagatagatggtgctggttggtgtccgaatggctggagtcgttctgtacgtacttgagtactgctgagtgctgaccccgtggctggaggtgggagacagacagtggcgagcttggtgccgtcgatgcacctgtacatgccatgccacaccggctgtgattctagtggcctgctaatatacagattgttgcgaca

SEQ ID NO: 120572 - DNA, 2701 bp, Zea Mays
gcagagacagcaagggaacagggaagggagagagagaggaacagctccgagctctcgcctctgccctagctgccaagacagtggcggtagaagattgggtgcgggagcgcgacgtctcagctgggctatccaggaatccagaatttacttcggtggcgaggatgtctgtgagccatgcgcaggacattgaaatatcgctgtgcgacggcaactcggaggacgagcggcggcggcgcaagatcggctcgctgcggcggaaggccatccacgcgctcaagaagcgagggaggcgtcgcgtcgactcccgcttcccgccgccggccatttccatcgaggacgtccgcgacgcggaggaggagcgcgctgtcgcctccttccgggagcggctcgcggcgcacggcctcctccccgagaagcacgatgactaccacatgatgctaaggttcctcaaggccagaaagttcgaagccgagaaggcaatgcagatgtggtcagagatgctgaaatggaggaaagagttcggaactgacaccatccttgaggattttgattttgaggaactggatgatgtgctacgctactaccctcagggctaccatggtgttgaccgccaaggccggccggtgtacattgagaggctagggaaggtggatccgaacaaccttatgcagatcacgtcagtggatcgctacatcaagtaccatgtccaggagtttgagagggccttcagggagaggttccctgcctgcacattagctgctaagaggcacattgactccaccactaccatcttggacgtccagggtgtggggtttaagaatttctccaggactgctagagaacttgtaaaccgaatgcagaagattgatagcgattattatcctgagacactccaccaaatgtttgttgtgaacgctggcagtggattcaagtggatctggaacagtgtgaagggcttccttgacccaaaaacttcatccaagattcatgtgctcggttcgaactaccagagtaggcttcttgaagtaatagattcgagtgagttgccagaattccttggtggttcatgcacatgtagtgacaagggtggttgccttggatcgaacaaagggccatggaatgatccttatatattgaagctgatccacaatttggaagctggatgcatgagggaaaccaccaaacccgtttctgagggcggagaaagaagcagctcttcctttcggttggaacagatgaaatggcagggcatgttaagcgatacatcaaatgctgaatcaggatccgatgttgatgattttggtccatcatttgttcataaagtttcaggctatggttgcttgactccggttcgtgaggaggtaaagggcacagattgtgcaacatacttgagctgcgatgatcaaagtcacccggatatggttcctgaattttaccatggagtgcaacggactactgaaatggtgcagaaacaaatggctgatttcaggcaatattccaccaacagaaggcctcgtgaattagggaacggctctcttaatgccaatggtacagcagctgctcagaggggctgggaagacgtggcgaagctagtagtcacagccttgatcaagctcttctccttcatccggctgttcctttccagagccgccgagagtaggctagagaaggtccgtcgcactgccccaccaccagcagcagagaagccaaagccgccccgagccgtcagcgaagaagaggtgcgcgcctgcctgcagcgcctggacagtctcgagtcgctgtgcggccaccttgccaccaggcctgcgcagatcccggaggacaaagagcgcgttctgctgagctcgttcgagcggatccggtctgttgaggctgacctcgagaggaccaaaagagtgctgaacgcgaccgtggcgaagcagaaggcgctggtggaggaggtggctctggagtctgtgcaggagctgcctagagccaaggtacacaacagttcgccgattcaatgtcctccgccctcttccaatggtctgctggaatgaatttcgcccgccggtttcggtagttctgctaatgagcttgaacaacacgaccctgctctccctccctgtgtacgtcgcagaagaggatgttctgttgataggacatggaggtcaacagcacgggaccccgaaccatgtcgtcgacattaaccgaccgaccaaccgaccgtgaagctgacgcgactctctgccaccagccagccggagccatttttgacctcgctgccgccgccgccgaagccgacgccgccgactctcacctaacaccgaaatggaagagaagaccggcggcgccccctgttggctgctgcttcccttttcatgccgccccttttttgtagtgcctccatttggccgtactctgctggcggggcccgggccgggtggcgcctttttgattggtgaatgctgcggcggtcgccaagcaccacccttgtttcttggccaggcgcgcgcgagagagagagagatagatggtgctggttggtgtccgaatggctggagtcgttctgtacgtacttgagtactgctgagtgctgaccccgtggctggaggtgggagacagacagtggcgagcttggtgccgtcgatgcacctgtacatgccatgccacaccggctgtgattctagtggcctgctaatatacagattgttgcgacagc

SEQ ID NO: 120573 - DNA, 102 bp, Zea Mays
ttgcacgctgcatcaccatccggatcggagcaggcagcagaggttagtgtcaggaaggaggagtaggttatattatcatctcgggccccgatcgagtgagtg

SEQ ID NO: 120574 - DNA, 157 bp, Zea Mays
cttttatgtgtttccccgtttcgttgttttcggttctcctttgcctttgtttcccttttctgttctttgggtgttgagctctgaggttttcatacggggtttcatctctagcctaccccaacgtacttgggacaaaaaggctttgttgttgttgttg

SEQ ID NO: 120575 - DNA, 519 bp, Zea Mays
tgctgatgttgcgtcagtagcagcatcgcgtccagctcctccaccgtgcggaagctcctggccctaccggccgacgcgcggggccgcgacggagcctgagcctcgcctgccgttccgcagctgccttcctccaggccggcgagcagctcggccacgtcgaccgtctcgatcctggcagcagcagcagctgccggcggcggcgcggggctatgcgcctcggccgacgacgagctggcgcgggatgatgtgcggaggagcgccatgaactggtcgccgctgctcttggaggtggacaggatgatctcctcgatggcgctgctcctctggaagccgtgggcgtggcccaggccgctcaccttctcctgaaagctccctgatttcgctaggatcttggacgacacgcaccccatcttatattatcttctggttccctgatcttggtttggttggaggacacagaaccaccatgatcacaaactgaaaccatccctcccttctgaatggagggggaaaaagttc

SEQ ID NO: 120576 - DNA, 4182 bp, Zea Mays
gattgggcctcctccctcctaggacaagaggtcacagtcacagccgcagccgcaggaggcggagggaacagggaggggatagattacacccatcccattcaatggcttgagagggaaaggcagcaggcagcgagcccgtttttaaaaatccaaatccacctccactgctccagtccaggctctcttgcctctctcactgccattcctgtccttgaagctgaggcatccgggggagccaagaacacccgtcgcccgcttccgagatgaggctggatccttgaagcccgctggccgccttcgccgttcgccgttcgcctccgggaaggaaatgaggtgagccaggtcgcgcggcactttccagcaagcttccgaagccttgtgattcggctgtagcaggcttctagccatggaggacgagcgaaaagctccgagctttctcgatgcgccgcccaaggatatcccaatcgccaccgccaagccgctcaccatccggaccagcgccgccgcgtccggatgcggcggctccgaccgctcctgccccatcttgccggccatctccatcacgccgcacctctactcgccgtcgccgccgtcgtccgcgttcgtgtccgcgctgcagtccccgtacatctcgccccgggttctcgacccgccgcctcctcctcctcctccgccggagccggcgcctcagccgcgccaggaagtcaggaccaccgccggcgccagcgccagcaccaccgcggcgccgtcgccgacgtcgtgctccaacggctcccactcggaggatatcgacgcgtcccgcacgccgccgtccgagcgctacgactacagcggcgtcgacgcggccaagatttccgacggcagcggctgcggcggcggcggcggcgctgggctcctgccgccgcgcgcgtcgttctcgttccccgtgccgcgggtgtccttcaccaggggctcggtcgcgtcgccgtcctccaacgccaagctccgcagctgcgacgtgtacatcggctaccacggcagcggcggcctctccaggttctgcaagtggctcaagtcggagctcgagttgcagggcatcgcctcgttcgtcgccgaccgcgccaagtactcggattcgcagagccatgaggttgccgaccggattatttgctccgtcgcgtttggcgtcgtggtggccaccgtgtcgagctttctcaacccgttcagcctcgaggagatcagattcttcgctcagaagaagaacctggtgcccatactgttcgacaccgagccggcagagatcgccgggcttttcgatggtagactggaggataaggaagcgaaggaggcgttcgaagggctgatgcggtgccacgaattcaagctcgaggcgaacgagagcgattcaagaggctgtgtgtcgaggacagtcacactgcttcggtccaagcttgggcggaagaacatcgccgagaaggagagcgaagcctctgatggcctgccttttccgcgcaaccggcattttgtgggaagggagaaggagctgagcgagatcgaaggcatgctctttggttcgaccgccgcgggtatccaggaagtggattgcccgagggcttccagtacaaatgagagatcgagcggcgtatctgatggatttgctgatgaggacagtgacaccgcgaggaaatctaatgccaggtacatcagtttggagatgcgcaagtgcaaggaacccacgcttgaggcttggattgacccagtgatcgagttaccatctggtaaaagcagaagcctgcagaggcagagatcaaggcacaggaggtcaaggtttcggtgcaacagcaagggctatagcggcggcgccaacatagtctgcatcaatggttctccgggcattggcaagactgagctggcattggagtttgcttgcaggtactcacagaggtacaagatggtgctgtggattggaggcgaagctcggtatctgaggcaaaacatactcaatgtatccatgaatctgggactggatatcagtgctgaggctgagaaggagaggggcaggatcaggagcttcgaggaacaggaattcgacgcgttccagcgggtgaagagggagctgttccgcgacgtgccctatctgctcataatcgacaatctcgagagcgagagggattggtgggaaggcaaggacctccatgacttcattccaaggaacaccggagcaacacatgtcatcgtgacaacacgtcttccacgcgtgatgaacctcgagccgatgcagctgccgcagctctcgtacatcgatgcgatggccttgatacaggggaagagaaagaaggactatctgcctgaagaagccgaagtcctcaggaagttcgatgagcggttaggcaggctgagctttggcctgtgggttgtcggttcgctgctttctgagctcatgatcgctccttcaactctgtttgaggccgttgatcgaatatcgctgaacgagaatctgttccccattggcgccaacgacgatggattctgccgcaacaattctttcttggtgaaggtcttggtcttctgctttgctctgatggaccgagcaaaaggaggaagccttacgtcaaggatggtcatcgctggttcttggttagctccaactcctgtatcgtccacgctactagctgcaaccgcgagcaagctaccgatgaaaggcagtggtatgcacctgtttggtgaatctctcaggactgcatttctatgtggcacacattgtttcctagctccaaacgggcggaaggctgaggtggagtcggcgctcttgcttgtcaaccttgggttggcaaggaaggcaaacaggcatcctggttgctggatccagttccatcctatcacgcagctcttcggcaagatcaggggaggtttggtgcctacgactgcagcagtgaatggagtgatgaggactggaaacccctcggtatactctgaccacttgtgggctagcgcgttcctcgtgtttggtttcaagtccgagccgcccgccgtccagcttaaggcggtcgacatggtcctcttcatcaagaagacggcgctgcccctcgcggtcgactccttcatgtcgttctcgcggtgcggctcggctctggagctgctcaaggtgtgcacgaacgtcctggaggaggtggagaagtcgtacgcgtcgcggatgcaggactggagccgcgggtcgctgtgctggaggaagaagctgcagccgaaccaccgcgtcgacgagctcgtctggcaggaggtgacgctgctcaaggcgacgctgctggagacgagggcgaagctgctgctccgcggcgggctgttcgacacgggcgaggagctgtgcaggacctgcatcagcatccggactgtcatgctcggccacggccacgcccagacgctagctgctcaggagacgctggcaaagctggtcaggtataggagcaaaatatgagatgagatgatggtgtccaagaccctttgcaagcttcttcccccctgctgtttcagaagttttcacgcccccatttttgttcctgaatctgttatgccaccggctacagttttgttagcgatcatcagtataatagccaaggtccatgatgccatgtgtaacttattttagagcaggtgccatatgtaagtggaggtgttatgtacagtgcagtccatctgctatttggtagaactaccattgagcttcccatgctgaactttcagaattgaagatgttcttccttttgataacttgagtttcagatttggagagcaaagagctgcatcacgccttagagttgctgtagggtgttatgttttctccaaaaaaatgcatgcatctatggtcaaatctgatgccaaacaacaagagcatgtagtctttctgaaatgttttctgtcaccctccatgatcaggtgggcggtacagctatgatatgaacagtcgttttgttaattagtttattaccacttgcggtagtgatttggtgtctgcaaacctcaatgtgttgtttgtgtttcctaaatgtgaaatttcatgccgtggggatggtagaatgcttcacagtgtttactgtgttctgttttgtgctgtgaattcatcagatagcgtttggtaatactcaattgattagttgggtcagtgggtgactgttttttcccttagaatgtgcaaataaataaataaaa

SEQ ID NO: 120577 - DNA, 3843 bp, Zea Mays
ctgaatgatacgcggtacattctttgttttgtttctccgatttattattcttttttttggattctaataaatctctgctatttgcttgcttcccctctcgcccaatgtctgatagggaaggaaatgaggtgagccaggtcgcgcggcactttccagcaagcttccgaagccttgtgattcggctgtagcaggcttctagccatggaggacgagcgaaaagctccgagctttctcgatgcgccgcccaaggatatcccaatcgccaccgccaagccgctcaccatccggaccagcgccgccgcgtccggatgcggcggctccgaccgctcctgccccatcttgccggccatctccatcacgccgcacctctactcgccgtcgccgccgtcgtccgcgttcgtgtccgcgctgcagtccccgtacatctcgccccgggttctcgacccgccgcctcctcctcctcctccgccggagccggcgcctcagccgcgccaggaagtcaggaccaccgccggcgccagcgccagcaccaccgcggcgccgtcgccgacgtcgtgctccaacggctcccactcggaggatatcgacgcgtcccgcacgccgccgtccgagcgctacgactacagcggcgtcgacgcggccaagatttccgacggcagcggctgcggcggcggcggcggcgctgggctcctgccgccgcgcgcgtcgttctcgttccccgtgccgcgggtgtccttcaccaggggctcggtcgcgtcgccgtcctccaacgccaagctccgcagctgcgacgtgtacatcggctaccacggcagcggcggcctctccaggttctgcaagtggctcaagtcggagctcgagttgcagggcatcgcctcgttcgtcgccgaccgcgccaagtactcggattcgcagagccatgaggttgccgaccggattatttgctccgtcgcgtttggcgtcgtggtggccaccgtgtcgagctttctcaacccgttcagcctcgaggagatcagattcttcgctcagaagaagaacctggtgcccatactgttcgacaccgagccggcagagatcgccgggcttttcgatggtagactggaggataaggaagcgaaggaggcgttcgaagggctgatgcggtgccacgaattcaagctcgaggcgaacgagagcgattcaagaggctgtgtgtcgaggacagtcacactgcttcggtccaagcttgggcggaagaacatcgccgagaaggagagcgaagcctctgatggcctgccttttccgcgcaaccggcattttgtgggaagggagaaggagctgagcgagatcgaaggcatgctctttggttcgaccgccgcgggtatccaggaagtggattgcccgagggcttccagtacaaatgagagatcgagcggcgtatctgatggatttgctgatgaggacagtgacaccgcgaggaaatctaatgccaggtacatcagtttggagatgcgcaagtgcaaggaacccacgcttgaggcttggattgacccagtgatcgagttaccatctggtaaaagcagaagcctgcagaggcagagatcaaggcacaggaggtcaaggtttcggtgcaacagcaagggctatagcggcggcgccaacatagtctgcatcaatggttctccgggcattggcaagactgagctggcattggagtttgcttgcaggtactcacagaggtacaagatggtgctgtggattggaggcgaagctcggtatctgaggcaaaacatactcaatgtatccatgaatctgggactggatatcagtgctgaggctgagaaggagaggggcaggatcaggagcttcgaggaacaggaattcgacgcgttccagcgggtgaagagggagctgttccgcgacgtgccctatctgctcataatcgacaatctcgagagcgagagggattggtgggaaggcaaggacctccatgacttcattccaaggaacaccggagcaacacatgtcatcgtgacaacacgtcttccacgcgtgatgaacctcgagccgatgcagctgccgcagctctcgtacatcgatgcgatggccttgatacaggggaagagaaagaaggactatctgcctgaagaagccgaagtcctcaggaagttcgatgagcggttaggcaggctgagctttggcctgtgggttgtcggttcgctgctttctgagctcatgatcgctccttcaactctgtttgaggccgttgatcgaatatcgctgaacgagaatctgttccccattggcgccaacgacgatggattctgccgcaacaattctttcttggtgaaggtcttggtcttctgctttgctctgatggaccgagcaaaaggaggaagccttacgtcaaggatggtcatcgctggttcttggttagctccaactcctgtatcgtccacgctactagctgcaaccgcgagcaagctaccgatgaaaggcagtggtatgcacctgtttggtgaatctctcaggactgcatttctatgtggcacacattgtttcctagctccaaacgggcggaaggctgaggtggagtcggcgctcttgcttgtcaaccttgggttggcaaggaaggcaaacaggcatcctggttgctggatccagttccatcctatcacgcagctcttcggcaagatcaggggaggtttggtgcctacgactgcagcagtgaatggagtgatgaggactggaaacccctcggtatactctgaccacttgtgggctagcgcgttcctcgtgtttggtttcaagtccgagccgcccgccgtccagcttaaggcggtcgacatggtcctcttcatcaagaagacggcgctgcccctcgcggtcgactccttcatgtcgttctcgcggtgcggctcggctctggagctgctcaaggtgtgcacgaacgtcctggaggaggtggagaagtcgtacgcgtcgcggatgcaggactggagccgcgggtcgctgtgctggaggaagaagctgcagccgaaccaccgcgtcgacgagctcgtctggcaggaggtgacgctgctcaaggcgacgctgctggagacgagggcgaagctgctgctccgcggcgggctgttcgacacgggcgaggagctgtgcaggacctgcatcagcatccggactgtcatgctcggccacggccacgcccagacgctagctgctcaggagacgctggcaaagctggtcaggtataggagcaaaatatgagatgagatgatggtgtccaagaccctttgcaagcttcttcccccctgctgtttcagaagttttcacgcccccatttttgttcctgaatctgttatgccaccggctacagttttgttagcgatcatcagtataatagccaaggtccatgatgccatgtgtaacttattttagagcaggtgccatatgtaagtggaggtgttatgtacagtgcagtccatctgctatttggtagaactaccattgagcttcccatgctgaactttcagaattgaagatgttcttccttttgataacttgagtttcagatttggagagcaaagagctgcatcacgccttagagttgctgtagggtgttatgttttctccaaaaaaatgcatgcatctatggtcaaatctgatgccaaacaacaagagcatgtagtctttctgaaatgttttctgtcaccctccatgatcaggtgggcggtacagctatgatatgaacagtcgttttgttaattagtttattaccacttgcggtagtgatttggtgtctgcaaacctcaatgtgttgtttgtgtttcctaaatgtgaaatttcatgccgtggggatggtag

SEQ ID NO: 120578 - DNA, 1839 bp, Zea Mays
aaaagcccacatagcctctccctctctctgtcgcacgccaccacccagaggccagagcgcaaaacccacgaccccacctcgcatcctccccgtcgccgtcgccgtcgcaatcgcaacccacgccgtcgcacgccacctctccctcggctccgacgatgtcggcgccatccgacgccgcggcggcatccgcagctcccgcgcccgcgccgacgactgccgccgcctcctctagcggcgggttcaccttcaagctccacccgctggtcattgtgaacgtctccgaccaccacacccgcgtcaaggcccaggccgcctgctctgcggacagctcctccccctcgtccgggccgggggccgggcagccgccgagggtgttcgggtgcgtgatcggggtgcagcgcgggcggaccgtggagatcttcaacagcttcgagctcgtgctcgacccagtctccggcaccctcgaccgcgccttcctcgagaagaagcaggagctctataagaaggtgttccctgacttctacgtgctcggttggtactccactggaagcgatgtgcacgacaccgacatgcaaatccacaaagccttgatggatgttaacgaaagccctgtttatcttctattaaatcctactatcaacctctcccagaaggatctccctgtgactatttatgagagtgagttgcatgtcatcgatgggtgtcctcagcttatctttgtcagatcaaattatacaattgagactgtagaggctgagaggatatctgtggaccatgttgcccatctcaaaccatctgatggtggttcagcagcaactcagttggctgctcatcttacaggaatacacagtgccatcaagatgctcaatagcagggtccgtgttatccatcagtatcttgttgccatgcaaaaaggtgacattccaatggacaattcgctgcttaggcaagtctcaagccttgtaagaaggctaccggctacggaatcacagaaattccaagatgactttttaatggaatacaacgacactctcctcatgacttacctggcaatgttcactaactgttcaagcacaatgaatgagttggtcgagaaaatcaacacaagctatgagagaccgactaccaggagaggaggccgaggtgctttcatgtagctcacctgccatgatcctgctgctgctttcatctgtgaggatttttcgggagtagcttatgtccctggtcatttttttgcatgcaatctatcatgcgcaatcggctatacggcagctcttgagtcacttcaaactttctaggcaaaactgatgatttgctggaattgtatcagatcccacctgtgctgaagttgatatgtaaagttcctcacccagttattctatttgactctaaggctagtttggaaacttcaatcctcttcgggattagggtgtattaaaggctagtttgggaatctccttttcttaagagaaattagtttattttctcttgagaaaataagaatcattcggaaaaatgtagttcccaaactagccttaaacgtggaaattagttcatttctctttaaatccccttcaatcctggaatggatttgagtttttaaactggtgtagtttggagactcaaatccccttcgggatcttcgggattgaaggggatttgaagagaaataaactaatttccccctcctctggctagtttagaaactctaatcccctccgggattagaggggattgagggagaaattagtttacttctcttcaaatcgctttcaatcccaaaaggaatttgagttttcaaactagccctaaaagggatattaatgctggtttcgtcac

SEQ ID NO: 120579 - DNA, 1472 bp, Zea Mays
caaacacatgtactgaagaaaacgaatgttgggttgacacttctattgcaacccatgccacagatggacccttaatcctgcatatctacttaaggaaacaaatgtctggactctggatgacactggttcctgcagcccatgttgcagcctttgcagcacatctactgaagaaaacgaatgtctggatggcacttgttcctgcagcccatgtcgcaggcgttgcagcagatggttaatcctggctttcgctccagaacctccgcaattgtcaggctgcagccacgacgttgagctacattcttaccgatgccaagccaccgcagtcctcggaacagcggcggctcaaagtgtctcaggaagtttcgagacagtttgctgcagtaggcaagatcaagcattctcagggggcatttactggagtcgcatcccatagaacctagcacctcgagagatgaatcggttatgaggaggcagttccgcagacacaggctgcttatctgctcacagttcttagcaatcactgtcacagcccgacatgatattcttggcacatttccgatgtcaagcgaaactaatgtcttgttgatggtgccagccccgcacaacagtgaagctattccattactgctgatccttctgcaacctctcaagcacaaagaagatatcaagcacctcccattaccgagtgccgataaacccacatcagtaatgtcagctccagcaaggtccagtagagttaggttgggaagctgtgagatggaaaccaagccagagtctgcaatgctcttgcaacccgaaagatcaagaacctttaagttagtgcagggtgctagagatatggctgtatcactggttaggagagcacagttaagcaacctcacttctgtaatatttggagctgccttatcaagatctaggcatgccaagtctgacaagcaccagccattgctgacctcaaacttcttcaggtcctttccagagtggagaagggctgcataccctgcatcacttactttagaaaacccaccaagtctaatggttctcagttgcttgcatccgtcagcaagcatcagtatcccaaagtcgtttacccgtctgaagtcataggaacgtcgtgtcagagacaaatgtttcaagttgtggcacaagccaagtgcttgaagccccacattggtcaaatcttcaggcaaatttggttgggtatcaggttcatcttccaggcatagctcagacaacttatggacattactggtgatcaacataacgagttcatccgttaccatgtcaagaactaaagagagtgattccaagttgtcagtgatgtgtttgttcagagatgtggttttcaggaagaccgtctttgccctagaatgagatacaggttgtagcaacaggtccttgatgttactaggaatgagaggtgatccagccttgtaactgcgaaaagtggtgagtggatctagcagagggaa

SEQ ID NO: 120580 - DNA, 438 bp, Zea Mays
accgccgcagtgccgcacggcgactccgactctgtctcctgcgcggctccagctcaccctctcctcacatcgaggcggaccggcccacgtcgccggcaaccgaaacgtcggccgtagcctcgcacctccggcatcggcgagcgcgcgcgcccgtccggcggcggagatggcgctgcggcacctggtcacgggccagaacaactgcgcgccggacggcgcctcgtcgtccaaccccctcaacgccctcgccaacgccttccttggccagtcctccaaggcgcagtcaataaaggaacttcctggttctgttagtgttccatctacatctggcttcagcgcgcctgctcccttgtcaaacatccctggttcagaaaatgagttcaaacaagaccagcgaccttttgtgcagggctctgactttattcatggtggtcctgc

SEQ ID NO: 120581 - DNA, 2643 bp, Zea Mays
accgccgcagtgccgcacggcgactccgactctgtctcctgcgcggctccagctcaccctctcctcacatcgaggcggaccggcccacgtcgccggcaaccgaaacgtcggccgtagcctcgcacctccggcatcggcgagcgcgcgcgcccgtccggcggcggagatggcgctgcggcacctggtcacgggccagaacaactgcgcgccggacggcgcctcgtcgtccaaccccctcaacgccctcgccaacgccttccttggccagtcctccaaggcgcagtcaataaaggaacttcctggttctgttagtgttccatctacatctggcttcagcgcgcctgctcccttgtcaaacatccctggttcagaaaatgagttcaaacaagaccagcgaccttttgtgcagtcttttcggcctccgggggttcctgaacttggtggaatagaagcacactttccagattttgagcaaatttataacaatgcaggaacaacctttcagccgccattggatggtccaccacaaagagtgttgtctggtgtcttgcattcctttctcacaagtggcccagctggtgtgccatttcaacctcttccagtaccagctgctcttggtttatctgaaagtgacaaacagtgcatacgtgatcgtagctgcataatggcacggcatattttttctgaccaaccggaagaatatatacaggctcaggtcaatactttgctgcattcgcttgatatagacaaccgtatgagaggacctatgcatggacaatacccagaactacaggagtactggaaccagtcccaaagttctatgggtcctgccctgatgcataataccgctgataaatggattactgagtttggcaaacaaaataataatccggaaaattgggcaaagtctttcgaacaacaatatggccccaatgggtgggcctctgagtttgaacagcatcagtctcagatggccatgggccagatgggaggagtgaacatggccaacctggctgctatggagcaatcccgaatgcttgcacaaactttagcaagtaataatgatcccaagtttcagaattctaagttcttccagtttgtttcaaagatgagccggggtgaacttattatagaagataatcaggtaaaagaaggtttagcatcccaatccagtggctgggctgatgaatttcaaacacagtacaaagctaatgcaaactcatgggcggatcagtttgcacgtgaagagctttcacaaggggcggataagtgggttagtgagttctctagtcaacataatcaaggtgcgctaaatgagagctgggttgatgagttctcgaaattaaatgtcactgatgaatgggcagaggaattcagtggaggtggttttggcgaaagctctgctgatccgtgggtagatgagttccaagaacacttgtcatctttcaaacaaagttcaggcgcctctcgaggggtttatgtttattctgagaacaacccgtatgttggtcaccctaatccaatgcaagaaggacaggagctcttccgcaagggcctcttaagtgaagctgttcttgctttagaggctgaagttttgaagaatcctgataatgctgaaggttggaggttgttaggcataacacatgcagaaaatgatgatgaccaacaggccattgcagcaatgatgcgtgcgttggaagctaatccgacaaaccttgaagttcttcttgctcttggtgttagtcacacaaatgaattggagcagggagaagcattaaggtatctttataggtggcttcagaatcatccaaaatatggtggccttgtccctccgcagtcaactgattcaccttatggtcctgatgttgttagattgtttaatgacgctgctcagatgtcacctgaagatgcagatgttcatgtagttctgggagtcttatacaacctatcaagagagtatgataaagctataacttcatttaagacagcagtacagctcaaaccacaggactactcactctggaacaagcttggtgcaacccaagcaaacagcatccagagtgctgatgcaatattggcgtatcagcaggcactagacttgaaacccaactacgtgcgtgcatgggcgaacatgggaatcagctatgccaaccagggtctgtatgaggattccattcgatactatgtaagggcagttacaatgaacccaaaagctgacaacgcttggcagtacttgaggatttctcttggcaacgcttcaagagctgacatgattgccgcatgcgacgcccgcaacctcgacgctcttcagaaagagtttcctctctgagtcctccctagctttctccagcagcgatctccatggaaatggaattggaggccagtaacatttttgtatttgcctgttgattcttctgtttttattttgcttaagtgttgttgggtaaatgtataggaactaggaagtgagggggaacaacatcccgtcgatgtgtgaagtatcattgcaagaaggcaatagtggcaaagggggaattatacatctgtaagtacacaggaataaaggaatggttgagtaataaattgtttttagggcgaaccactgcttgttttataaagttaatataaaaaatgcaatgcggg

SEQ ID NO: 120582 - DNA, 2350 bp, Zea Mays
ctgcggctgcggctgcgctaggcgctagctagctgctgcgcgggcaggtggcaccaaaaaccctcgtgctttcggctgcccgcccgcgtggttttcacggagaagccgcggaaccgaatggcagcaggggcaagcgatcaacttgccaagcaacgcactgcagcactactgtactgcaccgcaacagcgcggcggcacagtagcgcaaccgaaggctccacaactccgccttcattccccaatccatcctcgccgcccggcgcccgcctttccccacctcgactcgacgcgacgtcggcccgacccgatcctcggcacggaatcttctattggataatgtggcgttattatcagaactccactcaccatcctctactttgactacatctgatccaattggactactggaccagctcttttcgtccaatgggaattgtcaagataggaagccgtgagcctgcagcgaggagtggttacagttgtggaggtgaggaccttacacgagaggacagaatgcttctccagagctttcctgatccagaatctcttggctctgaccaggcggaggtggactgtgagcttgcatcgtcgagaggccagatgtgcaatatcccctatgggatttatgacctgcatggtggcttggccgaggttctttctttggagacatggaattcatgcctgacggaagatgatagactccgtctagcagcctacctcccggacatggagcaacaggactttgtcacaaccatgaaagagctgttcagtggggatgctatgttctttggaagtccagttaaaagtttttttcatggattgagtggtgggctctattctccacaagtttctcaggcaagggagttactgatgatgtttcaaagacgaaggcattatcactttctcaagtggtaccacgatgatatggttgctaagtttgcatccatgagcaatctgttgaggagttctgatacgagtgcaactcttggagagaagcttcccatctcgcgcaggcacgtatacgagaagcgtttcccatgtgttagtcttagcagtaccattccaccagttactatcaaggatgaaactgccactgtttcatcaccaatggaatgcgctaaacttgcgggtgggccattaagcactcattgttcaaccagacatgatgaaagagcccatgcagccaaatcagtagaaatgaactcattggaaagtcaaatcctccgtcctctcagtgaccccatgcaaaattgtagtaaactgcccaaaggtgtgctgaaaataaggactggttgtgcttctgttgccgatggcagtgaagggacgcgtcatagacctggaccggttctagcagatcaaccaggagcacagagctccagaatttgcactccacctcttgtttttagacatggtgttcatggcttttctgagaatccatcttctcacaccaacagaatcaacagcacgtctgacagctcacaccgtactcccttacaacgggagggtacactagaaccgtacgcaccaatgggcaaaatcccacctcgagtccaaatgacagttccacaggagcacagtgcggtttacccttccatgacaggcttctaccaaccagcagctaaccatagcttagcatattccagtgaagcatacggcaccagagaacgtgcccacatggaagaccttctgaagaacttcggctgcggtcaaaacatcgtagcccatcagatttctcctgatccatatgcgagagccatggatggccttcaaacaaacggatactccagttcgaaaaacgctgagagtatctcagacatgctgagccttggtacaaggacatacccgcttcatagcagtgcctcggagctgctggaaaccgtgtgcaaccaccgtgaaggcgcaccatctgccaatgctgttgctgaagctgaagagtctcgtcagttcacttacacctacgcgaggaggaagccgcacaagagatcgactatggcggagcgtacagtgccaccaagtgcggtagacggcatggccatcatgaaagcgaaggcaatcagactctgaactggatcttgtcagctgcaaacattgagaactgaacatagttggggctggggacagaatttagcatccacctaacatagtaaataagcatgaaccgttttaccttctatagaccagaccctcccagcagaatatatgcctgttgtcattgtcaaacgggataagtaacttagcttacactgaaatgctgaagtatgtaaatcagctatatctttctcctgttttcaggagcaattttgccccgctattatagatgtccaagagtgccgttccatgttgagctgcg

SEQ ID NO: 120583 - DNA, 2276 bp, Zea Mays
ctgcggctgcggctgcgctaggcgctagctagctgctgcgcgggcaggtggcaccaaaaaccctcgtgctttcggctgcccgcccgcgtggttttcacggagaagccgcggaaccgaatggcagcaggggcaagcgatcaacttgccaagcaacgcactgcagcactactgtactgcaccgcaacagcgcggcggcacagtagcgcaaccgaaggctccacaactccgccttcattccccaatccatcctcgccgcccggcgcccgcctttccccacctcgactcgacgcgacgtcggcccgacccgatcctcggcacggaatcttctattggataatgtggcgttattatcagaactccactcaccatcctctactttgactacatctgatccaattggactactggaccagctcttttcgtccaatgggaattgtcaagataggaagccgtgagcctgcagcgaggagtggttacagttgtggaggcggaggtggactgtgagcttgcatcgtcgagaggccagatgtgcaatatcccctatgggatttatgacctgcatggtggcttggccgaggttctttctttggagacatggaattcatgcctgacggaagatgatagactccgtctagcagcctacctcccggacatggagcaacaggactttgtcacaaccatgaaagagctgttcagtggggatgctatgttctttggaagtccagttaaaagtttttttcatggattgagtggtgggctctattctccacaagtttctcaggcaagggagttactgatgatgtttcaaagacgaaggcattatcactttctcaagtggtaccacgatgatatggttgctaagtttgcatccatgagcaatctgttgaggagttctgatacgagtgcaactcttggagagaagcttcccatctcgcgcaggcacgtatacgagaagcgtttcccatgtgttagtcttagcagtaccattccaccagttactatcaaggatgaaactgccactgtttcatcaccaatggaatgcgctaaacttgcgggtgggccattaagcactcattgttcaaccagacatgatgaaagagcccatgcagccaaatcagtagaaatgaactcattggaaagtcaaatcctccgtcctctcagtgaccccatgcaaaattgtagtaaactgcccaaaggtgtgctgaaaataaggactggttgtgcttctgttgccgatggcagtgaagggacgcgtcatagacctggaccggttctagcagatcaaccaggagcacagagctccagaatttgcactccacctcttgtttttagacatggtgttcatggcttttctgagaatccatcttctcacaccaacagaatcaacagcacgtctgacagctcacaccgtactcccttacaacgggagggtacactagaaccgtacgcaccaatgggcaaaatcccacctcgagtccaaatgacagttccacaggagcacagtgcggtttacccttccatgacaggcttctaccaaccagcagctaaccatagcttagcatattccagtgaagcatacggcaccagagaacgtgcccacatggaagaccttctgaagaacttcggctgcggtcaaaacatcgtagcccatcagatttctcctgatccatatgcgagagccatggatggccttcaaacaaacggatactccagttcgaaaaacgctgagagtatctcagacatgctgagccttggtacaaggacatacccgcttcatagcagtgcctcggagctgctggaaaccgtgtgcaaccaccgtgaaggcgcaccatctgccaatgctgttgctgaagctgaagagtctcgtcagttcacttacacctacgcgaggaggaagccgcacaagagatcgactatggcggagcgtacagtgccaccaagtgcggtagacggcatggccatcatgaaagcgaaggcaatcagactctgaactggatcttgtcagctgcaaacattgagaactgaacatagttggggctggggacagaatttagcatccacctaacatagtaaataagcatgaaccgttttaccttctatagaccagaccctcccagcagaatatatgcctgttgtcattgtcaaacgggataagtaacttagcttacactgaaatgctgaagtatgtaaatcagctatatctttctcctgttttcaggagcaattttgccccgctattatagatgtccaagagtgccgttccatgttgagctgcg

SEQ ID NO: 120584 - DNA, 1817 bp, Zea Mays
atggcggcggcggttcgcctcctccctctcctcggtcgcctcctcgtcgtcggcgagatccgccggagcccggactacctccgccgcatcataccccaccttccctcacacccgaaactagccgccgccgtctccagcctctacttcccgctcttcccgtcctccgccaccttcctccacaacctgctaatccgcgcctccgccgcgtccccttccccgcgcctctccttcgccgcattctcctccctcctccggtccggccacctcccggaccacttcaccttccccccgctagccaagtccgcctccaaattcccttccttcccgcgcacgggcgcgcaggtgcacgcccaggccgcccggcgcgggctcctggccgacgccttcgccgtgaactcgctgctcgcgatgtacgccgcgttgcgcgacgcggcgtcgatgcggggcgtgctcgagtcctgcgcggaggccgccgacgtggtgtcctggaacacggtggtcgccgggtacgccaggtgcggggagctcgggaacgccaggcgcgcgttcgacggaatgccgcgcaggaacggcgcgtcctggagcgccatggtgggggcctacgcggcggccgggcagctggacgtggcgcgggacatgttcgaccgggcgccggccgccgggaggagcgtcgtgacctggaactcgatggtggcggggctggcgcgccacgggctgctgccgctggcgaggaagatgttcgacgagatgccggccaggaacctcgtgtcctggaacgcgatggtgcgcgggtacgcggtgaacggggacgtggacggcgcgagggagctgttcgatgcgatgccggagaaggacgtcgtttcttggacgtgcatggtttctgggtacgcgcgggccgggcgccacgcgcaggccctcgagctgttcaggacgatgcagagcggggacgtccggcctaacgaggtgaccatggtgagcgtgttctcggcgtgcgcgcgtctggccgctctcaaggaagggaggtgggctcacgccttcatcggcaagcgcgggatggtgctcgacgacggtttcaacctcggcgccgctctcatagacatgtacgccaagtgcgggagaccagacgtcgcggccaaggtcttccgttccctggaccggaagaacgtctccgcgtggaacgcgctcattgctgggctggcagcgaacggcgacgctcggcggtgcatcgatgtgttcgagcagatgaaggtgtcggacgagaagccggatagcgtaacgttcgtcagcgtgctggcagcctgtgcccgcgcggggctggttgatgagggtcggcggtgctttcggagcatgtcgtctggttttggtgtgcagccggagctcaagcactatggctgcatggttgacttgcttggccgagcagggctggttgatgaggcggaggagctggttcggggcatgcccatggccccagatgacaaggttctggctacgctgctaggtgcctgtcgtgtgcgtaggagacctgatgtggccgaaagagtacggagaaggatccaaagcctcaatacaaagcaaccctcacgggagagctatttcatgatatctgacgttcgcgccactgctgacagatgggctgttgcgcttaaggcaaagggttttatgcacaagtacaatatcatgaaattagatggatctggcagctccgtgtatttagtttgagtttttgcagttgcagaggcttatcggatcacgttctttaccggcaatgtataaacccagctagctgttgggactagaaattgttgttaacgaagcaa

SEQ ID NO: 120585 - DNA, 292 bp, Zea Mays
ctcccaccacgcgcagcctctcactggcgttcagtaaagagccgttttgtcaaacgatttgtaaaagacatcggctctagcagagaagctgctcctttaaaagagcaacggttggagtcagttttaaaggagccagagccctcccaaacagggccttagagttttgatgactactagtggccagtggtagtggagtggcagcccacaaattccggcagatttccgagcgtggtgggggtctgggggaggtggcagtcgctccgtcgacgggctgccctccatcactctcctg

SEQ ID NO: 120586 - DNA, 3105 bp, Zea Mays
gcgaggttgggcgcgcgggcaaagatggagagttacctgaacgagaacttcgggggcgtcaaggcgaagcactcgtcggaggaggccctggggcgatggcggagcgtggtcggcgtcgtcaagaaccccaccaggcggttccgcttcaccgccaacctgggcaagcgctccgaggccgccgccatgaagcggtccaaccaggagaagctgcgggtcgcggtgctcgtctccaaggccgcgctccagttcatccacggcctgccgtcgcagggcgactacgccgtccccgccgacgtcaaggcggccggcttcggcgtctgcgccgaggagctgggcgccatcgtggagacccacgacgtgaagaagctcaagtcccacggcggcgtggacggcctcgtatccaggctgtccacctcggcgtccgacggcctcgacgatagtaacgagccgatgacggcggcccggcaggagctcttcggcgtcaaccgcttcgccgaggcggagccccgcagcttctgggtcttcgtgtgggaggcgctgcaggacatgacgctgatgatcctcgccgcctgcgcgctcgtgtctctagtcgtcggcatcgccaccgaggggtggccccacggcgcgcacgacgggctaggcatcgtcgccagcatcctgctcgtcgtcttcgtcaccgccaccagcgactaccgccagtcgctgcagttcaaggacctggacaaggagaagaagaagatcgccgtgcaggtcacgcggcgcgggtaccggcagaggctctccatctacgacctcctcgcaggcgacatcgtgcacctctccatcggcgaccaggtgcccgccgacgggctcttcgtgtcgggcttctcgatgctcatcgacgagtccagcctcaccggggagagcgagcccgtggcggtgagcgccgagaacccgttcctgctgtcggggaccaaggtgcaggacggcgcgtgcaagatgctggtcaccaccgtcggcatgcgcacgcagtggggcaagctgatggccacgctcagcgagggcggcgacgacgagacgccgctgcaggtcaagctgaacggtgtggccaccatcatcggcaagatcggcctcgccttcgccgtcgtcacgttcgcggtgctcacgcagagcctgttctggcgcaagctcgccgacggctcctggctcagctggactggcgacgacgcgctggagctgctcgagttcttcgccatcgccgtcaccatcgtggtcgtggccgtccccgagggcctgccgctggccgtgacgctcagcctcgcgttcgccatgaagaagatgatgaacgacagagcgctcgtgcgccacctggcggcctgcgagaccatgggctccgccaccaccatctgcagcgacaagaccggcacgctgaccaccaaccacatgaccgtcgtcaaggcctgcatctgcggcaaggtgagggacgtgaacagctccgtggagaccaagacgctgccctccgacctgccggcgtccgtcgtggccatgctcctgcagtccgccttcaacaacaccggcggcgacatcgtgctcgaccaggacgggaggcgcgagatcctgggcacgccgaccgaggcagccatcctggagttcgggctgtccctgggcggcgacttcgcggcggtgcgcaaggccagcacgctcctcaaggtggagcccttcaactcggccaggaagaggatgggggtggtcatccagctccccggcggcgcgctgcgggcgcactgcaagggcgcgtcggagatcgtcctggcgtcctgcaccaggtacctggacgagcgcggcagcgccgtcgccctggacggcgcgaccgcggaccgcctcagggccaccatcgacagcttcgccaacgaggcgctccgcacgctgtgcctcgcctacgtggacgtcggcgacgggttctccccgagcgagcagatcccgacggacgggtacacgtgcatctgcgtcgtggggatcaaggaccccgtccgtcccggcgtgaaggagtcggtggcgatctgcaggtccgcaggcatcaccgtcaggatggtcacgggcgacaacatcaacacggccaaggcgatcgcgcgggaatgcggcatcctgactgacggcggcgtcgccattgaaggccccgacttcagagtgaagactgaagaagagctgcaagaactgataccaaagatacaggtgatggcaagatcttcgccgcttgacaagcacaccctggtgaagcatctacgaactacgtttgacgaagttgtcgcggtgaccggcgatggcacgaacgatgcacccgcgctacacgaagccgacattgggcttgcgatgggcattgctggcactgaggtggccaaggagagtgccgacgtcattatcctcgacgacaacttctccaccatagtcactgtcgccaaatgggggcgatcggtgtacatcaacatccagaagttcgtgcagtttcagctgacagtcaacgtcgtcgctctcgttgtcaacttctcctcagcttgcttgatagggagcgctcccctgacagccgtgcagctgctgtgggtgaacatgatcatggacacgctgggagcgctggcgctggccacggagcctccgaacgacgagctgatgaagaggacccccgtggggaggaaagggaacttcatcagcaacgtcatgtggaggaacatcatggggcaggccctgtaccagttcctcgtcatctggagcctgcagtctcgagggaaatcgctcttcgggatcgagcgccgcgccgactcggacctcgtcctcaacaccatcatcttcaactgcttcgtcttctgccaggttttcaacgaggtgagctcgagggagatggagagggtgaacgtgctccgaggcatcctagacaacaacgtgttcgccatggtgctcggcagcaccgtggtgttccagttcgtgatcgtccagtgcctgggcagcttcgccaacacgacccctctcagcgtcgcgcagtggggcgcctgcgtcgccatcgggttcgtcggcatgcccgtcgccgtggcggtgaagatggtgccggtggagtaggcgggcctctcgatctct

SEQ ID NO: 120587 - DNA, 105 bp, Zea Mays
cacgaaacaacgcgcacaacagcgcgcgacactcgaggatcactaacaaatatcgtatttattataaacgagcatttgggcaagacgtttgagttactaatattg

SEQ ID NO: 120588 - DNA, 522 bp, Zea Mays
tttttattttagaattggtctctcttatttttggtcaaattctagaatgatcagatgctcgacaaaggcatggtggtgatgggagctcctcaaggccaacaaaatggtttcaaggaggcagccaactcggtggagttcctagaatcctatcaacccatatggcaaggcaaagaaaatgacagtggacatcatcctagattttacaaaatcaaaggagcaaccagacatggctgtcatgatctaaggtctgatgttacttggttcgtctgcttggccatggaaatcgacgagagccatggaagcagcctttgctcaagaagggtgacatcatggtcgtggagatctccaacctctatcaggtcgaagagcgtgaatgacctatcctccccatcatgccaaacccacaaggatgacgacaacaacaacctagaggacgaggacgagtggcaggacgggaagaagttcgatgcggtggccaccttcaagatcctcagcgaggttgacattgctcaccttagttag

SEQ ID NO: 120589 - DNA, 861 bp, Zea Mays
cgtgaatttggcggggctgccgcagggatccgagacgtggtggctgcacagcgacgtccgtgggagcgggcgagcgactgcaggcagagggtttcgtccgaaccctagtgtcctccacacgccgtcgccatggccgccgtccgcgccgccctccgcctgcagcgccagtgcctcgccgccaacccctttctcttctccgggcatggcctccgctaccgcaagcttgaggtcatcctcaccacgactattgataagctggggaaagcaggcgaggtggtcaaggtggcgcctggccacttccgcaaccaccttatgcccaagatgctcgcagtcccgaacctggacaaattcgccatactcatccgagagcagcgcaaggtaagctccgtgccttcgtcctttaagacgctaccaccgcaagcatgtctgttcgggtgcctagtcgctgcaaaccatgaggtccagtgtttggccaggaaaaaactgtatcactgtccgaatatgtattgcacattggactaatggactatgcacagactgttcatgcaacattccctggcacagctgtttcctacggcaatctgataagtagcctaagaatttggtgctacttggtgcaacccgcattcaaaatgttgtggtgcgctggtgcctctactccattcctagttcctacccatgtttgctgtttatagctctgttcgtttgcaaccttataaggcgttgtttctttaaccagctctatcaacgcgaagaggaggtcgcggtgaaacaagtcacggagaaagatgatgatgcacgggtaggttgtgcagctcacaagctagaaatattttctgacctcctttattgatgaaagtt

SEQ ID NO: 120590 - DNA, 934 bp, Zea Mays
cgtgaatttggcggggctgccgcagggatccgagacgtggtggctgcacagcgacgtccgtgggagcgggcgagcgactgcaggcagagggtttcgtccgaaccctagtgtcctccacacgccgtcgccatggccgccgtccgcgccgccctccgcctgcagcgccagtgcctcgccgccaacccctttctcttctccgggcatggcctccgctaccgcaagcttgaggtcatcctcaccacgactattgataagctggggaaagcaggcgaggtggtcaaggtggcgcctggccacttccgcaaccaccttatgcccaagatgctcgcagtcccgaacctggacaaattcgccatactcatccgagagcagcgcaagctctatcaacgcgaagaggaggtcgcggtgaaacaagtcacggagaaagatgatgatgcacggctacaggaagaaagaatgaagcagtaccaaacggcagcgaagcggctagataacgcactcttggtgttgaggaggttcatctcgactggaaacgagctgcgtactcctgtaacaaaagacgaaattgtttccgaggtggcgaggcagctcaacatcaacatccatccggagaacctgcatctgcactcacctttggcgtcgctcggcgaatttgagttgcccctccggttaccgcagaacataccgtgcccagaaggtaagctccagtggactctgaaggtgaagatcaggagaaaatgagcgcaggaactggggaagtttcttttgtccccccacaatctggtgtatggtaccaaaccattgttatgcaaagtttcctttgcataacccggtcccagtttagctccgaaacattttttttctgatgtataataaaagagtaaggttgcagaaagattgaatagcttctacatccttcagttcccttctttgc

SEQ ID NO: 120591 - DNA, 275 bp, Zea Mays
gtccttgccgtcggccgctgcaccgacccctccgccactagagggcgctgtggatccgaaggcctgccccctgctgcctggaaccttaaccctagccactgccattagtagcaggctagcagcggcgaggcctcgacatgcctgtccgcttgcttcaccacaagctcgtcggggaccgcatccttgcccaggcttcctctcctccatccccaagatcgccaccaactcgggcatcctgatgagctacatcgccgacttcgcgtttgccggtctcc

SEQ ID NO: 120592 - DNA, 1299 bp, Zea Mays
cttgctcgagcgtgcgatgctcctccagcctccccgacgtccagccgtcctctctccttcccctatctctctccagccccagctcgtggagctccctccgtcctgctcgctcatggccgaagccaccttgtcccacgtccggtcgaccggctcagcttctccaagtgccgcgcagagctctgtggtgttcgccccttctccctgccgcgctgagatccccatggcgcgccagccctccacgctgagctgctctcaagctgcgccctgccgagatctccttcctgcgcgcgcgtccttcgagctcgcccgctgctcaaccttcctctctgcgcactgctctttggccgcgcgcagtttcttcctggcgtgtgcgtgaacttgtccctgcgcgccatgctcctccccgacttcttcccctgcgttcctgtgtcgcgccctggagctcgcccagcgttcttcctcgctgatgatcggtggtctcttcgcagcgacgccgattcgtgctcccgtcgatgctggcggcagtagatgtttttctccctgcgtgcgcgtctcctctccatcttcctgtgctgtgcgcgcagccgagcttctccctgcgtatgcgccgtcgttctcctgcgcgcagccgcgcagcctctcttcaccggcgtcgttctctcttccggtgctatgttggccgcgcgtttcccctgcgcgtccggcgtgttcctcgctgccacggttgtccggtgttttgcccgcgtcgattcgcgttcgctcatatcgtcatgttgttgctagtgatagcttcgcgtgcgcatcaaactcccgcgtcgagtctttttcctgctcgcagcgcgctctctcgactcgctcgactttaattctcaaccgcgtggttgacctcgccgttcgccgtcgctcgtcgtcgtgttgtttgccgtcgagtcgtcaaacacgtcatctcctgctcaaccctacctcaccagctcgctcaaagttgtcgtcgttctgcgcgtcagcaagaaattccaagaaccgggtgaagacgaagctagcagcgtggtgtttaccaagtgcgcgacaaaaagctcggacatcctgcgcgactcaagatcaattcgtcaaaattattccgtcgaggaaaagatcttcagcaattgattatcgaagaaaagaaggctcctgggtgacgtcaaccggaaccagtagtcatgcttctgactatctcgtcaaattagtcagggtaaatcgattcgtattcccgtcaactaggtctataaatagattaaataaaattgttggtcacaataaata

SEQ ID NO: 120593 - DNA, 216 bp, Zea Mays
gaaaactatactcttttcatatttggatacggacagacaagcagagaaacaccagttggtcaagatgttagctggtttccagctcggtgtgattaggtcacttgcactctttgttgctattgtcatctgcaacaaagctctcatctgcacgcttggttttccgtttgctacaacattaacaagctaacatctgacggtggccttctgcacccttca

SEQ ID NO: 120594 - DNA, 4249 bp, Zea Mays
atggcgacgagtagacgccatgtaggtggagaacgggccggtgcgggtgctggaggggtgtcgtccttcgccgcgttgctgctgggctgcgccgtcgtcagcgccgccgcgcagggcccccggctcccctccgactacaaaactctgagcggtgccgctccactcgtggtggccgaaggcggcttctctggcctgttcccggactccagcgagggcgcgtacgctttcgccgtggccgccagcgcgcccggcacggccatgtggtgcgacgtccagctgaccaaggacggcgtcggggtctgcctccgggacatcaacatgaagaactgcaccaccgtcgaccaagcgttccccgcgaggaggcggacccacgtcatcgacggcgtgcggaagaccggctggtttgccccggacttcaccatcgccgagctccagtccgtctacctgacacaggcgatctggtctcgcaccgacaggctcgacgcgggcatgtacccgatcgtcaacgtcaccgggctcccgtccctcgtgaagccatctccggtctggctgaacgtgcagcaccccaccttctacaagcagcgcggtctggacatgagcagctacatcctctcgacccatcaagacctggtacccaccgtggcatacatctcgtcgccggagctgggcttcctccagaccatatccgccgtcgccggtcgcactcgcacgacgaccaagctcgttttcagcttcctcgacaaggccctcctggaccactccgtcaacaggacgtacggctcgctgctggcgaacctgacgctcgtcaggtccgtcgcgtccgggatcatggtgcccaagagctacatctggccggtgaccggcgacaactacctgctgccgtccacgtccgtcgtcacggacgcccacaaagcggggctggaggtttatgcctctgacttcgccaatgatagggtcatcccctacaactacagctacgatccggtggccgagtacctgagctttgtcggtgatggcggcttctctgtcgacggcgtgctgtccgactaccctatcactgcgtcagaggcaattggttgttttgccaaactgaattcaagcaagactgatcatgggaaacccttggtcatctcgcacaacggcgccagcggagactacccggactgcacagacctggcctaccacagcgcgatcgacgacggcgcagacgtcatcgactgccctgtccaggtcacgagcgacggagttcttgtgtgcatgagctccgtcaacctgcttgacaccacgaatgttcagacaactcctctcgcgacccctctttgtcttgtcccggagatccagtctacgccagggatcttcaccttcaacctcacctgggccagcatcagcagcggtgctttaaaacccaagatttcttccccggtgagtgagtactatctcgtaaggaacccaaggtacgcaagccaagggaagtttctgaagctgtccgacttccttgcgatggtaatgggcaacgatctgtccggcgccatgatcatcatcgagaacgctgcgtacatagcgacgtcactaggaatcgacgtcgtcgactccgtaaccgccgccttgaacgccgccggcttcgacaagcagacgagcaagcaagtcctcatccagtcgaccgacagcgccgtcctcgtcaagctgaagcagcagggaacaagatgcaggctcgtctacaccctcccgctgggcatcggggacgcctcgaactcgtcgctgcaggacatgaagaacttcgcggaggccgtggtcgtcgacagggggtccgtgttcgccgtgagctacgcgttcatcgagggccagaaccgtctcgtgccggacctgcaggcggcggggctggccgtgttcgcgcaggtgttccggaacgagttcgtcgcccgcccgatcgacttcttcggggacgccaccgtggagatcaactactacgtccaggcgcttggtctggcaggcctcatcgctgatttccccaggacggccaggagatacatggagaacacctgcacggttctggggaatggcatgcccggctacatgcggcctgtggagcctggcgcaatcatgaagctgctccggtccttccaagcccagccgccgtacgtggcgccgatgccggcgctgaatgcgtcgagcgtggaggagccgcctcttcctcctgccgcgccaagaaccgtgccgcccggtggtggcctctcaggaccagcggacgccgccggaactcctgctgctggtgctcgtcacacggctgccgtaggcactggtctgctgctcgtggtggtttccgcagctttgctggtctgggcagacacacgtgagactgtggctaatttatagatacaggactgtacacagaattaatgtgcgtgtagcctatatatacctctcctagctatccctctgtttgatgtcgctgtgcaacggcatacatctgatagatcctactacgatgtcacgtcacgtgtgctcggctccagcgtccttatatttgtacctccacgcaacgaagacataggcgaagaactggagggcgctgagcgcggcgagcagccagtagaagtagtcgaggtggccgccgttcatgttatccgagaaccagctctggcccctggccgccgtcgcccggtggatgcccgacacgagcgcgctgctgacgaagctcccgacgccgaagacactgatgtacagcgccagcccgacgctgcgcagcctgtcgggcacctggtcatagaagaactcctgcaggccgaccatggcgaacacgtcggcggcgccgaacaccacgtactgcggcaccatccaccacaggctcatcggcagctgctgctgcgccgccgccttgccgggcgtgtcggccagcaggccggcggcggcccgcgcgacccggagccggcgcgcctcgacgagcgccgcggtcaccgtggacgcgacggacaggagcatccccgcgccgatgcgctgcagcatcgtgatccccgacggcctgccggtgtaccgccgcgccagcgggaccaccacgcggtcgtagaccgggatcagcgccatgatggtcacgctgatgaaggccagcagcgccgccgccggcaccttggccagctcgcccacgcgccggtccagcgtcgccgcctgctttgtgaagaacgtcatggactgcgagtacaccacggcgtacaccagcgttgtcgcccatatcggcaacagacggaggacgtccttggtttcgctgaccaggaggacggctgtgttcgtcgtcgccacctgcgcttcctcatcgactctgctgctgctgctgctacgtcgctgccgacgccagcagccagcgaaagcctcggcggcgtgagcgaacaggccgttccgcgtcccgaccgtgtcgccggtgtgccggtacgtcctcgtaccgagcaggaacacggcgagggcgcacgccatgacggcgcacgggacggcgaagccgaggccccagccgaggttctcctgcacgtagctgacgaccaggagcgtggcgacggtgccggcgcacacgccgaagtaccaccagttgaagaaggcgcccctggagacggactcgcccgggtcgctgccgctgaactggtcggcgccgaacgcgtgcgcgcacggcttgtgcccgccctcgcccacggccaccacgtagagcgacacgtagaacaggaccacctgggcggcgggcggcggcgggcacttctcaccggcggtgtgggcggcagcgtcgcagtgctgccccccaaccacggttgacacggccagcaggcctaaaccctgcatgatgtgtgaaattaagatggtgtgatcttagttactaaataaaattatatataaaacaacattaactaacttaatttacgttaccaggatgtataggagtgacgctaagacaatggtgaggtatcttcccagccacaggtcagcaatggcgccgcccagcaggggcagcatcagcgccgtgccgttccacacgtttgtggcggcagccgcggccgcgattccctcttgcaggggtcccgttagataggtgatcagagttgaggccactgcgtagaaagcgaagcgctcgccgatctccgccgctgcatgcatgcacacacccatcgatcgatccgtatgagtactatatgatcgatgaactgatcaatgaaacctttgacttgcctattataaaaacggctgatctccagccgccggttctcatcgtgag

SEQ ID NO: 120595 - DNA, 1856 bp, Zea Mays
ctcgaccggaaaaaacaacaccgctccactgcggggctgcccatcttcttctgacctctttcttctccgcatccactgccgcgacgggacctcgccgcggtgcgacctcaccgctccactgacgcaacctcgtcggctgtgccatgggagctctggccccctcgcatcagctgctggcgggcccgcgagctagggtttccggtcaccgcggatctcgacggcctccttcgctgagctcctcacagccccgcgatgcaatatcgtcagccgtgccgcctgagactccggattatcaaaagttgatgcgatctcaccaccagtgacaagagctagccgttcaatgccctcaaaatcagcatgctcaattgcgaggatgccaacatcaacaaagagttcttcagggaagttatagattaactgcctgttgacaaaatagttgatcccatgcgctataatcttctgcaccttctttctcattttctgcttttcagcagcttcaatatctgcaaccttaaacattgaatccacccagacacatgccccatagtcttaaatctgtgtccatagcactgtttgcaaccaaaattttggcattctcaattctcttaggttgcccaatgccaattttcttgtcaagaatgaacccttcatccaaaaaggagtccttaagagatcctccaggtttcttcagaatttgaatggcttccaggttggtgctgcccttaagccttaatacagcgtcaactgcaagttcagcaaagtactctttatcctgggaaagaatttttgaactaagggtagtcatagcaatgttcatgagatcagctctgaacttatctgaacatactgtacatgttaaatcagtgctttactttgaactaataaaacaccgttaactggtaatttatcattgctatggtccttcaggctatttgaggagatgtcgtcatcgtcatcatcatccttactctctggctccaatactgtgagtgttgagcttcatctaatcccttgcaagctctgcaatggggtggtgattgagcgggtctccaaacaaccagaaagcacatcgaggaagttctaccggtgcagagccaagaaaatggatgggtctcaatgtgattttttccattggcaagcgagctatgctgttttgttaatcaaggatggggttgtcagtggtgaccattgccttgagttgttaatggtcgcacttaatgatcatggcaaagctgttgaatctctaaccaattccatcagagagatgaagaaaaagttgtccgacctggagttagtgatggaagagctggataacgtgaaaaagtcaatgaaggcagccatggttggaattgaggaaaacaataaaacgatagctgcattgaaactgatggagaatgagatgcaaatgctgaaagggtcaactaaagtgaaacctaggaatatggcactgtgttttctgcttttggcgttgattgggtggtttgtgatgggacagatgtattggggggaggattaggaagcatccggccgatttatgctgagaggctaatgaactttggatggacttttgtatagctagatataatcagaactggttaggcctagagatggcaatggggacccgatccccgattccccgcggggaattcatccattaggggatggggatggggaagaaacttcccccgcggggatataaacggggaaagtttatcccccgacgggtaaatggggatggggacggggaagcattccccatccccgttccccgtggggacccgttaacttgcatgtgactatgtttttgtgtaccggttaacaacaaaaataaataattaccttgtcaagagaccact

SEQ ID NO: 120596 - DNA, 1327 bp, Zea Mays
aaaaaacaacaccgctccactgcggggctgcccatcttcttctgacctctttcttctccgcatccactgccgcgacgggacctcgccgcggtgcgacctcaccgctccactgacgcaacctcgtcggctgtgccatgggagctctggccccctcgcatcagctgctggcgggcccgcgagctagggtttccggtcaccgcggatctcgacggcctccttcgctgagctcctcacagccccgcgatgcaatatcgtcagccgtgccgcctgaggctatttgaggagatgtcgtcatcgtcatcatcatccttactctctggctccaatactgtgagtgttgagcttcatctaatcccttgcaagctctgcaatggggtggtgattgagcgggtctccaaacaaccagaaagcacatcgaggaagttctaccggtgcagagccaagaaaatggttatttctcaatttttgctcaattgataagttatatggtttgggtaattttgagggcccaatgctttcttctttacaggatgggtctcaatgtgattttttccattggcaagcgagctatgctgttttgttaatcaaggatggggttgtcagtggtgaccattgccttgagttgttaatggtcgcacttaatgatcatggcaaagctgttgaatctctaaccaattccatcagagagatgaagaaaaagttgtccgacctggagttagtgatggaagagctggataacgtgaaaaagtcaatgaaggcagccatggttggaattgaggaaaacaataaaacgatagctgcattgaaactgatggagaatgagatgcaaatgctgaaagggtcaactaaagtgaaacctaggaatatggcactgtgttttctgcttttggcgttgattgggtggtttgtgatgggacagatgtattggggggaggattaggaagcatccggccgatttatgctgagaggctaatgaactttggatggacttttgtatagctagatataatcagaactggttaggcctagagatggcaatggggacccgatccccgattccccgcggggaattcatccattaggggatggggatggggaagaaacttcccccgcggggatataaacggggaaagtttatcccccgacgggtaaatggggatggggacggggaagcattccccatccccgttccccgtggggacccgttaacttgcatgtgactatgtttttgtgtaccggttaacaacaaaaataaataattaccttgtcaagagaccactaattgtacaaatgtgttcattttgatgtatgcataatgatttcttac

SEQ ID NO: 120597 - DNA, 1406 bp, Zea Mays
atgacatcaatgatagacaggtggcgcccagagacaaacacattccatcatagaattggtgaggtcaccccaactttgcaagatgtttctatgttatgtggccttccattgaaaggcaaaccagtgtattctatcaatgtgcgcaatgattggctggaagaccttaataaacggttttcaagtattccatggaaggagggaatgaatgtaccggaggttgaaaaaatcgataccaaacactcaaatggcccactcctgcattggctcaaatctctcagtggcaacgttgcagataagttcttcataacatatgctaagcttttagctgacatgaataacagagattgcatttatagttgggggtcagcagtactagcagcaacatatgaaggactttccaagatttgcataacaacaggactttcaatgcccaagttgaggtgggctagcgaggatcctaagaaggcacgtaaaacattcaccgaaatgttagataacattaaagacatagattttttgtggaacccatacaccagaacatgtattgaaacagttgcaccacatggtctctcattgttgtgctcttgtgacaaggaatattggaaaaccaaggatggcctcatcttcaacaacactgtccagaagcacccggtagagcgggtgatgcgacattttagtttataccaagagcagttgttggttgcagtagaggatcagcaagaaggtgagcagttgttggttgcagtagaggatcagcaagaaggtgttgcatggccagaaagagagccaacaaatgtactgaaggaggaaagggtacacgatgttgatgcattcaaggagtacctgaaatggtttagggaacgttcacgtgtacgtgtggctttcattcctgaggatcccagaatgaccaacgaggatcccaaaatgaccaacaacaaccatcttctttcaaaagcaataagtatttccataccagttattagttgcttttatgacaccatagtttcctcactactcaacacaattaagtataattttcttatttctcaacacaatctcttcttttggcaggttgatattatcacatgggcccaggagaaaacggcagcagactacaaccaggagactgtaacagatgaggccatgatattgttagatatcaatgtgaagtgcaaagaattcctggattattataatgaacttcagccaacgaccttggatgcataggatgaactaacagaggacaaaactcacacaaccatggatacagacgtcaatccaaattctgcttcagtttgtaacggctcttaaaattctacttccttttgtgaaggtggcagtcgtgaaggtggccatgaacaaaaaaatccaaacacttttgtgagagaaagcaggtcaaaaaggcg

SEQ ID NO: 120598 - DNA, 1694 bp, Zea Mays
atggctgccttcatcgactttttcacgttatccagctcttccatcactaactccaggtcggacaactttttcttcatttctctgatggaattgaacttcctcgacgtgctttctggttgtttggaaacccgctcaatcaccaccccattgcagagcttgcaagggattagaggaagctcagcactcgcagtattggagccagagagtaaggatgacgatgacgatggcggcatctcctcaaatagcctgaaagaccatagcaatgataaattaccagttaacggtgttttattagttcaaaataagttcagagctgatctcatgaacattgctatgactacccttagttcaaaaattctttcccaggataaagagtactttgctgaacttgcagttgacgctgtattaaggcttaagggcagcaccaacctggaagccattcaaattctgaagaaacctggaggatctcttaaggactcctttttggatgaagggttcattcttgacaagaaaattggcattgggcaacctaagagaattgagaatgccaaaattttggttgcaaacagtgctatggacacagatttaagactatggggcatgcagttaatctataacttccctgaagaactctttgctgatgctggcatcctcgcgattgagcatgctgattttgagggcattgaacggctagctcttgtcactggtggtgagatcgcatcaacttttgataatccggagtctgttaagcttgggcactgcaaggttattgaagagattatgattcgggaggacatgctaattcatttggcagttacctcaggcggcacggctgacgatattgcgtcgcggggctgcgaggagctcggcggaggaggccgccgagatccgcgctatctggtgattgtatcatataacatatgcttattctttcagttacttaattcataccccatgctttcatgtatgcctaacttccagattatattgttcctgaaatgcaaagtgaatgtcgtggacggtccttttgcccacatgaccatgaaggagcaactccgtgctatactcgaggcttcagtggtaataggggctcatggggctggtctaacacacttggtttcagcaactcctgatacaaaggttcttgagattatcagcagcatgtacgggcccccacattttgcactgatctcacacgggaagtctctagagtaccatgccataaatctccccggatcatttgcaaggatcacagatgtcatcggtgagttgagaaaaatactggaatgtctcggatgctgaaacagaggtgagtcatgaaagccacctcaggacatgcagaatagatagcgtctctacttcatcatgcgtacttggtcacactaactgcaccgaggcatatggaatttaatctgaggacactgttccacggactatttggaccattgtgccaagaaccgaaccgttcctagttcccagcaaagaatgccaagaaagcaatcctctgtttggtctctgacagcaaacgataacacgtaatccaaccttaggttgtccactctgttcttggacatgattgtaggaccacaatcttgacaccaagcggtattcatgtccggcttatagattcagcatatcttttgtatcgctgtatgtcgagtactttttgtattgtttagctgttgattactgct

SEQ ID NO: 120599 - DNA, 1615 bp, Zea Mays
gaacagaagcaaagcttcgtccggggagaacgtactagtcacccacagcaagaaaccaccccccatccatggaagacccctacacgagcttcttcaagagcagctactactactacggctcctcctaccccgctgccccagctccccaccatctcccaccgtacaccaccctctacccggcggcggcgtctcatcagtaccctgcgtgcttcttccagccgccgccgctgccgctgcatgagcatgacagcccgccctcgccgccgctacgggaggcgctgcccctcctgtcgcagtcgcctacgcgcgccgcctcccgggcccggcggccgcgcccgcacgtggcggtggactccgactccgaagacggcgccgatgacttcctacgcgagggcgccgtcggcagctccgtggccccctcgaccactacgacgcgtgcgccgctcttcgccgacctcaactgcatgccctcctgctgcgacgacgacccgatggacctggaggcggccgccgcggcgcccacggacgacgacgccgacgacgccgcggtcgcgctgcgcatcggcctgcccccggctcccgtcaacggctgcggtggcgcggggtctgacctccggtccgggctctccggcaggggggcctgcggcggaatggaggccgaggaggacgaggacgagtgcaacaaggtgggcgacggcgacggcgacgaggtggtgccgctagggttcgcgtccacgcccatcgggaggctcaacaaggggcagtactggatcccgactccggcgcagatcctcatcgggcctacgcaattctcgtgccccgtctgctacaagaccttcaaccgatacaacaacatgcagatgcacatgtgggggcacggttcgcagtaccgcaagggcccggagtcgctccgcggcgtgcagccgacggcgatgctccggctgccgtgctactgctgcgcgccggggtgccgcaacaacatcgaccacccgcgggcgcggccgctcaaggacttccggacgctgcagacgcactacaagcgcaagcacgggctgaagcccttcctgtgccgcaagtgcggcaaggcgttcgccgtgaagggcgactggcgcacgcacgagaagaactgcggcaggctatggtactgcctctgcggctccgagttcaagcacaagcgctcgctcaaggaccacgcgcgcgccttcggccacggccacggcggcgccttcggctgcaacctcgccggcgccgacggccttgacgacgacgacgacggcgccgtctccgacatcgagcacgactgcgccgcgcggtgatccgtggccgtgcttgttgttcatgcatgcattgtattgttagttgcttcccgtgtcgctgtcgacgtctactactgtggtagtttgttaatcagggctgtggaggtcaggtgggcttgtgatgaattgtgtgatcctgtgttcgttcgtgccgatcgatcgatcgaaaggccgggctctactgttagtctgttactagggacggtgcatggtgattcaggattggtgttattagggtgcatggtgatatcaacagatcatcatgccatattaattaagtcatgattgggggaaaaaca

SEQ ID NO: 120600 - DNA, 121 bp, Zea Mays
ttcgatcaatgcagtcaccgattttaaagtgaaagaccaatgcagtcaccaatattcaagtaaaagaaggcgctctagtctgagagagacatattaaagtaaaataacaggtactctagtc

SEQ ID NO: 120601 - DNA, 177 bp, Zea Mays
ctggacgggagcagccttgcagtccatccctcaatgtctttcacgccgatatcaaagcgagggctgatgacgccgcacttgttcagcctcccgttgagttcgaccacgatcttgcccgatcggtggtcatcaacgtactcgaactctccaatctaaccgtggcgctgcatgaccgtc

SEQ ID NO: 120602 - DNA, 1714 bp, Zea Mays
cccgagcaacagacgagcggagtagtaggtggcctcccgacccggggttctcctccactcccgcagtcccgctccagctttctctgccccgaccccgatcgatgctaaattcccgcgccgagccgctcgcccgcctcccaccccatcaccgagccgcctcgcgcggccccccgtcattttcgcccgactctctcgcctcggaggacgtagagagaggagaagggagtcgtcgtcgtcctgcgcccggcgctcgggccactggatccaggggttgcggtggatttggagcccggagtggactgattgctgatggtattctccgagggaggaggcagggagagagcggggcaggacgatggcgtcggaggatctcggcgtcgccactaaggatacagaagttgtaaacacaaaaccagcaaagcgatacccacttgcgttatggatagccatattgggcctgataatgctagttggtgtgtacatattctcgttgtctctaaagcaaaatgggatgcttttcgggctcatgcagacaaatttgatagaaaaggaaagggagaaaccttgtcatgatcccggtattccagacacagaaatcccttacttgcactacccaatgccaaatacttatgatagaatgtgcgtgcacgggggttaggttctttgctatattgtcaatgcagaggtcagggagtggatgggttgagacattgttgaatagccatcctaatattagctccaatggagagatcttctctgtcaaagaaagacgcagtaatttcactgcgattaagaaaacactggacaaattgtacaatttggattggtacagcagtgctgctaagaatgaatgtacagctgctgtggggctgaaatggatgctcaatcagggcttaatgaagcaccatcaagagatagttgaatacttcaaccgaaggggcgtttctgcaatttttctactaagaagaaatcttctcaggcgttatgtctctatattagcaaatgctcatgatagtgccatgaaacagctgaatggaactcataaagctcatgtgcactccaaacatgaggctgaaattcttgctcaatataagccaaccattgacaaaaaaacattgatcgctgaactaaaacggtctgataagtttgcagctgatgctttggtgaatttcaagaacaccaggcatgtcgttctgtactatgaggatgttgtcaggagtcggacgatgctcatggatgtcctggattttctaagactgcctaagaggaagctgttgagtcgacatgtgaaaatccacactaaacgattgcgtgatcatattgataactgggcagacgttaataattttttgaaggggacgccgttcgagagctttttgaatggctcaaggagatgacatcgctagctgatgtatatagggctatagtgtgctgcccttttgacgctttggtacccctttctaaggttaacagagttagcacagtaggcaaaaaaaatttgacatcatgatcgaataagtttgggtcagtgagagaaatagttaggaagcagaagtagatatgcttgatccaggttagtctcatagatatggacttcatgacagcagaatgaagacgagaaacaatacctttggggttatcaaatattcaatgcaagaacttgtaaaagctgtctggactcattcatgaatacatcgaagtttacacttgaaaa

SEQ ID NO: 120603 - DNA, 1719 bp, Zea Mays
cccgagcaacagacgagcggagtagtaggtggcctcccgacccggggttctcctccactcccgcagtcccgctccagctttctctgccccgaccccgatcgatgctaaattcccgcgccgagccgctcgcccgcctcccaccccatcaccgagccgcctcgcgcggccccccgtcattttcgcccgactctctcgcctcggaggacgtagagagaggagaagggagtcgtcgtcgtcctgcgcccggcgctcgggccactggatccaggggttgcggtggatttggagcccggagtggactgattgctgatggtattctccgagggaggaggcagggagagagcggggcaggacgatggcgtcggaggatctcggcgtcgccactaaggatacagaagttgtaaacacaaaaccagcaaagcgatacccacttgcgttatggatagccatattgggcctgataatgctagttggtgtgtacatattctcgttgtctctaaagcaaaatgggatgcttttcgggctcatgcagacaaatttgatagaaaaggaaagggagaaaccttgtcatgatcccggtattccagacacagaaatcccttacttgcactacccaatgccaaatacttatgataggaaagaatgtgcgtgcacgggggttaggttctttgctatattgtcaatgcagaggtcagggagtggatgggttgagacattgttgaatagccatcctaatattagctccaatggagagatcttctctgtcaaagaaagacgcagtaatttcactgcgattaagaaaacactggacaaattgtacaatttggattggtacagcagtgctgctaagaatgaatgtacagctgctgtggggctgaaatggatgctcaatcagggcttaatgaagcaccatcaagagatagttgaatacttcaaccgaaggggcgtttctgcaatttttctactaagaagaaatcttctcaggcgttatgtctctatattagcaaatgctcatgatagtgccatgaaacagctgaatggaactcataaagctcatgtgcactccaaacatgaggctgaaattcttgctcaatataagccaaccattgacaaaaaaacattgatcgctgaactaaaacggtctgataagtttgcagctgatgctttggtgaatttcaagaacaccaggcatgtcgttctgtactatgaggatgttgtcaggagtcggacgatgctcatggatgtcctggattttctaagactgcctaagaggaagctgttgagtcgacatgtgaaaatccacactaaacgattgcgtgatcatattgataactgggcagacgttaataattttttgaaggggacgccgttcgagagctttttgaatggctcaaggagatgacatcgctagctgatgtatatagggctatagtgtgctgcccttttgacgctttggtacccctttctaaggttaacagagttagcacagtaggcaaaaaaaatttgacatcatgatcgaataagtttgggtcagtgagagaaatagttaggaagcagaagtagatatgcttgatccaggttagtctcatagatatggacttcatgacagcagaatgaagacgagaaacaatacctttggggttatcaaatattcaatgcaagaacttgtaaaagctgtctggactcattcatgaatacatcgaagtttacacttgaaaa

SEQ ID NO: 120604 - DNA, 3045 bp, Zea Mays
taaaaatctcgcctcacctctcgcagtccagccaaccccgtcgcccaccccaatctccacgcgtcgccgccgcttgccggcgagtctattcccctccgtcacgccgccgaggctacccggaccccgcagcggttcggataagactgccgcccgccgtccgccacctgccacccgccctcctttgactcccactactctcggccccgggaccgcttcggcctggatctagggttgtgtggggaggggttctggaagccttggccgcgatgggcgagtcagacgatgacgcccgcaccttcaaggtcgttttcaccaccaccggagaggagcagttccgggagctcgtgagggagaagctgcgcggattcaggaggggtctggacgacaccctcgtggattatgttaccatcatgctcaagaatggaaaaagtaaggatcatgccagtgaggaactccatgtatttctaggggatgatactgcagtattcatttcctggttgtggggccatctttcttcaaatatgcacttatatgtgcaaccacaagaacgaactcgggaggttaaggatgatgaggcccccaaagaagtatctggaagagaaaaatcatcagatgtgctcccgagaagcaaacatcaaactcattctgggcacacaattgaatcaagtgaagctactagtaggagacggagtaaccgggaatggaaagggattggtcggaagggtaatgaaaaatttccgcttcgaaatgtactaactgatattcttcatggggaggacaaaagatcgcaaaagtccaatgaagtacgaccccctccatcaaaacaacagaacgacaggaagcgtgaaagggatgatgagacacatcaaacaaagaaggactcctcatcacgctccatgcttggtgatggtgcttcccgtcgtcttctacagtttgctgtccgagatgctgtaaaagctgtacagccaaccagtacctctgctgaaccagcatccaagcgcctgtgctctgtggtcgccactacttctacagagcacatgcgtgataggagatcagaaagatctcaggactacctgaacgatagaagatcagaaagatctcaagacaacttgagtgacagaagatcagaaagaactaggccaatgctacaggtacatggagctgctttagctcttagagctgcagcggaagctgctgcagattctgcaaaggttagatctactggaagtgttttcaagcgattgggtcaagggaatgttgtgaaacagccatctcgttctcgtgaagagaagagagattatgaagattttgagccagttacgatcgcagatgaacatgattctgatcaatatgttaataatgaggaatccgaagaggaatctggagagctaaccatggcagatagggtagctggaagtggaatgtatgttgattcgagctctgaagatgatatggaccgagatgagggtattacaagataccaaacttctctttcacatgacgatactttctcaccatttgcagagaagaaaactgtatcggcaccatgcagtgttgaactagagactaatgcaataagaccttcaagtgtgaatgacgaggaacaacctgttccttcaacaccaacagcaagtaaagctgtcgctatttctgttgatgtaaatatggtggagcctcccagttatgcaacaccaaaagatgttcatgttgtggagaagccttatgttgcacccatgaattcaaatgccgccagtattgctaccaatgccaaagaattaggtcatgctgaagttcaaaaggattctcagcggtctgcaccatctgttccggtttcatatagcacagcgcatccgatggaggatgcagattcaagaacgctttatgttaacaatgttcactttgctgccaccaaggactcattatctcgccatttcaacaagtttggtgcagtgctgaaagtagtcattgtcactaatgccgcaacgggccagccaacagggtctgcctatgtagagttcttacacaaagaatcagctgaacgagcattgtcgttgaatggcacatcatttatgacccgtattctcaaggttgtccggcgaagttctcatgaagcagctcacttttatggttggcctggtagtggacggtcatcaatatatgggaggcatggtaggatggcatacccaagagctgttatccctggtggttcctttagagggcgtgctccgatgaaagctggtgctagaagtttacagtggaaacgggagccttcaggcactgattcaagtgcaggtgcgaaaactgacatgagtgtggcattttcctctgaacaggtgcttccacgtgcaacataggggagtatgttaccgctgagctgatataatgagaaccaagtggtatcccactcgtcgctcctggccctaatggctgaatatggacagcaagctgagaagattgttccttcctgctgcactgtaaaagaaaagtacaaaaaaaatgaaaaatataaaaatctaaaacaagagattctgggggagtttggcatcagattatggctatcattctggtgactggatttggtcctcttggccatatgcgagtaggctgacagcctgagcaattttctatggactccagcaatctgaaagaggattcacattcaaaataatcagagcttggatgtattggatggaagatgcttttcaagtagaacaagatgtgcagattttggaccaggtatttagtgacaatccgggcgtcatcgatgtaagcctcaactgtatagaagtaacctatctatctgtacccttgtgtgaatcaatctccttcccaacaaaaaggggggaaaaggcagcacaaaaaaatatgttctcttttgttttttcctctccatgaactgttttatttattgtactaatatagctgattattcagttggacattcatttttttgtcaaacagtttaacaatactttttttcctgtgtggtctacaattagattgaccgtgctacctgacttgcatttccaccatttcatgttttaa

SEQ ID NO: 120605 - DNA, 387 bp, Zea Mays
tgttctcatcacccttatattattttgtgccattggattattttatttacctatatcaaattattcgaaggttcactttgctgccaccaaggactcattatctcgccatttcaacaagtttggtgcagtgctgaaagtagtcattgtcactaatgccgcaacgggccagccaacagggtcagtttaattgtaaaatttttaacgcttattatggctgagctaagatttgtatcatgctattcattttacctttccgtcccacaacaagattttttttcttgaacgcgcaggagagctgcacatctttatattagagatagaaaaacaggacttacacccaagctaaaacaggaaaataaacaaaagaaaagataagaaaaggaaaaa

SEQ ID NO: 120606 - DNA, 332 bp, Zea Mays
aagagagttttcttggatgagttagagtggtggggtcttgctggtgccaagcatcttgagggcttaggcctaggtgctgccattattaggtccagggatcttctgcgtgagtagtgtagagcaggtgtgtgagtggagtctgctggcacttttgctgtttgcctccttttatgtcatgttgttttcatgcgcggaaagaggctagagtactgtgcgcaacaggagtttggtggtctcgtgttctgccttttaaggcattgtacgttgtctattttgaactcttttcttctcttaatttaatgaaatgatgcgcagctctcctgcgcgtccaa

SEQ ID NO: 120607 - DNA, 192 bp, Zea Mays
tgggtatgggtttgttcttccactacccatacccgcaaacccatgggtttttaaaacccgccttaaaatcaacattccttataaatatgtctcataatattattaattgaatataaacatgtctcataatattattaattgaatatgttctaattgaaataaacttcatgtaacaaattttaagctaaaaat

SEQ ID NO: 120608 - DNA, 228 bp, Zea Mays
gttgctggtgccaagaatgatcccatcaagctccaccgtctgctcgacgtgtttgattctttgaataagctgagactggatttcaagttgttcggcagcaaagcgtgtgcgaagattcagagccaaacgagggaccttgtcaagttgttgatagacggtgctgttgagatcattgaggagttcatcgtgcaagtagagctacagtggcacatgcctcccctagttgat

SEQ ID NO: 120609 - DNA, 1593 bp, Zea Mays
tagtcaaggaagaaactttttaagttgctcaggtttactgctacttggaaaagagtagaatagttttttagaaacatgcagttcaaaaacactcgacatatccttcacaaatcgagggcagaccatcaaagattaagagcctctagggtcttgtcctccattccaaagttcttattccttgttttttcactgcaatttcccttttgtaaacctgcaactgttctttaaatttcttgctctcttcaaagtttgcctttctcttcaaagctttctctatcggaagcagctgtctagcttgttttcaaggtctatgcactctccgaacaacttttataagagagcaacacaccaaaactgaatttatattgaaaatagtggccacatatatgtatggaaaatgtttgtattatgtcttgcttgttaaatctattggcctttcatgtctttttatagcttcacgattctatgcttgttagtctgtgttgctttgtttgatcgaccactcttattacatgtacttatacattcctcttggtgtttctcaaagaaagctactaagtatctgggtggtattcacgtttgtagcagtgtggcatgatctagaatggtggcttctgcataaccctatgtctgacatgattgcttactctgttgccacatcatatgtttgttttttcttactccagctacatattctaagtctatattatttttacatgcttatttgatacataggaaagttgtgtgaagaacaaacttaatcgtgaaaaagtacagtatcaacaatgcacatgctctaagtcctacattgcaaaggcttttatattgaagcaagaaaaatataaggacctggaacctagtgcaatagatcttttcaaggagatgcactgtagcaaaaagaaaggttttagtgaaaatgttcagaaagctattgttgacatggaagaaatggtagcagcaccaattcaagatggacaacaaccaaaatctcctacagaagttatttctaatgtgctaccaggctccagtgtgttcctatgcaatgttggtcttaagtccgcctccaagaaaagctccataacgactgtttttgcaaaggttcaacaacttcaggatgaactggagaccgagaagcaagaaaaagatggccttcgggaagaagtggaaaccttgaaggctcaagcacaagcatctcaggagacaattgatagtatgaagaggtcgatggaagaaaataacaacctccttcatcaactattaagcttcaatcgaggccaagtgcctccatcttaagtctggttgaccactataggacctgcagccttatggctgttatagtggctagttacagtagctctagatttgaagttataggatcatttttcaattatgcttaatgtttaatactttgagttgaagttattggatttgttttggatattaagttaaaggatttgtagatatatgttttaaagttatattattatcttatagatgaaatatttgtgttgaacaaattcatatgatattttggttctgatgtgtaatattctatgacgatatgaatgcatatgttgtattcattgcgatgat

SEQ ID NO: 120610 - DNA, 1608 bp, Zea Mays
acgagttcaaaccaattttctaggtgccaaatggaaagcgtagtccaaccaaagtggaaagtgtgaccgggatccccatccgttccagcccccccagaacccagagctccaaacctaggccggagccgcggtgcaagcagctacgtggattggacttggacgtctggctctggaggtcccaagttcccaacgcttgctggagttgagatctggtgggcttccggaggagacgccgacggtttgcgaggtttgctggctccgtggcgtcgcggaaggtcatggagcaccgcgccttcgactgcagcgggagtgatgatgatctccctccaacatatcaaattagagtaccgagaatgcatttcagtgggaacagaaggcaattagcaggcccattttctcagccaagaccacacaacaagttggatagcgatatacatcagattgagcaacaggcatatactggtgttcttagagcattcaaaatgcaatcggatgccctgacatgggaaaaagaaagtctaattactgaactaagaagagagttgaaagtctctgatgtggaacacaggatgctattaaacatggtcaatgaagaggaggctatccatagaataaggcagtcaaggcagggatgtggaatgcaatctagcttgccttataatagcgtagttgatcacaaccttggacctatcaagcggcagaagaaatcacatcccatctattcactccctgtggatccccattcacccagcatgcctttgaaagcattggtggacaacaagatatatacactggcacctgaaaacataagacggggatctgcctatcaaacccttccacatcagggtggttggctggcatctgatggtgctacgaaaggtatggatgggagaagcggaaggtatcacacgaacgagtattatgcttcacataatgacatggggcttttgaacttcaatcgtactgacatacctgatactgaaactcttgtgaaaaaggtacatatttctcagtttggtgaaattgaatggaagattgttatttcaatgccttctgtgttgtcaacaggtggagagggtattatcccggccagatgtgtatgcaattgaaagggcaaaggaactgcttataggccaagagcagtcattgcttgatgcaattgccaaacttgatgaagcatctgaccatgaaagcgatgatacactcgttgggagctggatacacgccgccattgggtgacgcgggcagcacgcctctgacagggggcgatgctttggagttcagacctctggcagcaggcggagaggcaacgatatgtgaaatagtgctgtgtaagtaaaacgctacctgttgttagtccggtaggttaggttcttttggcagccaggcaaatctgtgtatgcaccatgcagtgtgatgggaatatatgtcttgagcaccatcacatgtgatgtgatgctgtctcgtttcatcttcaacgtgagtaagcccgactcctggaaatatgggtcgggtcactagttgtagtattgtagattcattgcccttccccaagttgcacaacttggaaatatgggtcggtttcactagttgtagtcttgtagattc

SEQ ID NO: 120611 - DNA, 1647 bp, Zea Mays
acgagttcaaaccaattttctaggtgccaaatggaaagcgtagtccaaccaaagtggaaagtgtgaccgggatccccatccgttccagcccccccagaacccagagctccaaacctaggccggagccgcggtgcaagcagctacgtggattggacttggacgtctggctctggaggtcccaagttcccaacgcttgctggagttgagatctggtgggcttccggaggagacgccgacggtttgcgaggtttgctggctccgtggcgtcgcggaaggtcatggagcaccgcgccttcgactgcagcgggagtgatgatgatctccctccaacatatcaaattagagtaccgagaatgcatttcagtgggaacagaaggcaattagcaggcccattttctcagccaagaccacacaacaagttggatagcgatatacatcagattgagcaacaggcatatactggtgttcttagagcattcaaaatgcaatcggatgccctgacatgggaaaaagaaagtctaattactgaactaagaagagagttgaaagtctctgatgtggaacacaggatgctattaaacatggtcaatgaagaggaggctatccatagaataaggcagtcaaggcagggatgtggaatgcaatctagcttgccttataatagcgtagttgatcacaaccttggacctatcaagcggcagaagaaatcacatcccatctattcactccctgtggatccccattcacccagcatgcctttgaaagcattggtggacaacaagatatatacattaaaaagttccccaccccccaccgcaccccgacagctggcacctgaaaacataagacggggatctgcctatcaaacccttccacatcagggtggttggctggcatctgatggtgctacgaaaggtatggatgggagaagcggaaggtatcacacgaacgagtattatgcttcacataatgacatggggcttttgaacttcaatcgtactgacatacctgatactgaaactcttgtgaaaaaggtggagagggtattatcccggccagatgtgtatgcaattgaaagggcaaaggaactgcttataggccaagagcagtcattgcttgatgcaattgccaaacttgatgaagcatctgaccatgaaagcgatgatacactcgttgggagctggatacacgccgccattgggtgacgcgggcagcacgcctctgacagggggcgatgctttggagttcagacctctggcagcaggcggagaggcaacgatatgtgaaatagtgctgtgtaagtaaaacgctacctgttgttagtccggtaggttaggttcttttggcagccaggcaaatctgtgtatgcaccatgcagtgtgatgggaatatatgtcttgagcaccatcacatgtgatgtgatgctgtctcgtttcatcttcaacgtgagtaagcccgactcctggaaatatgggtcgggtcactagttgtagtattgtagattcattgcccttccccaagttgcacaacttggaaatatgggtcggtttcactagttgtagtcttgtagattcattgcccttctccaagttgcacaactgctaatatcttaggatgtcccttgaaatggtatgctatttaaacttt

SEQ ID NO: 120612 - DNA, 1541 bp, Zea Mays
ccgggatccccatccgttccagcccccccagaacccagagctccaaacctaggccggagccgcggtgcaagcagctacgtggattggacttggacgtctggctctggaggtcccaagttcccaacgcttgctggagttgagatctggtgggcttccggaggagacgccgacggtttgcgaggtttgctggctccgtggcgtcgcggaaggtcatggagcaccgcgccttcgactgcagcgggagtgatgatgatctccctccaacatatcaaattagagtaccgagaatgcatttcagtgggaacagaaggcaattagcaggcccattttctcagccaagaccacacaacaagttggatagcgatatacatcagattgagcaacaggcatatactggtgttcttagagcattcaaaatgcaatcggatgccctgacatgggaaaaagaaagtctaattactgaactaagaagagagttgaaagtctctgatgtggaacacaggatgctattaaacatggtcaatgaagaggaggctatccatagaataaggcagtcaaggcagggatgtggaatgcaatctagcttgccttataatagcgtagttgatcacaaccttggacctatcaagcggcagaagaaatcacatcccatctattcactccctgtggatccccattcacccagcatgcctttgaaagcattggtggacaacaagatatatacactggcacctgaaaacataagacggggatctgcctatcaaacccttccacatcagggtggttggctggcatctgatggtgctacgaaaggtatggatgggagaagcggaaggtatcacacgaacgagtattatgcttcacataatgacatggggcttttgaacttcaatcgtactgacatacctgatactgaaactcttgtgaaaaaggtggagagggtattatcccggccagatgtgtatgcaattgaaagggcaaaggaactgcttataggccaagagcagtcattgcttgatgcaattgccaaacttgatgaagcatctgaccatgaaagcgatgatacactcgttgggagctggatacacgccgccattgggtgacgcgggcagcacgcctctgacagggggcgatgctttggagttcagacctctggcagcaggcggagaggcaacgatatgtgaaatagtgctgtgtaagtaaaacgctacctgttgttagtccggtaggttaggttcttttggcagccaggcaaatctgtgtatgcaccatgcagtgtgatgggaatatatgtcttgagcaccatcacatgtgatgtgatgctgtctcgtttcatcttcaacgtgagtaagcccgactcctggaaatatgggtcgggtcactagttgtagtattgtagattcattgcccttccccaagttgcacaacttggaaatatgggtcggtttcactagttgtagtcttgtagattcattgcccttctccaagttgcacaactgctaatatcttaggatgtcccttgaaatggtatgctatttaaa

SEQ ID NO: 120613 - DNA, 372 bp, Zea Mays
tcggcgacgtgcagcatgcggagctcctccacgcactcatcggcggaggccgcgtcgggctcctcggcgccgacggtggaggaggcgatagcgaaggcggcacccggtaggcatgaggctctcggccgcggcgggagggcagcggtacaacatctccatgtctacggagtcccaactggctgtgtcgtgcttccgcacggcgcacgccaggaggagctcctcccacgtgccccagatctcgccgccggccgccgccgaggtctctgacgacacgccgggatcgtccaatttgtccgtcgtcctccccagctgtaccaactccacgtcatgactagggtttggttagtctggttgggctagccccgccccgtg

SEQ ID NO: 120614 - DNA, 339 bp, Zea Mays
atgacgcctcgctgcagcggcgagatgggagctaaagatcttcagcgcggacaccttctactatggccctccctcatccgctaccatgtgccccattccatggacgatgagtgtctcaaatctccgacgtgccgccactgccattatatgttgtgttgtgctctgactgcgactgtgccgacgccttctgttttggccatctcacctcagcgtccgtgcgtcccactccatcgtgtacggtgtacttctcccgctcctcaattcatccaatctcgcctcgagtcggccatgcaccggcgcgccgccaccgccatgcccggggagttggagcagggttga

SEQ ID NO: 120615 - DNA, 3264 bp, Zea Mays
ttccccgaggccgcccgcgtcccgaggagtggaggaggtcaccccgagacagtcgcttcaccgccggtctctcctccccacctccacgcggctcgcggccggccatacaccgcagcactaccttggtgggggcttgcgccagagctcgcgaccactgcccgtgacgcctgtctttgactcgttgaccgcggagtgagcgcgcgcgccggagccggccagccatggaagtgcgcggcggagtggggcagggttcggcggcccggcacccgcccgcgccggagccgtcccgggcggcggcgcgggttcaggcgggggacgcgctgccgctgccgatacggcacacgaacctcatcttctcggccctgttcgcggcgtcgctggcgtacctcatgcggcggtggcgcgagaagatccgctcgtccacgccgctccacgccgttgggctcgccgagatgctcgccatattcggcctcgtcgcctcgctcatctacctgctcagcttcttcggcatcgccttcgtccagtccatcgtctcgtccggcgacgacgacgaggacttcctggtcgggtcgggagctccggcctccgccgccgcgccctcccggcagcatgcgcaggcgccggccccgtgcgagctgctcgggagccccgccgcggcgcccgagaaaatgccggaggacgacgaggagatcgtcgcctcggtcgtcgccgggaaggttccgtcctacgcgctcgaggccaggctcggcgactgccgccgcgccgccggcatccggcgcgaggccctgcggcggatcacggggcgggacatcgagggcctcccgctcgacggcttcgactacgcgtccatactaggccagtgctgcgagctgccggtcgggtacgtgcagctgccggtgggcgtcgccgggccgctgctgctcgacggccggaggttctacctgcccatggccaccaccgagggctgcctcgtcgccagcaccaaccgaggctgcaaggccatcgccgagtcgggcggcgccaccagcgtcgtgctgcgggacgcgatgacgcgcgcccccgtcgcccgcttccccaccgcgcgccgcgcagccgagctcaaggcattcctggaggaccctgctaattttgacacgctttccgtcgtcttcaacaggtcgagcaggttcgcgaggctgcagggggtgcagtgcgcgatggcggggaggaacctgtacatgagattcagctgcagcacaggggacgccatggggatgaacatggtctcaaagggcgtgcagaacgtgctggattttcttcaggatgacttccatgacatggatgtcattagcatatctggttcatcttgctctctcggtttttggtaaagttgaattacctcagtttactgagtcacgtagtggctgcttagtgtactgaactttcagagcattcttctaccattaaaaaactaaaatggattcccacgtcaagcgttatcttatttgaatcctgaccatacgcccattctaaggagtcttcaatgaacaataagtatgagagacctattggcagtttaaatacccagcactatttgttctatacttctattgaatcattgagggaagcttggggacaaaaaggtggattgttgaatataactgcacctgtttaaatttagttggtcagtgaaccagtgtggcatggtctatgaagttttaaggactccatcactttgctacgcactatggtttcaggaaggaaaaaaatggcttattttttcatacaagataccagacaacacccttagtattttgtaatacaacaatactgcacataaaccaagactgacttcaacttatacttattataagtagttacgactaggttttcttggacatcatccatactactaaaacgatcaggagacggcagaccaactacaaaaaaaaaaccaagaggagacggcacaccaactaccaaaaaaaaaactagaaagaacatttcaagtagaaacatcagtgcttcttttacacaagcaacaaggccagtgcttttacaaaaaacaaaaaaaaagcatggaatatttgactgtactattaaacacctggttacatcagagtaatcatgttagattacaagaaacagtatttcaaggcggcgagttgctgccacttgcccactactctgtttactcaagttagtagctttggtgttccatgaaaatgtcttcggtgactctttctgaacctggtcaaaaccgatcccatcagcataattttgtgcatcgaatgactgtacaactggagacgcaagatcctacagcaacgtattctgtacatacattcctgcaactttcccaagctaaccagcatctccgcctcctgaaaccaggcaacttctgctccgacaagaagccgtccgccgtgaactggatcgaggggcgcgggaagtccgtggtgtgcgaggccgtgatcggggaggaagtggtgaagaaggtcctgaagaccgacgtgcaatcgctggtcgagctgaacacgatcaagaacctcgccggctcggccgtcgccggcgcgctgggggggttcaacgcccacgcgagcaacatcgttacagccatcttcatcgccaccggccaggaccccgcgcagaacgtggagagctcccactgcatcacgatgctggagcccgtcaacgcagggagagatctccacatttccgtcaccatgccttctatcgaggtgggcacagtcgggggcgggactcagctggcgtcgcagtccgcctgcctggacctcctgggcgtgaggggcgcgagccgggaccgtcccgggtcgaacgcgaggctgctggccaccgtggtcgccggcggggtcctcgccggcgagctctccctgctgtcggcgctcgccgcggggcagctcgtgaagagccacatgaagtacaacaggtcgagcaaggacgtctcgtccacgacggccaccgagaagacgcgtcaacgtgaagtggacgtgtgaacagcagggattttagtttttgttcttccttttggtgtgttcataagaaagagctctggccgtctaggcgcagaaagaagtgttgtttgcaggtcgtggttggttggttggtagattagatctctctctctctctcctttgttgttctttcggcttggttgatctctctccttccctctttgcgtcaggaagcagcagcttgcaaacctggtctcagcactgtaattatttcttctgttctactaccacatcttttgtttgttgctcg

SEQ ID NO: 120616 - DNA, 2232 bp, Zea Mays
cccgcgtcccgaggagtggaggaggtcaccccgagacagtcgcttcaccgccggtctctcctccccacctccacgcggctcgcggccggccatacaccgcagcactaccttggtgggggcttgcgccagagctcgcgaccactgcccgtgacgcctgtctttgactcgttgaccgcggagtgagcgcgcgcgccggagccggccagccatggaagtgcgcggcggagtggggcagggttcggcggcccggcacccgcccgcgccggagccgtcccgggcggcggcgcgggttcaggcgggggacgcgctgccgctgccgatacggcacacgaacctcatcttctcggccctgttcgcggcgtcgctggcgtacctcatgcggcggtggcgcgagaagatccgctcgtccacgccgctccacgccgttgggctcgccgagatgctcgccatattcggcctcgtcgcctcgctcatctacctgctcagcttcttcggcatcgccttcgtccagtccatcgtctcgtccggcgacgacgacgaggacttcctggtcgggtcgggagctccggcctccgccgccgcgccctcccggcagcatgcgcaggcgccggccccgtgcgagctgctcgggagccccgccgcggcgcccgagaaaatgccggaggacgacgaggagatcgtcgcctcggtcgtcgccgggaaggttccgtcctacgcgctcgaggccaggctcggcgactgccgccgcgccgccggcatccggcgcgaggccctgcggcggatcacggggcgggacatcgagggcctcccgctcgacggcttcgactacgcgtccatactaggccagtgctgcgagctgccggtcgggtacgtgcagctgccggtgggcgtcgccgggccgctgctgctcgacggccggaggttctacctgcccatggccaccaccgagggctgcctcgtcgccagcaccaaccgaggctgcaaggccatcgccgagtcgggcggcgccaccagcgtcgtgctgcgggacgcgatgacgcgcgcccccgtcgcccgcttccccaccgcgcgccgcgcagccgagctcaaggcattcctggaggaccctgctaattttgacacgctttccgtcgtcttcaacaggtcgagcaggttcgcgaggctgcagggggtgcagtgcgcgatggcggggaggaacctgtacatgagattcagctgcagcacaggggacgccatggggatgaacatggtctcaaagggcgtgcagaacgtgctggattttcttcaggatgacttccatgacatggatgtcattagcatatctggttcatcttgctctctcggtttttggcaacttctgctccgacaagaagccgtccgccgtgaactggatcgaggggcgcgggaagtccgtggtgtgcgaggccgtgatcggggaggaagtggtgaagaaggtcctgaagaccgacgtgcaatcgctggtcgagctgaacacgatcaagaacctcgccggctcggccgtcgccggcgcgctgggggggttcaacgcccacgcgagcaacatcgttacagccatcttcatcgccaccggccaggaccccgcgcagaacgtggagagctcccactgcatcacgatgctggagcccgtcaacgcagggagagatctccacatttccgtcaccatgccttctatcgaggtgggcacagtcgggggcgggactcagctggcgtcgcagtccgcctgcctggacctcctgggcgtgaggggcgcgagccgggaccgtcccgggtcgaacgcgaggctgctggccaccgtggtcgccggcggggtcctcgccggcgagctctccctgctgtcggcgctcgccgcggggcagctcgtgaagagccacatgaagtacaacaggtcgagcaaggacgtctcgtccacgacggccaccgagaagacgcgtcaacgtgaagtggacgtgtgaacagcagggattttagtttttgttcttccttttggtgtgttcataagaaagagctctggccgtctaggcgcagaaagaagtgttgtttgcaggtcgtggttggttggttggtagattagatctctctctctctctcctttgttgttctttcggcttggttgatctctctccttccctctttgcgtcaggaagcagcagcttgcaaacctggtctcagcactgtaattatttcttctgttctactaccacatcttttgtt

SEQ ID NO: 120617 - DNA, 843 bp, Zea Mays
tttcttgcggaccaacgcgagacaccgaggcgaagggcggtcggggccagggaagtgcggaaggcgtcggtcggcggcagctctgctcggtcacagcgcttgaggggcggtgtagaggccgccggagggagtgaagagggagatggctccggccagcgggtggggccgggcggtggggaacacgcggtcgttcgtgggcaacgcgctgggcggcctccgcgggtggagcaacctcgcctcctggaccgtcgccggaaccctcgcctactacctctgggtgaagcccgcgcgccagctccagaaggagcaggaggagcgagccgctttggctgctgcaacggatccttatcgttacgtcgagaagcggaaaccgattcctgacactggccttatctatgggaagaagagggagcctaccaaatctcaagattagctagcgccctgggcacatcttgtaccaaatgtgccgccagtttatgtgcaacaataccaggaatggtttctgcgtatctgctggatacatggtaaacgttttttttcatgaaactgttcctgctttgtgcgagcaaaaagcagctgtagatggattttcagtctgggtacttgagcggttgtgcccaggaagtgttgttcatcttcactatcgtctaggagagatgaagatgctttcagaatagaacaaaagagagagagagaatgatttctgtactttttttatagcaagttaatcatgttggcgtgtttatgtgtcacactatcaatgtacaccatggccaggggctttatgttttttttccttcggcgtactgttactgctaagtaattgtattccatgaactttgg

SEQ ID NO: 120618 - DNA, 907 bp, Zea Mays
tttcttgcggaccaacgcgagacaccgaggcgaagggcggtcggggccagggaagtgcggaaggcgtcggtcggcggcagctctgctcggtcacagcgcttgaggggcggtgtagaggccgccggagggagtgaagagggagatggctccggccagcgggtggggccgggcggtggggaacacgcggtcgttcgtgggcaacgcgctgggcggcctccgcgggtggagcaacctcgcctcctggaccgtcgccggaaccctcgcctactacctctgggtgaagcccgcgcgccagctccagaaggagcaggaggagcgagccgctttggctgctgcaacggatccttatcgttacgtcgagaagcggaaaccgattcctgatccacaggacactggccttatctatgggaagaagagggagcctaccaaatctcaagattagctagcgccctgggcacatcttgtaccaaatgtgccgccagtttatgtgcaacaataccaggaatggtttctgcgtatctgctggatacatggtaaacgttttttttcatgaaactgttcctgctttgtgcgagcaaaaagcagctgtagatggattttcagtctgggtacttgagcggttgtgcccaggaagtgttgttcatcttcactatcgtctaggagagatgaagatgctttcagaatagaacaaaagagagagagagaatgatttctgtactttttttatagcaagttaatcatgttggcgtgtttatgtgtcacactatcaatgtacaccatggccaggggctttatgttttttttccttcggcgtactgttactgctaagtaattgtattccatgaactttggagctgaattgcgattgaatttagcttactttggagggaatttattaaactccaag

SEQ ID NO: 120619 - DNA, 4369 bp, Zea Mays
gcgccgcaccacgccaccagggcgggcagcccactcctctcgctgctccactccacctctatcctacgcgctctttctgccgccgaatcagcactactcatcacccggccagggaagagagatattttctgctctggccctatttctggagggcgggagggggaggcggcgaggtgacgtgacggttgcgactggcgccgaagacttgcgtgagtggtaactggaacggaatctttctcctcgactgctcggtgctggcctcgcccctgttgcggcgccgctcgtgtccccctgttgctgcgggcgctggtcggctcgtttgacctcgtctgcgtagattcgtcgaagaggtgggccgtggctgtggctgaggctgagtggggcgagcccggaggacttgagaagcgatgcagagggaggtgggcccgcaggtggcccctccgctcttcatccaccaccagatccagccgatgcctccccacgccgcggccgccgtgaagaagcgcggccagccgtgtccggccgccgcggcggcgcccgcggaggccgctgcggggaactggaaccccaggctgtgggactgggacagccgcgcgctcaccgccaggccgtcggccgatgcactccgcctcgccggtggccagccccagccccagccccagcaggcggccgaggtgcaccgtcagggggccggaggaagcggcgcgctgaagctccagctcggcccgcgggaaggctccacggccccgacggacgccagcccgacggctcccgcggcgtcgctgtcgccgtccccgcctgcttcggggcaggacctggtggtcaggccgagcaagcgggtgcggtcaggatcgccaggcagcgcgggcggtggcggtggcggggctgccaacggaggcgcgggctacccgatgtgccaggtggatgagtgccgagcggatctgaccggcgccaaggactaccacaggaggcacaaggtctgcgagacccacagcaagaccatcagggccgtcgtcgccaaccaggcgcagcgcttctgccagcagtgtagtagatttcacccactcgcggagtttgacgagggtaagaggagctgccggcgtaggcttgctgggcacaaccggcggagaagaaaaacccagccagcagatgtttcttcgcagttgctgctacctggaaaccaagaaaatgcagcaaataggacgcaggatattgtcaatctaattacagtgattgcgcacttgcatggttctagcgtcggtaaagtgcctagcattcctcccataccagataagcagaatctggttgaaattatcagcaaaataaattcattcaacaatatgacctctgcggacaaatctcctccatctgaagtcgttgatttggatgctttgcaagagcaacaagtgcaacggcaggattctgtggggaagacgaccaacggaatcgacaagcaaactgtgccatcaaccatggatttgctaggagtttttccaactggccttgcaacttcaacacctgagaccaatacatctcagtcccaagggagcagtgacagcagtggtaataacaagagcaagagccattcaacagagccagtaactgttgtaaattcacatgataaatcaacccgagatttctctgctgctggtttcatgagaagcaacagcacacacgaaagccaacctcatatatacaagcagacagaacaagaaaccagaccatacttgtcactgcagctgtttggcagcactgaggaggattttccacctaagatggactcagtgaataagtacttatcttctgagagtagcaatcctctggatgagagatctccttcatcctctccgcctataacccgcaagtttttccccatacactcggttgatgaagaggttcggcaccctcatattacagattatggggaagatgctacgatgggtgaagttagcacaaatcaggcatggttggcaccaccacttgatctcttcaaggattcagagcgtcccatcgagaacggatcgccaccaaatcctggttaccagtcctgctatgcctcaacatcttgttcagatcattcaccttcaacctcaaactcagatggacaggatcggactggtaggattatttttaagctgtttggcaaggaacctagcacaatacctgggaaccttcgtgatgatatagtaaattggctcaaacacagccctactgaaatggagggttacattcgccccggttgccttgtactatccatgtacctattaatgccgggtattgcatgggatgagcttgaagaaaatctcctccagagagtaaactcattagttcaaagttctgatttggatttctggagaaaaggaaggtttttagttcgaaccaactcccagttggtatcatataaagcaggaatgacccgtttatcgaaatcgtggagaacatggaatacccctgaattgacccttgtgtcaccaattgctgttgttggtgggcagaagacctccctcattcttaaaggccgcaatctatctattcctggcacacagatccactgtacaagcatagggaagtacatatccaaagaagttctgtgctcagcatatccaggtaccatatatgatgattcaggtgttgagacatttgacttgccaggacaaccagatcttattcttgggcgctgctttgttgaggtagaaaacaggttcaggggtaacagcttccctgttattgttgctagttcaagcgtttgccaggagttgcgaaatctagaagttgagttcgaggattcgcaggttcttgatgtttcttcggatggtcagattcatgattctcggcagccaaagacatcggttcaagttctgcacttccttaatgaactcggctggctctttcagagggcttctgcctgtacatcgtccaccagatctgatgtgtctgatttggatttgattcggttttcaaccgcacggttcagataccttttactgttctgtagtgagcgcgactggtgctctcttactaaaacacttctggacattcttgccaagagaagcctggccagcgaggaactatcaaaggagactatggagatgctggctgagattcacctcctgaacagagcagtaaaaagaaagagtaggaacatggtgcacctacttgtgaagttcgttgtaatttgccccgacaattccaaggtttaccccttccttccgaacttgcctggccctggtggtttaactccgctgcatcttgctgcgtccatcgagaatgcagaggatatagttgacgccttgacagacgaccctcaacagactggtgtaacctgttggcagacagttctagacgacgacggccaatctcccgaaacatatgccaagttgaggaaccataattcctataatgagctcgtagcgcaaaagctggtggacatgaagaacaaccaggtcacagtaagggttaacggcgatgggattcgtgcggatcggttaggaaatgatgttggtgaccgcaaaagatctggggttcaggcgctgcaaataagatcctgctcccagtgtgccattctggagtctggtgtgctaatgcagcccgtgcggtcaagggggttccttgctcggccctatatccattcgatgcttgctatagcggcagtatgcgtctgcgtctgtgtattcatgcgagcgttgctgcggatcaattctggtaaatccttcaagtgggagaggctggattatggtacgatataaactgcccgcccgccggggaagacctgagcctcgtggtaattattgagttagcaagcagttggtggccttggacggtatggagattgttctatgcagggttcggtggcataaggtagtatcgtcgttggacagttccttttacctcatgtgaaatggaagtgttaacatgtgaggagccggagatgtcagatgttaaatactggtaccgaaggtggatgagcttgagcagagctggcacatctgatggagatgttttagacgtaatcacagcccggggggataagaggagtaagtaaaccttgatttccttttttttttcgctggtgcaagctcgtcgagtcttttaatttaccttgctcactattccgtatttcttttattttttgtgaattaaatacagtgctctagcatgaccgtatcttgtatctactttagatatatatatagtagtagaatggggtaaatgaaaaggaggcttgcgtatgggtctgtatcgaccattttgacttgtagctacaaagaaatgaagcggatctgaagtgtacctggatctttttgttttgttttgttttgttttgtttttgctggactggacgtccagcataggttcccgttctgaagaa

SEQ ID NO: 120620 - DNA, 270 bp, Zea Mays
atggtcagctccaacccgactcacatcgttcggaaaccgatcacatgccgaaatacagctctgagcgctccaagcctccaatccagcagaaatggctcgggaggtcccggcccggatcatttctgccggccgtctggctccggtcccgtccgtctctgcgtctgttctacttctagtagcagcacatacgtagctgtcgaaccgtccgtccgtacgccgccgtcgtgttgtcttttgtgtctcgccgagacggcagtaggtgcccggcaa

SEQ ID NO: 120621 - DNA, 2474 bp, Zea Mays
atggcggttgctgcatgcggcggcggcggcggacgtggtcgctctcctctgtcaagactgtcacctcagctgggctgcctcctcgtcgtctcgctgctctgcctccgcgccgccgtcgtctgccgcgcgcaggtccaggagcaggggcagctgcagccgctgccggcgctggagatcgagacctacaactacacgtcgtttgacgagggcaactcgcgggagcagcgggagctggcgttcagcagggatgcccgcatctaccagggcgccatccaggtctccccggacaccggcaacgtcggcagctaccaggacatcatggtcaacaagtccggcaacgtcctcctccagcgccgcttcaccatgtggcgccgcctcgacagcggcaatggcaatggaaccggtgccccgccgcgcgtgcaggtcgtgtcgttcaacagcaccttctccatcaacgtgttccacctcccggactcgtcgccgcggcccggcgagggcctcgccttcgtcgtcgcgccgtcccgcgccgagccgccgccgggcagctacggcggctacctcggcctgaccaacgcgacgctggaggccagcagcggcggcggtccggcgaggagccgcttcgtggccgtcgagttcgacacgctgaagcaggactacgaccccagcgacaaccacgtgggcctcaacgtcggctccgtcgtgtcggtcgcgacggcggacctgacggccttccgcatcgccaccaacagcaccggccccgccaactacacggcctgggtcgagtacgacggcgcggcgcggcgcgtggcggtgtacatggccgtccgtggcgagcctaaaccggcagccccggtgctcgactcgccgctcgacctcagccagcacctgcccgagcaggcgtacatcggcttcaccgcgtccaccggcgccgacttcgagctcaactgcgtcctcgactgggcgctgtcgatcgagatcatcccggagaggaagagccgggcgtgggttgtcgctgtcgccgccgccgtgccggcggctgccatcgcggccagcgttgccgccttcttcctcgccaggacgctgcgggccaggcgggccgtggagaagcggcaggagcggctggagcggcggctcaccaacctccccgggatgcccagggtgttcgcgtacgacaagctgaggaaggccaccggcaacttcgacgagcggctgcggctggggagaggcggctacggcgtggtctacaagggcctgctccccgccgacgacgcccggccggaggggacgatggaggtggcggtcaagcggttcacccgggacgacggcaaggacgtcaacgacttcctccaggaggtcgacatcatcaacaggctgcgccacaaaaacatcgtccctctcatcggctggtgcttcaataaagggcagctgctgctggtgtacgagtacatgccgaacggcagcctagaccagcacctgttccggcggggcgcgcacgagcagcggcccgtgctggactgggcgagccggtacgcgatcgtgcgcgacgtcgcggcggggctgcactacgtgcaccacgagcacacgcgcatggtgctgcaccgcgacgtgaaggccagcaacgtgctgctggacgcggcgtggcgcgcgcggctgggcgacttcgggctggcgcgcgtgctggaccagggccgtgagtcgttcacggacgtgcacgtggccggcaccttcgggttcatcgcccccgagtactccgtgggccaccgggcgacgcgggagacggacgtgttcgcgttcggcgcgctcgtgctggaggcggtcacggggcagccggcgctgcgggacggcggcggcgacggcggggggtgccggctgctgtcggactgggtgtggcagatgcacggccgcggcgcgctgctgggcgccgtggaccagggcctcggcgccaccgggttcgaccacgccgaggcggcccgcctgctgctgctcgcgctggcgtgctgcagccccaacccgggcgaccgccccgccatgccgcaggtgctgcaggtcctgtccaaggcctcgccgccgcccgaggtgccgccgttcaagccgcagttcgtctggccgcccgaggggggagcgcaattccggctcagcgacatcgaggggaccacgaccggcaccggcgacgccgacgccgacggcgcgtccacgcgggccacgcgcagcacctcctacgacagcttccggccgcacaacacggccgacagcagcgacggttacttccccgccctctcatccggccgttgacctaatccaagtgctgcctttctgtgcatagcattttggccatgattgcagctagctccgaagaactttcacgtgtgaaatgtgtatattatatcgaattcgttagggagttcagttcgtgcaatggggcatgtgtataggcgtatagctgcaccagcacttcaggttttaggagacctgca

SEQ ID NO: 120622 - DNA, 510 bp, Zea Mays
atgggacaacataatcaaaggacctacaacttcacttctactcaaccaaatggtccagatattacacaaattgggactggagatgttcctatcgacgtagaagaccatgaagatgtgagagaccctttggcagaccacagacaaaatgaagcagacgtcatagtgtatgcagttgaaggagtggatgtaaatggtgacaggaatggagaagaaaaaggatcgaagaggcaaaagaaaagttctagcatagaagtattgatggagaggtacctagactttagaagcaaacaagctaaagatgaagcgacacaattggcaagagaaaaggaggcaagaggaggtgatgacttatcaattaagaattgcatagcagttctaaacacattggaggtcacaaaggaggaaaagcccaaagcgctagccaattttgtcggtgagaatctaatcattgttccccttatatatttggaggctttacatctccaggacacttttgctattactacataa

SEQ ID NO: 120623 - DNA, 357 bp, Zea Mays
gtcctccccttaacgcacctcatcgagtaggggtcctatcatcgagtcatcgttcagagacagaggctggtcgatcgtcggtgactgatggcgatggcggcggcgcaattggaggcggaggaggagctgcggctggaactggaggcggtggcggcggtgtacggagacgacgtccgcgtgctccgcgacctcccaccgcacctcttcgtccacgtgcggccccgcaccgccgacgacacctcgcagcaggattactctgatcaattgctgcattgtgttaccatgattgacctgatgctgctttcttgacagacaagagggaagctgaacttggacgactgggatcctaagcagaag

SEQ ID NO: 120624 - DNA, 738 bp, Zea Mays
gtcctccccttaacgcacctcatcgagtaggggtcctatcatcgagtcatcgttcagagacagaggctggtcgatcgtcggtgactgatggcgatggcggcggcgcaattggaggcggaggaggagctgcggctggaactggaggcggtggcggcggtgtacggagacgacgtccgcgtgctccgcgacctcccaccgcacctcttcgtccacgtgcggccccgcaccgccgacgacacctcgcagcaggaagctgaacttggacgactgggatcctaagcagaagagccactatccttgtaggctgtttttcgaaacttgtttcctacgagttgttgtttcatctcttacaatgataatcaactaatcgtaatggaagcctttgtccaaatgccagcagtaacttcttggtgtttcttttgttgaaaatcccttcatgtccattttccatgagctttctagtcactgtaattgtagcatcacctcttttccatcatatgaggttgaacgcatagataaccatttactgtttgttttcataaatttggttttctctgtttcagttcgtggagctctttcttggcattaaagcatcttcacaggtatgaatctgccactctactagattttcatctggtgtgtgatgtgtatccctatcaaaattttaggtatttccattttatggagagctgttgtggaaacaatgttcaaaattttgaattcctttagaaactataa

SEQ ID NO: 120625 - DNA, 2208 bp, Zea Mays
gtcctccccttaacgcacctcatcgagtaggggtcctatcatcgagtcatcgttcagagacagaggctggtcgatcgtcggtgactgatggcgatggcggcggcgcaattggaggcggaggaggagctgcggctggaactggaggcggtggcggcggtgtacggagacgacgtccgcgtgctccgcgacctcccaccgcacctcttcgtccacgtgcggccccgcaccgccgacgacacctcgcagcaggtgtgtctcatctcgccgcaccccacccctcgtgcttccatccctgccattgagtgacaagagtcgggggtagacgactcgattgatcaatcggccgattggacggtccgctgctctgcccggtagtattattcggtagcaactggtgggggagttgccgcctttttctgagctgaaccctagctgttgagtagaggtggatgttagcttcaagttgaactttaggtattctggttgcagggtttaggtattttgtggttagctgttccggacttccagatcaattgagttaggtatatatggtgtcttcatactgatgctattgttttagttaacaggattactctgatcaattgctgcattgtgttaccatgattgacctgatgctgctttcttgacagacaagagggaagctgaacttggacgactgggatcctaagcagaagagccactatccttgtaggctgtttttcgaaacttgtttcctacgagttgttgtttcatctcttacaatgataatcaactaatcgtaatggaagcctttgtccaaatgccagcagtaacttcttggtgtttcttttgttgaaaatcccttcatgtccattttccatgagctttctagtcactgtaattgtagcatcacctcttttccatcatatgaggttgaacgcatagataaccatttactgtttgttttcataaatttggttttctctgtttcagttcgtggagctctttcttggcattaaagcatcttcacagtatccgaaggaaccaccacatatttatgctgtggaaagtaagggccttgatgagaaccgacagatatatcttatcaccagcatccagaacaaggcaaacgaactttcaaactgtccaatgcttgtgacgttatgtgaggaagctggagagatcctctcgaacatgaatcatccagcaggggattgtccattgtgtctatatcctttaatgggagaggataaggttggctcggagttgccatttatgaagttgatgtcatgctaccattgcttccacagtgactgcattatgagatggtgggaatggctccaacatggtgacacaaacccaaaggagcccaatactggagctcagacaagcattataatgtgaatcagccaagaggattttgtcctgtttgccgcaaagtgttcgatgagaaggatattgagcatgttcgtgatttgttgggtgacaatacttccaggctggcatcactaacagttgaccttggtgaagatgaaaaggaattgctccattccgaggctgagcaaaacaggagaaaaagaatcgagtcacttgttaatctgcagcaagaactaaacggcctgattgaaccaaagaaagaccttgccatacaaccaggaatgtacgtttccgttcctcccagcacgccagacacagctgaagaagagaatgctgatcccagccaaggcacggctacttcgacctcagaaactgagcaacgtggccaggcaagcaacgccagcagcaacaagccgaagaatccaggccatcgaaggagaaacagagctaatgcatcaagacgacagcctcacggccagggccagccagctaggcagcagtggcagaggaaagaagcaggcacttcacaccaataaaacaacatcgaagcaacgaggaggatgtgacctgtgagttgtttttgtcggctatgtacatcaatgtcgtgccttgctttcgtctcataataattgcgagccatggtatgacaatgttttggcgctgctatggaagttccatgcaagtgatactctggaaagaaccctgcaccggattctatgggagtagtataaagcacatgcatgcttggctagtacatacaatatctgattttttgtgtgtgtgtcattgccaggtactatgttcaaactgattgtccatagtcagaaaagcaactgattacactgtttgtta

SEQ ID NO: 120626 - DNA, 1577 bp, Zea Mays
gtcctccccttaacgcacctcatcgagtaggggtcctatcatcgagtcatcgttcagagacagaggctggtcgatcgtcggtgactgatggcgatggcggcggcgcaattggaggcggaggaggagctgcggctggaactggaggcggtggcggcggtgtacggagacgacgtccgcgtgctccgcgacctcccaccgcacctcttcgtccacgtgcggccccgcaccgccgacgacacctcgcagcagttcgtggagctctttcttggcattaaagcatcttcacagtatccgaaggaaccaccacatatttatgctgtggaaagtaagggccttgatgagaaccgacagatatatcttatcaccagcatccagaacaaggcaaacgaactttcaaactgtccaatgcttgtgacgttatgtgaggaagctggagagatcctctcgaacatgaatcatccagcaggggattgtccattgtgtctatatcctttaatgggagaggataaggttggctcggagttgccatttatgaagttgatgtcatgctaccattgcttccacagtgactgcattatgagatggtgggaatggctccaacatggtgacacaaacccaaaggagcccaatactggagctcagacaagcattataatgtgaatcagccaagaggattttgtcctgtttgccgcaaagtgttcgatgagaaggatattgagcatgttcgtgatttgttgggtgacaatacttccaggctggcatcactaacagttgaccttggtgaagatgaaaaggaattgctccattccgaggctgagcaaaacaggagaaaaagaatcgagtcacttgttaatctgcagcaagaactaaacggcctgattgaaccaaagaaagaccttgccatacaaccaggaatgtacgtttccgttcctcccagcacgccagacacagctgaagaagagaatgctgatcccagccaaggcacggctacttcgacctcagaaactgagcaacgtggccaggcaagcaacgccagcagcaacaagccgaagaatccaggccatcgaaggagaaacagagctaatgcatcaagacgacagcctcacggccagggccagccagctaggcagcagtggcagaggaaagaagcaggcacttcacaccaataaaacaacatcgaagcaacgaggaggatgtgacctgtgagttgtttttgtcggctatgtacatcaatgtcgtgccttgctttcgtctcataataattgcgagccatggtatgacaatgttttggcgctgctatggaagttccatgcaagtgatactctggaaagaaccctgcaccggattctatgggagtagtataaagcacatgcatgcttggctagtacatacaatatctgattttttgtgtgtgtgtcattgccaggtactatgttcaaactgattgtccatagtcagaaaagcaactgattacactgtttgttactctttgagttgcatcatgtgtttgaaatacatacattacagcttaggtcatgtgggacattacaatataaagcactgcatgcagaatttgc

SEQ ID NO: 120627 - DNA, 1594 bp, Zea Mays
gtcctccccttaacgcacctcatcgagtaggggtcctatcatcgagtcatcgttcagagacagaggctggtcgatcgtcggtgactgatggcgatggcggcggcgcaattggaggcggaggaggagctgcggctggaactggaggcggtggcggcggtgtacggagacgacgtccgcgtgctccgcgacctcccaccgcacctcttcgtccacgtgcggccccgcaccgccgacgacacctcgcagcagttcgtggagctctttcttggcattaaagcatcttcacagccaaattggatttgcagtatccgaaggaaccaccacatatttatgctgtggaaagtaagggccttgatgagaaccgacagatatatcttatcaccagcatccagaacaaggcaaacgaactttcaaactgtccaatgcttgtgacgttatgtgaggaagctggagagatcctctcgaacatgaatcatccagcaggggattgtccattgtgtctatatcctttaatgggagaggataaggttggctcggagttgccatttatgaagttgatgtcatgctaccattgcttccacagtgactgcattatgagatggtgggaatggctccaacatggtgacacaaacccaaaggagcccaatactggagctcagacaagcattataatgtgaatcagccaagaggattttgtcctgtttgccgcaaagtgttcgatgagaaggatattgagcatgttcgtgatttgttgggtgacaatacttccaggctggcatcactaacagttgaccttggtgaagatgaaaaggaattgctccattccgaggctgagcaaaacaggagaaaaagaatcgagtcacttgttaatctgcagcaagaactaaacggcctgattgaaccaaagaaagaccttgccatacaaccaggaatgtacgtttccgttcctcccagcacgccagacacagctgaagaagagaatgctgatcccagccaaggcacggctacttcgacctcagaaactgagcaacgtggccaggcaagcaacgccagcagcaacaagccgaagaatccaggccatcgaaggagaaacagagctaatgcatcaagacgacagcctcacggccagggccagccagctaggcagcagtggcagaggaaagaagcaggcacttcacaccaataaaacaacatcgaagcaacgaggaggatgtgacctgtgagttgtttttgtcggctatgtacatcaatgtcgtgccttgctttcgtctcataataattgcgagccatggtatgacaatgttttggcgctgctatggaagttccatgcaagtgatactctggaaagaaccctgcaccggattctatgggagtagtataaagcacatgcatgcttggctagtacatacaatatctgattttttgtgtgtgtgtcattgccaggtactatgttcaaactgattgtccatagtcagaaaagcaactgattacactgtttgttactctttgagttgcatcatgtgtttgaaatacatacattacagcttaggtcatgtgggacattacaatataaagcactgcatgcagaatttgc

SEQ ID NO: 120628 - DNA, 1608 bp, Zea Mays
gtcctccccttaacgcacctcatcgagtaggggtcctatcatcgagtcatcgttcagagacagaggctggtcgatcgtcggtgactgatggcgatggcggcggcgcaattggaggcggaggaggagctgcggctggaactggaggcggtggcggcggtgtacggagacgacgtccgcgtgctccgcgacctcccaccgcacctcttcgtccacgtgcggccccgcaccgccgacgacacctcgcagcagttcgtggagctctttcttggcattaaagcatcttcacagtatccgaaggaaccaccacatatttatgctgtggaaagtaagggccttgatgagaaccgacagatatatcttatcaccagcatccagaacaaggcaaacgaactttcaaactgtccaatgcttgtgacgttatgtgaggaagctggagagatcctctcgaacatgaatcatccagcaggggattgtccattgtgtctatatcctttaatgggagaggataaggttggctcggagttgccatttatgaagttgatgtcatgctaccattgcttccacagtgactgcattatgagatggtgggaatggctccaacatggtgacacaaacccaaaggagcccaatactggagggtctcgatttgtccagctcagacaagcattataatgtgaatcagccaagaggattttgtcctgtttgccgcaaagtgttcgatgagaaggatattgagcatgttcgtgatttgttgggtgacaatacttccaggctggcatcactaacagttgaccttggtgaagatgaaaaggaattgctccattccgaggctgagcaaaacaggagaaaaagaatcgagtcacttgttaatctgcagcaagaactaaacggcctgattgaaccaaagaaagaccttgccatacaaccaggaatgtacgtttccgttcctcccagcacgccagacacagctgaagaagagaatgctgatcccagccaaggcacggctacttcgacctcagaaactgagcaacgtggccaggcaagcaacgccagcagcaacaagccgaagaatccaggccatcgaaggagaaacagagctaatgcatcaagacgacagcctcacggccagggccagccagctaggcagcagtggcagaggaaagaagcaggcacttcacaccaataaaacaacatcgaagcaacgaggaggatgtgacctgtgagttgtttttgtcggctatgtacatcaatgtcgtgccttgctttcgtctcataataattgcgagccatggtatgacaatgttttggcgctgctatggaagttccatgcaagtgatactctggaaagaaccctgcaccggattctatgggagtagtataaagcacatgcatgcttggctagtacatacaatatctgattttttgtgtgtgtgtcattgccaggtactatgttcaaactgattgtccatagtcagaaaagcaactgattacactgtttgttactctttgagttgcatcatgtgtttgaaatacatacattacagcttaggtcatgtgggacattacaatataaagcactgcatgcagaatttgcaggggtcggctatg

SEQ ID NO: 120629 - DNA, 1641 bp, Zea Mays
gtcctccccttaacgcacctcatcgagtaggggtcctatcatcgagtcatcgttcagagacagaggctggtcgatcgtcggtgactgatggcgatggcggcggcgcaattggaggcggaggaggagctgcggctggaactggaggcggtggcggcggtgtacggagacgacgtccgcgtgctccgcgacctcccaccgcacctcttcgtccacgtgcggccccgcaccgccgacgacacctcgcagcagttcgtggagctctttcttggcattaaagcatcttcacagtatccgaaggaaccaccacatatttatgctgtggaaagtaagggccttgatgagaaccgacagatatatcttatcaccagcatccagaacaaggcaaacgaactttcaaactgtccaatgcttgtgacgttatgtgaggaagctggagagatcctctcgaacatgaatcatccagcaggggattgtccattgtgtctatatcctttaatgggagaggataaggttggctcggagttgccatttatgaagttgatgtcatgctaccattgcttccacagtgactgcattatgagatggtgggaatggctccaacatggtgacacaaacccaaaggagcccaatactggagacaagcattataatgtgaatcagccaagaggattttgtcctgtttgccgcaaagtgttcgatgagaaggatattgagcatgttcgtgatttgttgggtgacaatacttccaggctggcatcactaacagttgaccttggtgaagatgaaaaggaattgctccattccgaggctgagcaaaacaggagaaaaagaatcgagtcacttgttaatctgcagcaagaactaaacggcctgattgaaccaaagaaagaccttgccatacaaccaggaatgtacgtttccgttcctcccagcacgccagacacagctgaagaagagaatgctgatcccagccaaggcacggctacttcgacctcagaaactgagcaacgtggccaggcaagcaacgccagcagcaacaagccgaagaatccaggccatcgaaggagaaacagagctaatgcatcaagacgacagcctcacggccagggccagccagctaggcagcagtggcagaggaaagaagcaggcacttcacaccaataaaacaacatcgaagcaacgaggaggatgtgacctgtgagttgtttttgtcggctatgtacatcaatgtcgtgccttgctttcgtctcataataattgcgagccatggtatgacaatgttttggcgctgctatggaagttccatgcaagtgatactctggaaagaaccctgcaccggattctatgggagtagtataaagcacatgcatgcttggctagtacatacaatatctgattttttgtgtgtgtgtcattgccaggtactatgttcaaactgattgtccatagtcagaaaagcaactgattacactgtttgttactctttgagttgcatcatgtgtttgaaatacatacattacagcttaggtcatgtgggacattacaatataaagcactgcatgcagaatttgcaggggtcggctatgttggtaacccaataacaatgcatacctgtaaggtgctattgttttgtccgctact

SEQ ID NO: 120630 - DNA, 471 bp, Zea Mays
atggctggttcacgtgctggatccctgggttgctgccgccgagcgttgcgtgcgtccggcgtccctgctattgttttgttcaaattcctacgaggattaagttggatcctactgtcgctgtgcagagctgacagggatgctgttgggttcagtgggaacttgttgataaaaatggcagaatggaatccagagaaggatctgcttgctatggttactgatgactccaaggttctcctccatcgcttcaattggcaaaggctttggacaatctctccagggaagtgcatcacatcaatttgttggagccctgatggtaaaataatagcacttggcacagaagatggtttgattcttttgcatgatgtggagacaggaccacttgatcacatacaggtggggatcttgcagccactgcttgaacatctgtgcagattctcaagacctcactcttccatgataaacttctcataa

SEQ ID NO: 120631 - DNA, 1732 bp, Zea Mays
atcgcttccccagaccccagaccccttttcccaacggccacactttcatcagttcccctttccacggcgccgccggaatccccacaaagcccccaaaaccctacggccacctcgccacccccaacgaaaacccagaccacgagatggcccccggtggagagggcaagccaagcacgggcggcggcggcggcggcgtcaagggtgggaggaagcgcaagttccttccccacgggaagccggtgcggaagggggcctacccgctgcgccccggcgtgcagggcttcttcatcacctgcgacggcggccgcgagcaccaggccacccgcgaggcgctctccctcctcgactccttctatgaagacctggtggatgggaaaggatcggatgagaagcctaaaaacattccagacaagccactgaacaaaaagataaagtttgaggactctgattcctcagatgatgaggatgaagacaactctggtgaggaagccgacaatgggaatgtgaatgatgtggagaaaggtgaaaccgctccatctgagaagcaacaggaggtgcttgatacctctaataccgcaagcaaggacaatactgctctatctgagaagaaagaggaggtgcttgatacctctgataccgtgagtaaggacaatgaggaacaagcagtcactgctgatgaaccaagagaaaagaagcaacgagtggaagatcctccagtttttgagcaggccgtgcaaaaagagactgctgatgaaccaaaggagtccactgataaaccaaaggagtccagtgaaaaaaatattgacgatttaattgatgaggacctgaaagaaataggggacaggaaaaagaggctctttgcaagcctcgagacaggctgcaatggatgcatattcattcaaatgcataaaagagcaggagaccctggtccagttgagattgtacaaaacatgatgtcatctgctgcattgactcgtaaacatatgtcaagatttattctgcgagttttgcctgttgaggtggcatgctatgcatctgaagaggaaataacaaaggcaattagtccccttattgaaaagtacttcccaaaagaatgctcctcaggtcataagtttgcagtgttatatgaagcaaggtcaaacacaggaattgatagaatgaaaatcataaacgcagcagcgaaatctgtaccacaacctcataaagttgacctgaagaacccagacaagactattgttgtccagattgcaaagaccatatgcatgattggagttgtggaaaggtacaaagagctctcgaagttcaacctaaggcagctgacctcaccggagtcggagaagtaagcctatgagtgacaaaatcttccaggcaaaacgtggaccaacttaaatcagcagcagcgtcaggtggttaggcgctagcgaattaaattaaggccggccgaacctcactgtcttgaaagattcagatgttctaatgtttaatgctttaccaccagtggttagtggttgctggttcatgcttcccaggttagagtcacgatttttttttttgaggctgtagaaagatctgacgatacttcatgtgtgctttctctctgacgatggttccatacaggggcttaccaaagacgtagaatctatcgttgcagctccattgctctgagcatttctatagcttgaataaatctgcgtgctaggtttctatgcatgagacctgaaatttaaagaga

SEQ ID NO: 120632 - DNA, 1352 bp, Zea Mays
atgtatgcttttaaattaccacagacttgtccacccttttactgctatcacacgaactgatattgtaaatcaaagtcccatagtgacccttaggatactgcaaccatttattccctttcttaataatcttttctagctcagattcaaaattgaaatttaggttgtacatcataaaattgtttcaggcatgaactactttggaggttgattgttattgtatctaattaatcacttgatagttgatactagatttaatcttgttgcaacattaatggttgttcatgtataagtagatcaatacacttaagcttaaacaatttgttgtgggatgatgatcatgtaggaaatcttgactcataaagtggtgaaaatttgtattgcacctttttagcaattgtttgtttgaaccatgagctgatgcatcattccaggtcttatctaggtgtgcatttcatttattcagttctactggaagtctttctggcagctcctttatttcatatttactatgctatgtatctgttttttttaattttactatggtttataacgttatatgactttttgtattatgatgagcagaggctctttgcaagcctcgagacaggctgcaatggatgcatattcattcaaatgcataaaagagcaggagaccctggtccagttgagattgtacaaaacatgatgtcatctgctgcattgactcgtaaacatatgtcaagatttattctgcgagttttgcctgttgaggtggcatgctatgcatctgaagaggaaataacaaaggcaattagtccccttattgaaaagtacttcccaaaagaatgctcctcaggtcataagtttgcagtgttatatgaagcaaggtcaaacacaggaattgatagaatgaaaatcataaacgcagcagcgaaatctgtaccacaacctcataaagttgacctgaagaacccagacaagactattgttgtccagattgcaaagaccatatgcatgattggagttgtggaaaggtacaaagagctctcgaagttcaacctaaggcagctgacctcaccggagtcggagaagtaagcctatgagtgacaaaatcttccaggcaaaacgtggaccaacttaaatcagcagcagcgtcaggtggttaggcgctagcgaattaaattaaggccggccgaacctcactgtcttgaaagattcagatgttctaatgtttaatgctttaccaccagtggttagtggttgctggttcatgcttcccaggggcttaccaaagacgtagaatctatcgttgcagctccattgctctgagcatttctatagcttgaataaatctgcgtgctaggtttctatgc

SEQ ID NO: 120633 - DNA, 837 bp, Zea Mays
agtttttcttttctgatacagacaattgagttgcttttgcacttatagactccccatttgaatgcatactagatttattctgcgagttttgcctgttgaggtggcatgctatgcatctgaagaggaaataacaaaggcaattagtccccttattgaaaagtacttcccaaaagaatgctcctcaggtcataagtttgcagtgttatatgaagcaaggtcaaacacaggaattgatagaatgaaaatcataaacgcagcagcgaaatctgtaccacaacctcataaagttgacctgaagaacccagacaagactattgttgtccagattgcaaagaccatatgcatgattggagttgtggaaaggtacaaagagctctcgaagttcaacctaaggcagctgacctcaccggagtcggagaagtaagcctatgagtgacaaaatcttccaggcaaaacgtggaccaacttaaatcagcagcagcgtcaggtggttaggcgctagcgaattaaattaaggccggccgaacctcactgtcttgaaagattcagatgttctaatgtttaatgctttaccaccagtggttagtggttgctggttcatgcttcccaggttagagtcacgatttttttttttgaggctgtagaaagatctgacgatacttcatgtgtgctttctctctgacgatggttccatacaggggcttaccaaagacgtagaatctatcgttgcagctccattgctctgagcatttctatagcttgaataaatctgcgtgctaggtttctatgcatgagacctgaaatttaaagagatgttggggtccgtgattttctttg

SEQ ID NO: 120634 - DNA, 2007 bp, Zea Mays
gcggccgtctgctacttctgtgatctctcctcccccgtctttcgtctccggttgcatccccgacgtcctcgcctgcgttcctcatcttcagagtcgtgtcgtggggcgtgctaggtgggagggcggggcggaggagctggaggttcctggtagcggctgccgccggccatggagaagaggaagcggatcctggagctgcgggatcggctggaccggacgctggcgatgcccgacctcgcggaggaggcctcgctcagggcgctggtgaagaagcagatcctggcgtcgtccctgcccggctccgatcaaggtgacatcgatctcattgctgaaacgcgggcaaaagaagtctctgagtttcttgaaatgctagatacttcgagggacggacgatcttccaaggtccatgggctgccacagaaggagtggaaggtgaagcaagatacagaccaattaagagtgatgtaccgtgagggtccagaggggacaccatttcataccttacttgctgaaggctttgcagatggacctattgacgtttgtacatgtgtgtcatgggaatcaactttatacaaaaaatggtttccacaatacaacctgccaacttttagaattgatcagtcaggctgcttgaaaaaagtgcggattggtgaagagatttgtatggtcagggtgaaggttccatggccggtttcagagagagaggctattctacactattttgaactggaatatcttaaagaagatgtcgtaattgtgataatgaaaactttatcagacttggatgccatagatgttcgaacccatggatttagtagggatggaattcctgaagctggtgacacagttcggatagatgtgtttggaggctttgtattgcaacggattacaaaagaaagaagctttttcagggcaatagctaatatggatatcaagctagattttgttccaccatggttgatcaacttcatgtcaaggcaactaataggcagcgggcataagctgtatcaaaaggcagtcagcaccgtggccagtcatgatgatgactacaggaaagctttgagaggaccgctctacgtcaggatccgtgagtaccaggattctgatgacaaggcgaaggtggcagcaacagaggaaaatgctaccgaggcgccccctgataatgccactacacaaaatcgtttgtcactaacaaataccgtatcgaatagcgagattgtggaggagtccgaacagaacacatccgtcactgtggatagtcttccaactagccaacaaccctatgtgccagttgagcaagcatggcaggtcggaaacaggccatacaccagtcctgaggtggagcgtgcgctgtgcatattagacacttctattgcacttctcagaggcgatgataaggctggaaatgtcaccacgctacaaaatctgctcagttacgatgcatctttggaagcgagtactgctgctggttccgtaacttgtcaaacaaacgttcttaacgcagacagtcttccgaatggccatcctgttgccgcagcgccacaagactccagagagaaagctagcgatagtgccgcagaggaagaagacgccggcgacgaaaactctctgaaaaatccgacagcttccactgtgacgaagagtgtgtcgatgacattgcgaagtgcaataagggtgcacggtgaagagagcctggacactgatggcttcttccatcagaacggtttcagcaacagcaaggagtcaaggcgagcgaggaagtctaagaagagatggccctgctgcttaatccctaccactatgggatgatgtgggcccatcgtaggacctcgttcgttcaagttaagttgctgattttttgagtgtactattaacaaacagtaaactacagaaatttagcgcttcgtcagttacacgatgtgggttcagacggtatgttatagcgcgtagataatgtcttggtaaatgtaaagtagaatcgttgtaaacaacacgtaattcttctca

SEQ ID NO: 120635 - DNA, 1989 bp, Zea Mays
gcggccgtctgctacttctgtgatctctcctcccccgtctttcgtctccggttgcatccccgacgtcctcgcctgcggtgggagggcggggcggaggagctggaggttcctggtagcggctgccgccggccatggagaagaggaagcggatcctggagctgcgggatcggctggaccggacgctggcgatgcccgacctcgcggaggaggcctcgctcagggcgctggtgaagaagcagatcctggcgtcgtccctgcccggctccgatcaaggtgacatcgatctcattgctgaaacgcgggcaaaagaagtctctgagtttcttgaaatgctagatacttcgagggacggacgatcttccaaggtccatgggctgccacagaaggagtggaaggtgaagcaagatacagaccaattaagagtgatgtaccgtgagggtccagaggggacaccatttcataccttacttgctgaaggctttgcagatggacctattgacgtttgtacatgtgtgtcatgggaatcaactttatacaaaaaatggtttccacaatacaacctgccaacttttagaattgatcagtcaggctgcttgaaaaaagtgcggattggtgaagagatttgtatggtcagggtgaaggttccatggccggtttcagagagagaggctattctacactattttgaactggaatatcttaaagaagatgtcgtaattgtgataatgaaaactttatcagacttggatgccatagatgttcgaacccatggatttagtagggatggaattcctgaagctggtgacacagttcggatagatgtgtttggaggctttgtattgcaacggattacaaaagaaagaagctttttcagggcaatagctaatatggatatcaagctagattttgttccaccatggttgatcaacttcatgtcaaggcaactaataggcagcgggcataagctgtatcaaaaggcagtcagcaccgtggccagtcatgatgatgactacaggaaagctttgagaggaccgctctacgtcaggatccgtgagtaccaggattctgatgacaaggcgaaggtggcagcaacagaggaaaatgctaccgaggcgccccctgataatgccactacacaaaatcgtttgtcactaacaaataccgtatcgaatagcgagattgtggaggagtccgaacagaacacatccgtcactgtggatagtcttccaactagccaacaaccctatgtgccagttgagcaagcatggcaggtcggaaacaggccatacaccagtcctgaggtggagcgtgcgctgtgcatattagacacttctattgcacttctcagaggcgatgataaggctggaaatgtcaccacgctacaaaatctgctcagttacgatgcatctttggaagcgagtactgctgctggttccgtaacttgtcaaacaaacgttcttaacgcagacagtcttccgaatggccatcctgttgccgcagcgccacaagactccagagagaaagctagcgatagtgccgcagaggaagaagacgccggcgacgaaaactctctgaaaaatccgacagcttccactgtgacgaagagtgtgtcgatgacattgcgaagtgcaataagggtgcacggtgaagagagcctggacactgatggcttcttccatcagaacggtttcagcaacagcaaggagtcaaggcgagcgaggaagtctaagaagagatggccctgctgcttaatccctaccactatgggatgatgtgggcccatcgtaggacctcgttcgttcaagttaagttgctgattttttgagtgtactattaacaaacagtaaactacagaaatttagcgcttcgtcagttacacgatgtgggttcagacggtatgttatagcgcgtagataatgtcttggtaaatgtaaagtagaatcgttgtaaacaacacgtaattcttctcacgagagctctgatttgggg

SEQ ID NO: 120636 - DNA, 349 bp, Zea Mays
tggaatagaacgtggatacggtttttcttatcctgttctcggcgtactggaatagaacgtggggcatatgtaagtaaataagaaaaaaaactagcacaatagacaacaaaaccaagggtagtccagttggttatgtcattcaagtttgagtcaatagattcaaggttcaaaaccttaaaaatctttttttacaattcgttttattttccataattcttttttcttttctacaattctttttttctttactacaatttagcgatcaatgtttacttgttttaattaatttttagtcactaacatctacatgtacgttcaagctataagatttgatagtgatccttgctct

SEQ ID NO: 120637 - DNA, 102 bp, Zea Mays
ataaattgggtcatggatgagtctcatctttggtgtagggctggggctcgcggattatctgatatccttttacttcggcatactaattgaggatttggtctc

SEQ ID NO: 120638 - DNA, 222 bp, Zea Mays
atgacgcccaaacatcgtggtcctaatcctcgtcctcctcaccacaaatatcacctcaggagccgcagctccaacaatatggtatcagagatgccaggcaacgacgacaacgccagtgatgtcgcatctgctgccgcgaccaactccgccaacgcagcgctagagcaaaagatcgacaccataacaaaggctcttgtcgatctcaccaccgccatcacttag

SEQ ID NO: 120639 - DNA, 429 bp, Zea Mays
cccatgggtttgttaatgggcataaatgtatacccgacgggttcatgggtacgggtttgttcctatagtacccaaacccgtgaacccgtgggttttttaaacccgaccaaacctagtgcatattgtcattttattttataaacgaacaacaaacttgttatctacctatttacttcctaatttttatcaaatagtgaatgtataagtagttggtgatagtgttgcttgcttgctattatagttattactagcgttatatatgtgctggatgtataacttagtgcaaggtaaattgattatacaacttattatttgtatttaattctctctactaatattttttataccaaatcatgaactcgttgttcattacataaattttggaccatgatctcattaatcattacaatacttattgattataaaaag

SEQ ID NO: 120640 - DNA, 2002 bp, Zea Mays
gtgtagcactctcctctgatccggagtcgagtcgattcgagtccactccgctgtccgctcgcaccaactcctccatccaattccaactcggcaactcctccaggcagcccggtgggtgggtcatcctctccccacgtccaccacggcgatggcgctcgcgcccccgcattgctgacccactcccaccgcggactctccctccctccccgtggtttggttttggtaggtgggggaggttggtaggcgccggggcgtgcctgtcggctggcggtttcgggaagcgctgccgcgatccttgcccggatctgggcgccacgatggaggacgccggccgcgagggcggcactgccgcggagaatgggaccgagggggagggctacgtcctcgtcaaggccgcccccgagggggagggggaccccaccgccgccgccgccggaggcgatcgcgaggatctcgctgcctccgccccggcgatggcgatggcggtggcggctgcggacgaggccgcggcaccggccaagaagggtggatccggggccacgaaggcgaggctgcagaacggcagggtccccgccggaacttccgccgccgccgccgccgccgggccgagggtgaagaagcccggggtcctctcacagagcgcctccttcccggcgcggggcgcggtggcggtcgcggccaagaaggccgcggcggcggttgctacgcccaagcaggccaagggcgccgtgcccattggatcagagacggcggcagcgcttgcaggccgggcggtggagaagaaggcgagtttggcgcggacacctgttgctcgccggccgatgcttgttaagtctggatcagtggatgcggctgccccaaatgacacagttgttgctgtccaagagtcagatgaaaatacggacaaaccattgaaacaaacacagccagggaaaacagaggatgatgtgcactccaccacatcaagtaccaatactccccgtgcagcagctcgtaagagtgctgctgctgctgctgctggttttagtttcagattggaggagcgtgctgagaagagaaaggagttcttccaaaagcttgaagaaaaaatccatgcgaaggagctggaaaaaacaaatttgcaggagaaatctaaggagagccaagaggctgagatcaaactactgaggaagagcctaacatttaaagccacacctatgccaagcttttacaaggagcagccacccaaagttgagttgaaaaagattcccccaacacgtgccaggtcaccaaggctcggccggcacaaggcagccagttctgctactgctcctgctcctgcagatggttctgtatcatgtgggagcccacggagcactgcaaattcgggcaaggtaaatgaaatcatggagaacatcaaacctcgtgtccctgctagaaaatctattcagaggccagtcacgaaaactccattgcaagtgtctgccaccacaaaggctgaaccaagacccatagctacaaagccgaaaatcgcaaactcgaaacctaaggtttcaagggcaaaggttgcgcaggcgcaaggaaactcagctgaagtccctccttcagaaccttctgcctcggaagagctagtagtcgaacatggcgttggagaagctacaggtcctgatctggcttcacaattggttgcttcgaatgaagtcccagtccatggttgatcaattgcgcattttgcctatttatttccttcttgcagttctgtgaatagtgagggtgtgtgcttcattgaaagttgaatcgctcaaagtgccatggtttatcgtttctggagtaggcatccaaatttttttttcagcttgtcattgagcatgccatgtatattgcttgatattgtgttcatgtttaaaattcccaatcttgtgtatattggatttatatgtctttggacatcctaggattgttgcaatacgtcaatgcaatttgtgcattattttgtagtcgttttacttttagccttttccct

SEQ ID NO: 120641 - DNA, 2281 bp, Zea Mays
gtgagctactcactcagtattccacgcttgacactccgtgacggacgcgcgccctttcccctcttctgcgactcattccggagcgcgctgcctccgatccgcggcaccgcgtcgcgtccgccgatgacgagggcgcacctgccggcggcggcgcagcggcggccgacggtggcgctgcttctgggcctggcgctcgccttctgcctcgccgtcctctccatccagtcctccttcttcgccgccccaggggcgccgggcaggaggctggatctggacgccgacgacgtgcgcgagctcgcggggttccagtcccgcgtccagcagtgcgtggctagcagaggacttggtctcacagcacatattattgatcactgcaagctggtccttaaatttcctgaagggaccaacagcacctggtataatgctcagttcaagatttttgaacctctagaatacaaatatgatgtctgtgaaactatcctattgtgggaacaggttagtacattcttctagactaacatgtttgctcttgttactcgtgttaatactaatatggtcgcagtaccgcaacatgacaactgtattgacaagggaatacttggatgtgaggccggatggatggttggattatgcagctaaaaggatcgcacagcttggtgctgataaatgttacaaccacactctctgtgatgaacttcttagcattttactgcctgctaaaccccctttccatccacgccagttcgcgacatgtgcagttgttggtaactcaggagatctcttgaaaacagagtttggacaagagattgatgcgcatgacgccgtgtttcgggacaatgaggcacctgtcaataagaaatatgcaaaacatgttggattgaaaagagactttcgactggttgtccggggtgctgctcgaaatatggcaccaatactgaagggctcctgtaatgctgtaatcctgatttcttccaatatactatttgtcccttttatataatatgctgtaatccggatttatataatatataactacattcgtgttaacaaacaaatgcaaacttattatcgtttttacaagttccatttatggctgaagttaatgttatcgaatagagtttacatgggtggtaaatatttctgttatagcacatgtgggctgcttttgaaacaagatgtgactatcttgctttccctgcagccgatgaggcacttatcattaaaagtttgacgcacaaagaaatcaatgcggtgataaaggaacttccaaatcctgtctacctttttcaaggtatagttttaagaagaggtgctaaagggactggcatgaagtccatagaacttgccctttccatgtgtgatattgttgacatgtatggttttacagttgatcctgggtacacggaatggacacggtatttctcagcccctaggaaagggcacaatccactgcaaggccgagcttattatcaacttctagaatgccttggggtcattcgtatccattcccccatgagagcacagagagtggaagattggtcagacataccaagcaaagaagagatcagaagggcacacaccatagcttttcgtctaaagaagcatgaaactggccagctagctgaactggggccatttagcaactgcaaggtatggggaacagtcgacccagactacggaccggtatcaggtacttcagacatgagcgagacgcgcaagaattcaaactacagcaagtgggagttgcttccgtttgagaagctgagaagagaagcgcaagaacaccatatccaaatgggtggcgtgtctctatacaagatggacggaaacaagttggatgatcttgtctgtgtgaggcatcagcgttcatcaagttaagaccgtggccgcctaagcctagttgtttggacgctgaattgatttcatggtggatctgaaaggatgctagacagcaagagccagaagatccgatgaagcagctctgctgtacccacttgtaaaattacatgagccatcgggttcagagcgaggcagccctctacctggaatatggaattcttttattggttgttttgggacttgtagccttctaggaatagctacttaagctgtctaggggttgttatgcgcacaccacatgacatggttttcacttcttttaacacagctgtaactgatgcaaatgggtcttgccatttctcaactatgaggtgcagttttgttaccgatccagcagtctctcgattccaaattcgtgacgtttgttgttaactgacacctt

SEQ ID NO: 120642 - DNA, 2214 bp, Zea Mays
gtgagctactcactcagtattccacgcttgacactccgtgacggacgcgcgccctttcccctcttctgcgactcattccggagcgcgctgcctccgatccgcggcaccgcgtcgcgtccgccgatgacgagggcgcacctgccggcggcggcgcagcggcggccgacggtggcgctgcttctgggcctggcgctcgccttctgcctcgccgtcctctccatccagtcctccttcttcgccgccccaggggcgccgggcaggaggctggatctggacgccgacgacgtgcgcgagctcgcggggttccagtcccgcgtccagcagtgcgtggctagcagaggacttggtctcacagcacatattattgatcactgcaagctggtccttaaatttcctgaagggaccaacagcacctggtataatgctcagttcaagatttttgaacctctagaatacaaatatgatgtctgtgaaactatcctattgtgggaacagtaccgcaacatgacaactgtattgacaagggaatacttggatgtgaggccggatggatggttggattatgcagctaaaaggatcgcacagcttggtgctgataaatgttacaaccacactctctgtgatgaacttcttagcattttactgcctgctaaaccccctttccatccacgccagttcgcgacatgtgcagttgttggtaactcaggagatctcttgaaaacagagtttggacaagagattgatgcgcatgacgccgtgtttcgggacaatgaggcacctgtcaataagaaatatgcaaaacatgttggattgaaaagagactttcgactggttgtccggggtgctgctcgaaatatggcaccaatactgaagggctcctgtaatgctgtaatcctgatttcttccaatatactatttgtcccttttatataatatgctgtaatccggatttatataatatataactacattcgtgttaacaaacaaatgcaaacttattatcgtttttacaagttccatttatggctgaagttaatgttatcgaatagagtttacatgggtggtaaatatttctgttatagcacatgtgggctgcttttgaaacaagatgtgactatcttgctttccctgcagccgatgaggcacttatcattaaaagtttgacgcacaaagaaatcaatgcggtgataaaggaacttccaaatcctgtctacctttttcaaggtatagttttaagaagaggtgctaaagggactggcatgaagtccatagaacttgccctttccatgtgtgatattgttgacatgtatggttttacagttgatcctgggtacacggaatggacacggtatttctcagcccctaggaaagggcacaatccactgcaaggccgagcttattatcaacttctagaatgccttggggtcattcgtatccattcccccatgagagcacagagagtggaagattggtcagacataccaagcaaagaagagatcagaagggcacacaccatagcttttcgtctaaagaagcatgaaactggccagctagctgaactggggccatttagcaactgcaaggtatggggaacagtcgacccagactacggaccggtatcaggtacttcagacatgagcgagacgcgcaagaattcaaactacagcaagtgggagttgcttccgtttgagaagctgagaagagaagcgcaagaacaccatatccaaatgggtggcgtgtctctatacaagatggacggaaacaagttggatgatcttgtctgtgtgaggcatcagcgttcatcaagttaagaccgtggccgcctaagcctagttgtttggacgctgaattgatttcatggtggatctgaaaggatgctagacagcaagagccagaagatccgatgaagcagctctgctgtacccacttgtaaaattacatgagccatcgggttcagagcgaggcagccctctacctggaatatggaattcttttattggttgttttgggacttgtagccttctaggaatagctacttaagctgtctaggggttgttatgcgcacaccacatgacatggttttcacttcttttaacacagctgtaactgatgcaaatgggtcttgccatttctcaactatgaggtgcagttttgttaccgatccagcagtctctcgattccaaattcgtgacgtttgttgttaactgacacctt

SEQ ID NO: 120643 - DNA, 1836 bp, Zea Mays
ctcactcagtattccacgcttgacactccgtgacggacgcgcgccctttcccctcttctgcgactcattccggagcgcgctgcctccgatccgcggcaccgcgtcgcgtccgccgatgacgagggcgcacctgccggcggcggcgcagcggcggccgacggtggcgctgcttctgggcctggcgctcgccttctgcctcgccgtcctctccatccagtcctccttcttcgccgccccaggggcgccgggcaggaggctggatctggacgccgacgacgtgcgcgagctcgcggggttccagtcccgcgtccagcagtgcgtggctagcagaggacttggtctcacagcacatattattgatcactgcaagctggtccttaaatttcctgaagggaccaacagcacctggtataatgctcagttcaagatttttgaacctctagaatacaaatatgatgtctgtgaaactatcctattgtgggaacagggaatacttggatgtgaggccggatggatggttggattatgcagctaaaaggatcgcacagcttggtgctgataaatgttacaaccacactctctgtgatgaacttcttagcattttactgcctgctaaaccccctttccatccacgccagttcgcgacatgtgcagttgttggtaactcaggagatctcttgaaaacagagtttggacaagagattgatgcgcatgacgccgtgtttcgggacaatgaggcacctgtcaataagaaatatgcaaaacatgttggattgaaaagagactttcgactggttgtccggggtgctgctcgaaatatggcaccaatactgaagggctcctgtaatgctccgatgaggcacttatcattaaaagtttgacgcacaaagaaatcaatgcggtgataaaggaacttccaaatcctgtctacctttttcaaggtatagttttaagaagaggtgctaaagggactggcatgaagtccatagaacttgccctttccatgtgtgatattgttgacatgtatggttttacagttgatcctgggtacacggaatggacacggtatttctcagcccctaggaaagggcacaatccactgcaaggccgagcttattatcaacttctagaatgccttggggtcattcgtatccattcccccatgagagcacagagagtggaagattggtcagacataccaagcaaagaagagatcagaagggcacacaccatagcttttcgtctaaagaagcatgaaactggccagctagctgaactggggccatttagcaactgcaaggtatggggaacagtcgacccagactacggaccggtatcaggtacttcagacatgagcgagacgcgcaagaattcaaactacagcaagtgggagttgcttccgtttgagaagctgagaagagaagcgcaagaacaccatatccaaatgggtggcgtgtctctatacaagatggacggaaacaagttggatgatcttgtctgtgtgaggcatcagcgttcatcaagttaagaccgtggccgcctaagcctagttgtttggacgctgaattgatttcatggtggatctgaaaggatgctagacagcaagagccagaagatccgatgaagcagctctgctgtacccacttgtaaaattacatgagccatcgggttcagagcgaggcagccctctacctggaatatggaattcttttattggttgttttgggacttgtagccttctaggaatagctacttaagctgtctaggggttgttatgcgcacaccacatgacatggttttcacttcttttaacacagctgtaactgatgcaaatgg

SEQ ID NO: 120644 - DNA, 2082 bp, Zea Mays
ctcactcagtattccacgcttgacactccgtgacggacgcgcgccctttcccctcttctgcgactcattccggagcgcgctgcctccgatccgcggcaccgcgtcgcgtccgccgatgacgagggcgcacctgccggcggcggcgcagcggcggccgacggtggcgctgcttctgggcctggcgctcgccttctgcctcgccgtcctctccatccagtcctccttcttcgccgccccaggggcgccgggcaggaggctggatctggacgccgacgacgtgcgcgagctcgcggggttccagtcccgcgtccagcagtgcgtggctagcagaggacttggtctcacagcacatattattgatcactgcaagctggtccttaaatttcctgaagggaccaacagcacctggtataatgctcagttcaagatttttgaacctctagaatacaaatatgatgtctgtgaaactatcctattgtgggaacaggttagtacattcttctagactaacatgtttgctcttgttactcgtgttaatactaatatggtcgcagtaccgcaacatgacaactgtattgacaagggaatacttggatgtgaggccggatggatggttggattatgcagctaaaaggatcgcacagctgtaatcttattttttttcttcttcttttcttttaaagtgaaatcaacctctccacattggtactaattcttttgattttaaaatttggcagtggtgctgataaatgttacaaccacactctctgtgatgaacttcttagcattttactgcctgctaaaccccctttccatccacgccagttcgcgacatgtgcagttgttggtaactcaggagatctcttgaaaacagagtttggacaagagattgatgcgcatgacgccgtgtttcgggacaatgaggcacctgtcaataagaaatatgcaaaacatgttggattgaaaagagactttcgactggttgtccggggtgctgctcgaaatatggcaccaatactgaagggctcctccgatgaggcacttatcattaaaagtttgacgcacaaagaaatcaatgcggtgataaaggaacttccaaatcctgtctacctttttcaaggtatagttttaagaagaggtgctaaagggactggcatgaagtccatagaacttgccctttccatgtgtgatattgttgacatgtatggttttacagttgatcctgggtacacggaatggacacggtatttctcagcccctaggaaagggcacaatccactgcaaggccgagcttattatcaacttctagaatgccttggggtcattcgtatccattcccccatgagagcacagagagtggaagattggtcagacataccaagcaaagaagagatcagaagggcacacaccatagcttttcgtctaaagaagcatgaaactggccagctagctgaactggggccatttagcaactgcaaggtatggggaacagtcgacccagactacggaccggtatcaggtacttcagacatgagcgagacgcgcaagaattcaaactacagcaagtgggagttgcttccgtttgagaagctgagaagagaagcgcaagaacaccatatccaaatgggtggcgtgtctctatacaagatggacggaaacaagttggatgatcttgtctgtgtgaggcatcagcgttcatcaagttaagaccgtggccgcctaagcctagttgtttggacgctgaattgatttcatggtggatctgaaaggatgctagacagcaagagccagaagatccgatgaagcagctctgctgtacccacttgtaaaattacatgagccatcgggttcagagcgaggcagccctctacctggaatatggaattcttttattggttgttttgggacttgtagccttctaggaatagctacttaagctgtctaggggttgttatgcgcacaccacatgacatggttttcacttcttttaacacagctgtaactgatgcaaatgggtcttgccatttctcaactatgaggtgcagttttgttaccgatccagcagtctctcgattccaaatt

SEQ ID NO: 120645 - DNA, 1908 bp, Zea Mays
cgcttgacactccgtgacggacgcgcgccctttcccctcttctgcgactcattccggagcgcgctgcctccgatccgcggcaccgcgtcgcgtccgccgatgacgagggcgcacctgccggcggcggcgcagcggcggccgacggtggcgctgcttctgggcctggcgctcgccttctgcctcgccgtcctctccatccagtcctccttcttcgccgccccaggggcgccgggcaggaggctggatctggacgccgacgacgtgcgcgagctcgcggggttccagtcccgcgtccagcagtgcgtggctagcagaggacttggtctcacagcacatattattgatcactgcaagctggtccttaaatttcctgaagggaccaacagcacctggtataatgctcagttcaagatttttgaacctctagaatacaaatatgatgtctgtgaaactatcctattgtgggaacagtaccgcaacatgacaactgtattgacaagggaatacttggatgtgaggccggatggatggttggattatgcagctaaaaggatcgcacagcttggtgctgataaatgttacaaccacactctctgtgatgaacttcttagcattttactgcctgctaaaccccctttccatccacgccagttcgcgacatgtgcagttgttggtaactcaggagatctcttgaaaacagagtttggacaagagattgatgcgcatgacgccgtgtttcgggacaatgaggcacctgtcaataagaaatatgcaaaacatgttggattgaaaagagactttcgactggttgtccggggtgctgctcgaaatatggcaccaatactgaagggctcctccgatgaggcacttatcattaaaagtttgacgcacaaagaaatcaatgcggtgataaaggaacttccaaatcctgtctacctttttcaaggtatagttttaagaagaggtgctaaagggactggcatgaagtccatagaacttgccctttccatgtgtgatattgttgacatgtatggttttacagttgatcctgggtacacggaatggacacggtatttctcagcccctaggaaagggcacaatccactgcaaggccgagcttattatcaacttctagaatgccttggggtcattcgtatccattcccccatgagagcacagagagtggaagattggtcagacataccaagcaaagaagagatcagaagggcacacaccatagcttttcgtctaaagaagcatgaaactggccagctagctgaactggggccatttagcaactgcaaggtatggggaacagtcgacccagactacggaccggtatcaggtacttcagacatgagcgagacgcgcaagaattcaaactacagcaagtgggagttgcttccgtttgagaagctgagaagagaagcgcaagaacaccatatccaaatgggtggcgtgtctctatacaagatggacggaaacaagttggatgatcttgtctgtgtgaggcatcagcgttcatcaagttaagaccgtggccgcctaagcctagttgtttggacgctgaattgatttcatggtggatctgaaaggatgctagacagcaagagccagaagatccgatgaagcagctctgctgtacccacttgtaaaattacatgagccatcgggttcagagcgaggcagccctctacctggaatatggaattcttttattggttgttttgggacttgtagccttctaggaatagctacttaagctgtctaggggttgttatgcgcacaccacatgacatggttttcacttcttttaacacagctgtaactgatgcaaatgggtcttgccatttctcaactatgaggtgcagttttgttaccgatccagcagtctctcgattccaaatt

SEQ ID NO: 120646 - DNA, 1822 bp, Zea Mays
ccctttcccctcttctgcgactcattccggagcgcgctgcctccgatccgcggcaccgcgtcgcgtccgccgatgacgagggcgcacctgccggcggcggcgcagcggcggccgacggtggcgctgcttctgggcctggcgctcgccttctgcctcgccgtcctctccatccagtcctccttcttcgccgccccaggggcgccgggcaggaggctggatctggacgccgacgacgtgcgcgagctcgcggggttccagtcccgcgtccagcagtgcgtggctagcagaggacttggtctcacagcacatattattgatcactgcaagctggtccttaaatttcctgaagggaccaacagcacctggtataatgctcagttcaagatttttgaacctctagaatacaaatatgatgtctgtgaaactatcctattgtgggaacagtaccgcaacatgacaactgtattgacaagggaatacttggatgtgaggccggatggatggttggattatgcagctaaaaggatcgcacagcttggtgctgataaatgttacaaccacactctctgtgatgaacttcttagcattttactgcctgctaaaccccctttccatccacgccagttcgcgacatgtgcagttgttggtaactcaggagatctcttgaaaacagagtttggacaagagattgatgcgcatgacgccgtgtttcgggacaatgaggcacctgtcaataagaaatatgcaaaacatgttggattgaaaagagactttcgactggttgtccggggtgctgctcgaaatatggcaccaatactgaagggctcctgtaatgctccgatgaggcacttatcattaaaagtttgacgcacaaagaaatcaatgcggtgataaaggaacttccaaatcctgtctacctttttcaaggtatagttttaagaagaggtgctaaagggactggcatgaagtccatagaacttgccctttccatgtgtgatattgttgacatgtatggttttacagttgatcctgggtacacggaatggacacggtatttctcagcccctaggaaagggcacaatccactgcaaggccgagcttattatcaacttctagaatgccttggggtcattcgtatccattcccccatgagagcacagagagtggaagattggtcagacataccaagcaaagaagagatcagaagggcacacaccatagcttttcgtctaaagaagcatgaaactggccagctagctgaactggggccatttagcaactgcaaggtatggggaacagtcgacccagactacggaccggtatcaggtacttcagacatgagcgagacgcgcaagaattcaaactacagcaagtgggagttgcttccgtttgagaagctgagaagagaagcgcaagaacaccatatccaaatgggtggcgtgtctctatacaagatggacggaaacaagttggatgatcttgtctgtgtgaggcatcagcgttcatcaagttaagaccgtggccgcctaagcctagttgtttggacgctgaattgatttcatggtggatctgaaaggatgctagacagcaagagccagaagatccgatgaagcagctctgctgtacccacttgtaaaattacatgagccatcgggttcagagcgaggcagccctctacctggaatatggaattcttttattggttgttttgggacttgtagccttctaggaatagctacttaagctgtctaggggttgttatgcgcacaccacatgacatggttttcacttcttttaacacagctgtaactgatgcaaatgg

SEQ ID NO: 120647 - DNA, 2385 bp, Zea Mays
tcctcagcggctcagccgtccttggctcgccactggcttccgttccccgccttcgtctcctcccgcccgggaatcctccggcctcccgcccacccagattccccccaccaccgccaagccgccagcgcacgagacgacccccgacctcgtcccactaaaacccacacgcacggacacgccccactccactcgctcccaccgcccgcgcacaatccaaacgcaaccgtcccgtcctcggggccgccatgccgccgctcgccgcgcgcctccacgccccgcttctcctcgtccccgccgcctcccctcgccccgccacgcgtctctgcgcagcgagcgggccccgcggcgtcggcggtttcaggagaggcgcgttggcctcggagaagccgccggttgtggccgtcgcggagaaagcgggcggcgagggtggaggaggacagggcgagggtccgtatgacgcgattgtgatcgggtctgggatcgggggcctggtggcggcgacgcagctcgcggccaagggtgcgcgggtgctggtcctcgagaagtacctcatccccgggggaagctctgggtactaccgccgcgacgggttcacgttcgacgtcggctcctctgtcatgttcggcttctccgacaagggtaacttgaatttgatcacacaagcattggaagcagttgggcgtaagatggaagttctacctgacccttctacagttcatttccatctacctggtgatctctctgtccttgtgcatcgaaagtatgaagacttcatcaatgaactgatcagcaaattccctcacgagaaagaagggataattaagttctatggcacatgctggaagatcttcaattcactaaattcgttggagctgaagtctctagaggagcccctttatctttttggtcaatttttccagaagcctttggaatgcttaactctagcttattatttgccacagaatgctggggatattgctcgcaagttcataaaagatcaggagctactctccttcatagatgctgagtgttttattgtgagcacagtcaatgccttgcaaacacccatgataaatgcaagcatggtcttgtgcgataggcactttgggggaattaattatccagttggtggcgttggtggtatcgcattatccctggcagatggccttgttgaaaagggcagcgaaatccgttacaaggcgaatgtaaccaatgttgttcttgaaaatggaaaggctgttggggtgaggttgtcaaatgggaaggagttctttgctaaaacggtgatatcaaatgccactagatgggacacatttggaaaactcttgaaagaaaaagaacttccagaagaggagaaaaactttcaaaagaattatgtcaaggcaccatcattcctttcaattcatatgggtgtcaaagcatcagttcttcctgctggtactgactgccaccattttgtacttgaggataattggaataatttggaaaaaccctatggaagcatatttttaagtattcctacagttcttgatccatcattagctcccgaaggacaccatatacttcatatatttactactgcaggcatagaagcctgggagggtatttctaggaaggaatatgaagagaaaaaagagatggtggccaacgagattataagaaggcttgaaaagaagttgtttcctggtcttcaagattcaatagtcctcaaagaggtaggctcaccaaagactcaccggagatttcttgctcgaaatgatggtacatatggaccaatgccgcggggtaaacccaagggcttacttgctatgcctttcaatactacttcaatagatggcctttactgtgttggtgacagctgttttcccggacaaggtgtaatagctgtagcattctcagggatcatgtgcgctcaccgagtcgctgcagatattggactagagcaaaaatctccggctctagatgctggtcttcttgggctactcagatggttgagaacacttgcatagaacgatatcagacagttgaaaatggacttcatttttccccccggaaggctgatgtttcaccagagttaggattctgcacgatctgttatgatgatcttgttatctgtaccatctcagcatcgatttcttgaaactcctaacggaaaaaaaaaggaatacgaatgggtgtacaggtttcagattttgaattatatgattacggtgtcagggccatggcatattggtatgcatataaagactacatcatagagtaaccagatggtgtacatcatctgattaccgcaataagcagagcactacatttgggagcaatgtaaatcatgttacctaggattttgaaagttctgttttgagatacccttcaactttctgaata

SEQ ID NO: 120648 - DNA, 2382 bp, Zea Mays
tcctcagcggctcagccgtccttggctcgccactggcttccgttccccgccttcgtctcctcccgcccgggaatcctccggcctcccgcccacccagattccccccaccaccgccaagccgccagcgcacgagacgacccccgacctcgtcccactaaaacccacacgcacggacacgccccactccactcgctcccaccgcccgcgcacaatccaaacgcaaccgtcccgtcctcggggccgccatgccgccgctcgccgcgcgcctccacgccccgcttctcctcgtccccgccgcctcccctcgccccgccacgcgtctctgcgcagcgagcgggccccgcggcgtcggcggtttcaggagaggcgcgttggcctcggagaagccgccggttgtggccgtcgcggagaaagcgggcggcgagggtggaggaggacagggcgagggtccgtatgacgcgattgtgatcgggtctgggatcgggggcctggtggcggcgacgcagctcgcggccaagggtgcgcgggtgctggtcctcgagaagtacctcatccccgggggaagctctgggtactaccgccgcgacgggttcacgttcgacgtcggctcctctgtcatgttcggcttctccgacaagggtaacttgaatttgatcacacaagcattggaagcagttgggcgtaagatggaagttctacctgacccttctacagttcatttccatctacctggtgatctctctgtccttgtgcatcgaaagtatgaagacttcatcaatgaactgatcagcaaattccctcacgagaaagaagggataattaagttctatggcacatgctggaagatcttcaattcactaaattcgttggagctgaagtctctagaggagcccctttatctttttggtcaatttttccagaagcctttggaatgcttaactctagcttattatttgccacagaatgctggggatattgctcgcaagttcataaaagatcaggagctactctccttcatagatgctgagtgttttattgtgagcacagtcaatgccttgcaaacacccatgataaatgcaagcatggcactttgggggaattaattatccagttggtggcgttggtggtatcgcattatccctggcagatggccttgttgaaaagggcagcgaaatccgttacaaggcgaatgtaaccaatgttgttcttgaaaatggaaaggctgttggggtgaggttgtcaaatgggaaggagttctttgctaaaacggtgatatcaaatgccactagatgggacacatttggaaaactcttgaaagaaaaagaacttccagaagaggagaaaaactttcaaaagaattatgtcaaggcaccatcattcctttcaattcatatgggtgtcaaagcatcagttcttcctgctggtactgactgccaccattttgtacttgaggataattggaataatttggaaaaaccctatggaagcatatttttaagtattcctacagttcttgatccatcattagctcccgaaggacaccatatacttcatatatttactactgcaggcatagaagcctgggagggtatttctaggaaggaatatgaagagaaaaaagagatggtggccaacgagattataagaaggcttgaaaagaagttgtttcctggtcttcaagattcaatagtcctcaaagaggtaggctcaccaaagactcaccggagatttcttgctcgaaatgatggtacatatggaccaatgccgcggggtaaacccaagggcttacttgctatgcctttcaatactacttcaatagatggcctttactgtgttggtgacagctgttttcccggacaaggtgtaatagctgtagcattctcagggatcatgtgcgctcaccgagtcgctgcagatattggactagagcaaaaatctccggctctagatgctggtcttcttgggctactcagatggttgagaacacttgcatagaacgatatcagacagttgaaaatggacttcatttttccccccggaaggctgatgtttcaccagagttaggattctgcacgatctgttatgatgatcttgttatctgtaccatctcagcatcgatttcttgaaactcctaacggaaaaaaaaaggaatacgaatgggtgtacaggtttcagattttgaattatatgattacggtgtcagggccatggcatattggtatgcatataaagactacatcatagagtaaccagatggtgtacatcatctgattaccgcaataagcagagcactacatttgggagcaatgtaaatcatgttacctaggattttgaaagttctgttttgagatacccttcaactttctgaatatgcataagctt

SEQ ID NO: 120649 - DNA, 144 bp, Zea Mays
atgatcattgtccaccgggaaggtactgcagactgctcaaggaaaaatgggcatacaaaatttcttaactaccaagaaaactggatccaaccaaacatgaaaatcagagacctggttgttgtgaaactcagaaggagaacttga

SEQ ID NO: 120650 - DNA, 750 bp, Zea Mays
atcagtcgatcgaaacccatggcggcgcaacaacctcgagccctcactgtccaccaccacacccgccgccacctcgtcctcatcgtgctcaccgtggctgccaccgcagcagcaagagcggctagcgcgcaccacacagcagcacccgcaccgagggcggccgagagtccatcgccggcggtggcatccttcgtccgcgcccgctgcgccgccacgctgtacccggctctctgctacgactgcctcctcccgtacgcctccgaggtgcaggaaaacccagcccgcctcgcgcgcgtcgccgccgacgtcgcggcggcgcgcctccacgcgctctgcgcccgcgtcaaggacatcctccggcacggcgcccctgaacctaatgagggcggcggcggcgggcggcctagcgaggccgccgcgctgcgcgactgcgcgagcacgatctccggcgcagcggacctcgcgaggcagtcgtcggccgagctcaccaagctggagatggacctggacgccgccgcctcgtccgcggccggcggcgggacgagcgacaggaggaaagccaggtgggaggtgtccaacgcgaagacgtggctcagcgcggcggtgaccaacgaagggacgtgcgccgacggattagcggaagctggcgccgcggactcgcccgccgggaaggaggttgccgccggcgtggcggccgtacagcagtgcacgagcaacgccctcgcgctcgtcaatggcattccgctctga

SEQ ID NO: 120651 - DNA, 503 bp, Zea Mays
atggacgacgctgctgcagtggggccctcatacagctccgtcctctgcatcttctccgccaaggtctccatccccatgtacaagagcaggagccatacgtaggacaggtactccccgcccgttcccaagcctttggcgtgcaggtagcctttgcacctgctggccgagaagcagagcatctccacccacacgccctggatcacggcccacatcttctcctcgctgcccctgtgcgagtccatgagatcctcggctacgcaccaagcccggcgaacgacgccgacgcctgctgagcccaggacgccgccgccgtcgtccctcttgagcagctggacgaccttgtgcgcgaggcctctctttccccgtgcccgcggcgcgccaggacggtcctccccgagcaggcccacgagctcgccgcaggtgtccctgaacaggctgcgtcgggcaccgggcatcagcatctccggcttgacgaagaggaggtacgccatgtagttggacat

SEQ ID NO: 120652 - DNA, 1294 bp, Zea Mays
aacgcaaaaacctaaaccgctatggtccatccacatccacagtcgccatcgcccccacctctcaccgtcgtcttcgtgcaccactcggcctccactgccggtcgcgcctcccagccacctcgtgccgctctgccaccccgcgcatcctccaccgcccctatggctgccacgggcgagcgctgcccgagcagtcgaccgccctttccgtgccgccccgcctccccgctaggcctccactgcccactgctccggcgcctacagtggaaggcaaggagaaggacatcgggcggcgatgacgattatcttattgctagcaccgatggggtggggacaaagctgaagcttgctttcgaaactggtattcatgatacaatcgacattgacctggtggcaatgagcgtcaatgacattgtaactctaggtgcaaaaccattgttcttcctagattactatgcaacgagcaagcttgatgttgatcttgcagagaaggttatcaaggggattagggatggctgcgaacaatcagattgtgctctcctaggaggggagacagcagaaatgcctggtttctatgcagagggtgaatatgatctaagtggttttgctctcccaagaaatgatggcataacaactacagttggtgaagctctaatggcaccaaccttcatctatgttaagcaggtgcttgagattattagcaaaggtggtgtgaaaggactagcccacatcactggtggtggctttactagcaatatcccaagagtattcccctctggatgcggggcaaaaaatttactgggtcatgggaaatacctccaatcttcagttggcttcaacaggcaagaacaaatgatcttcaaacttcgcctttgattttcagtagcaactattctgagaaacatcaggcactgcattggcgtactggtcataaaaatgattgcctccagataataagttctgctgcttcaaattcagttctgccagctgtaggaatagggtttgtccgctggtttgctaaggcaagcaacgtacatagactgctcgtcttggatcctttaggaatcataaaagcatatagaggaactatgtataggctacaaagaagcataagaagcatttttatagcagaagccaagtgttctgatgattttgttttttcaattgtgttttctgttattggttcagtatgcacatatattgacatgatttatggcatggcatctgccatctttgttatatttatgacatcgttcttgattgatgtgtgcgacatgaatgatagatctttttaaca

SEQ ID NO: 120653 - DNA, 1328 bp, Zea Mays
tacagctaggctttgagaggagctgagagaggatgagcgagtctgagtcgtccaacacggcgggcttcgccgcggccctggagctgtggcaagaaaaccagctgcgcatcctcgtcctgattagcctcgccacccagtgcttcctcttcgtcttcgcgccgctccgtcagcaccggatcccaggtccgctgaggctctccatctggctggcctacctgggcagcgacgccgtggccatctacgccctcgccaccctcttcaactcccaccggtgcgacaccggcaccggcaccggcaccgcccgcgccggcgtggagctgctgtgggcgcccatcatgctggtgcacctgggtggccaggacagcatcccggcctacaacatcgaagacaacgagctgtggcggcggcatgtcgtgacagcggtgtctcaggtaatattagtaaacctcagcagcactcactcaccagcagtaatgcacatctggtcagcaataatggcgcgtggtctgacactgacgacaggtcgccgctgctatctatgtcttcgtcaagtcgtggccaaaatccatggcggcgactgctgcccatctagtggttgaccaagacactcgtaaccggataaatgccttcatggcccataaaagtgagatggcggcttacgggagaatcttgggaccagcgcttcttctcttcttctctgggatcaccaaatgcgtgtgcaagccctgggacctcaagagggtcagcgtcaacagcctcgtggactcctcctcatcgggctcctcggaagagaagggcgatgccggtgagagtgagatgatggattcgcttcaggagtacgtgggagctgcagcacagtatttcgagtccgtcggccatgaggaggaggaggaggacgacgacgccgcctgtaaagcagacgaagtttggaagccctacaacctgtgcgtggacctggcgcccccctactccggccggctgagctgcctgaaacacctggcgcgcagcccagcggacgaagcccatcgcctggtgaaatccagcctctccgcgacgttccaccagctctacaccaaggaatccctgaagctgcacgacatgtcgcacattgtacttacagacaaccgcgccttgaaccgcttgaagctggtcacctcggctcgagggctccggacggtagccgcggccacactgcttggggcgatcgcggcgttctacggagaaggcgacgttgaccaggacccgacggacgtcaccatcacgtacgccctgctgtggtctgctttcgtgatggagtgcgtcttgcccaccgtgatccaccacacgtt

SEQ ID NO: 120654 - DNA, 2493 bp, Zea Mays
ctttgagaggagctgagagaggatgagcgagtctgagtcgtccaacacggcgggcttcgccgcggccctggagctgtggcaagaaaaccagctgcgcatcctcgtcctgattagcctcgccacccagtgcttcctcttcgtcttcgcgccgctccgtcagcaccggatcccaggtccgctgaggctctccatctggctggcctacctgggcagcgacgccgtggccatctacgccctcgccaccctcttcaactcccaccggtgcgacaccggcaccggcaccggcaccgcccgcgccggcgtggagctgctgtgggcgcccatcatgctggtgcacctgggtggccaggacagcatcccggcctacaacatcgaagacaacgagctgtggcggcggcatgtcgtgacagcggtgtctcaggtcgccgctgctatctatgtcttcgtcaagtcgtggccaaaatccatggcggcgactgctgcccatctagtggttgaccaagacactcgtaaccggataaatgccttcatggcccataaaagtgagatggcggcttacgggagaatcttgggaccagcgcttcttctcttcttctctgggatcaccaaatgcgtgtgcaagccctgggacctcaagagggtcagcgtcaacagcctcgtggactcctcctcatcgggctcctcggaagagaagggcgatgccggtgagagtgagatgatggattcgcttcaggagtacgtgggagctgcagcacagtatttcgagtccgtcggccatgaggaggaggaggaggacgacgacgccgcctgtaaagcagacgaagtttggaagccctacaacctgtgcgtggacctggcgcccccctactccggccggctgagctgcctgaaacacctggcgcgcagcccagcggacgaagcccatcgcctggtgaaatccagcctctccgcgacgttccaccagctctacaccaaggaatccctgaagctgcacgacatgtcgcacattgtacttacagacaaccgcgccttgaaccgcttgaagctggtcacctcggctcgagggctccggacggtagccgcggccacactgcttggggcgatcgcggcgttctacggagaaggcgacgttgaccaggacccgacggacgtcaccatcacgtacgccctgctgtggtctgctttcgtgatggagtgcgtcttgcccaccgtgatccaccacacgttcgcctggatagagcggctgttcaccgggcaccggacgtggccggaccaggtcgcgcagtacagcctcatggggtacgtggcacgcggccggagccactcgtggctcatgaaggcggtggcctgcctcggctgcggggacctggtcgaccagctctggaccatgaagccgcgcatgggtgcttcgtccagggagatcaccggcctggtccacgcccacgtcgccggagcgtggatgcagggccacatagccggcgcggactcgttccgggcgttcaacgactaccgaggccagtggactctcggcaactgcagggagatcggggtcggcgtatcatcatccatggtggtactcatgagcagcgtgtcgaggccgttcgacgagagcgtcctcgtctggcacctcgccaccgacttctgcttccacttactccaggtccagggagacccgtcccgcgccaacgccaccgcccgccgctgcatcgagatgtccaactacatggcctaccttctcttcgtcaagccggagatgctgatgcccggtgcccggcgcaagctgttcagggacgcgtgccgcgagctcgtgggcctgctcgaggaggatcgtcctgacgcgccgcgggcacggggcaagagagacctcgcacacaaggtcgtccagctgctcaagagggacggagacgacgtcctgggctcagcgggcgtcggcgtcgttcgccgggcttggtgcgtagccgagaaactcgtggattcgcacagtggcgacgaggagaagatgtggaccgtgatacagggcgtgtgggtggagatgctctgcttctcggccagcaggtgcaaaggctacctgcacgccaaaggcttgggaacgggcggggagtacctgtcctacgtatggctcctgctcctctacatggggatggagaccttggcggagaagatgcagaggacggagctgtacgagggctccactgcagcagcgttatccatcagtggccagaatgtttgataccgctcggtctaactactctttggaaggatcggagtctaatcctctcaagtttagataaattttaagataataatgtttattgttagatgtgtatccagatccgtcaagccacggacaagcgtgcttctccttttcgcaatttctcctattggtaatgtttgtttggactggtcgtatttagatgtcttctcctataatctctttctagattgtaataacttttttctatatttatgcttaatggtcgatggaagaatatc

SEQ ID NO: 120655 - DNA, 541 bp, Zea Mays
tcttccttggtccaccatgtccgtcctctgcatcttctccgccaatgtctccatgcccatgtaagacaagaggagccacacgtaggacaggtactgcccgccgctccccatgctcttggcgtgcaggtagcccctgcaccctgccggcagagaagcaaagcatctccacccacacgccctggaccaccctccaaaccttttccatgtcttccccaacctgtaaaccaatgagcacctgggtgacagcccaagcgtcatgagccacacctgatcctgaattccccgtctcccttagcctacggattatactactactactagcaggctcgttcggtggaatgatgccctccagttcctcgtaggcgtctttgaacaggctgcgcctagcaccggcgatcaacatctctgggttgacgaacagtaggtacgccatgtagttggacatggccatgctccggcaggcagcttgacgttgctgagtagaagaaggcgtggcgaggtggaagcaaaacaagtcggtggcgaggtgccataggagaag

SEQ ID NO: 120656 - DNA, 269 bp, Zea Mays
gcacctgcaggctgtagctgctgcgatgcgtggatacccactcctgacggttctggcgattgaagagcacggccaacgcgtatatcgccacagcgtcgctgcctagataggccagccagattgtcaacctgaaccaggcagggatactgcgtttacgcaagccggctgcgaaaaagaggaagatctggatgaagagacagcacaaggacgcgcagctgccactcctcccaccattgcactgccgctgtgaaacccatgctctcagtctc

SEQ ID NO: 120657 - DNA, 277 bp, Zea Mays
gatccgcagacatcacggttcacttggacaattgagaacttcaccaggttcagtgagaagaagcactatttagaggtttttgttgttggcggattcaaatggagtgtgctgattttccccaaggggaacaatgtggaccacttctcaatgtacttggatgttgctgactcaaccagccttccgtatggttggagccgctatgctcagtttagtcttgctgttgtaaaccaaatccagccagagtttacgatacgcaaagagacccaacatcaattta

SEQ ID NO: 120658 - DNA, 574 bp, Zea Mays
gatccgcagacatcacggttcacttggacaattgagaacttcaccaggttcagtgagaagaagcactatttagaggtttttgttgttggcggattcaaatggagtgtgctgattttcccccctgttttgcaactccagctgaagcgctttgagtatgattatatgagagatagcatggttaagattaatgatcgctatgagttccctctgcaacttgatctggatagagatggtggcaaatacattgctccaaatgcagatcgaagtacacgaaacctttacactcttcacagtgttcttgttcatagtggtggggtacatggtggtcactactatgcattcatacggccaactttatctgagcaatggtataaatttgatgatgaacgtgtaacaaaagaagatgctaagaaggctcttgaagaacaatatgggggtgatgaagagttaccccaaataaaccctggtttcaacaacgctccatttaaattcacgaagtattcaaacgcgtatatgcttgtttatattcgtgaaagtgccaaggagaaaattatgtgtactgttgatgaaaaag

SEQ ID NO: 120659 - DNA, 607 bp, Zea Mays
tgggatcaagtagaggggatcatcctgcaacaaggtgtgcctgacatgcataagtggaatttaactcagtctggagagtatagtagcaagtctgcttatgctgcgttctttttttggttccatacgttttgcaccttggaagagttgggctccactacgctgcaaattcttcatctggctgatattcaaaaaccgctgctggacagcagataggctagctaaaagggggctatctcatcctaagacctgtcctctttgtgatcaggaagaagaaaccatccatcaccttttagtgggttgtgtcttctcaagacagctctggtcacacattttcttggcactaagattaccggatttggtacctacgatggctgaatcgacactcccaaagtggtggagaaaagtagctagacttgttccaaaagaaaggcgaaaggggctgaattcgttaaacattttaacggcctgggagatttggaagcatagaaattcatgtgtttttgaacttgcaaggccttgcattcccgacatccttagacaaatcatggaggaatgcaggatatggtgatgggctggtgcttcaaatctgcaagattttattatttgg

SEQ ID NO: 120660 - DNA, 1374 bp, Zea Mays
ttccggtctttggagaaaccaaaggatgatgatttttctttggaattgtcaaagcttcatacctatgatgatgttgttgagagagttgctcgccaacttgaattggacgatccagcgaaaattcggcttacaccccacaattgctactctcagcaacctaaaccacagcccgtcaaatatcgaggagtggtgcatctgtcggacatgctcatccactacaatcagacgtctgacatcttgtattatgaagtgttggatataccactgccagaattgcagttcctaaaaaccctgaaagttgcatttcaccatcctacgaaggatgaggttgttattcatagcatcaggcttccaaaaaatagcaccattgctgatgtaatatatgacttgaaaactaaggttgaactgtccagtcctaatgctgaactacgtgtactagaagtcttctaccacaagatctataagatctttccactacatgagaagatagagaatataaacgaccaatattggacactacgtgctgaggagattccagaagaggaaaaaaatataggcccaaatgatcggctaattcatgtttatcacttcaagaaagatattaatcagactcagattcagaactttggagaccctttcgttttggtcgttcatgaaggtgagactttagcagaagtcaagaagcgcatacagagtaaactgcaagtctctgctgatgaattttccaagtggaaatttgcatttatatcaatgaatcggccagactacctccaggattcagatgttgtacctactggctttcagaggagagaggtctacggagcttgggagcaatatcttgggatagagcacgctgatactgcaccaaaaagggtctatacagtgaatcagaaccgtcacgcatacgaaaagccggtcaaaatttacaattgagatttctaactaacatggccgcacggtgaaggcctccatacgagaggagcggccagaaaagggaggacagggaatttatactgtcagggggaaaacctcatagttagcgagccattcggtgtggcacggccatgtattccagcgctagaggccagccactgttatttcatctgtagcagccagcagctcctatagcaatgattttctttttgtacaagattttccttctttgccttagggtgatggcgcgagcgcattggtgtccgtttcggttgggcaattgcttcattcttagagcaaagctgggtacataagattttggtaggaagcgtgtatacaggcaggctgtatagttgtggctctctcggcttgatccctcgtatcttgtcttgtgctattgttaatgcagtgacaggggctgactgtaaatcgtggttccaa

SEQ ID NO: 120661 - DNA, 1377 bp, Zea Mays
ttccggtctttggagaaaccaaaggatgatgatttttctttggaattgtcaaagcttcatacctatgatgatgttgttgagagagttgctcgccaacttgaattggacgatccagcgaaaattcggcttacaccccacaattgctactctcagcaacctaaaccacagcccgtcaaatatcgaggagtggtgcatctgtcggacatgctcatccactacaatcagacgtctgacatcttgtattatgaagtgttggatataccactgccagaattgcagttcctaaaaaccctgaaagttgcatttcaccatcctacgaaggatgaggttgttattcatagcatcaggcttccaaaaaatagcaccattgctgatgtaatatatgacttgaaaactaaggttgaactgtccagtcctaatgctgaactacgtgtactagaagtcttctaccacaagatctataagatctttccactacatgagaagatagagaatataaacgaccaatattggacactacgtgctgaggagattccagaagaggaaaaaaatataggcccaaatgatcggctaattcatgtttatcacttcaagaaagatattaatcagactcagcagattcagaactttggagaccctttcgttttggtcgttcatgaaggtgagactttagcagaagtcaagaagcgcatacagagtaaactgcaagtctctgctgatgaattttccaagtggaaatttgcatttatatcaatgaatcggccagactacctccaggattcagatgttgtacctactggctttcagaggagagaggtctacggagcttgggagcaatatcttgggatagagcacgctgatactgcaccaaaaagggtctatacagtgaatcagaaccgtcacgcatacgaaaagccggtcaaaatttacaattgagatttctaactaacatggccgcacggtgaaggcctccatacgagaggagcggccagaaaagggaggacagggaatttatactgtcagggggaaaacctcatagttagcgagccattcggtgtggcacggccatgtattccagcgctagaggccagccactgttatttcatctgtagcagccagcagctcctatagcaatgattttctttttgtacaagattttccttctttgccttagggtgatggcgcgagcgcattggtgtccgtttcggttgggcaattgcttcattcttagagcaaagctgggtacataagattttggtaggaagcgtgtatacaggcaggctgtatagttgtggctctctcggcttgatccctcgtatcttgtcttgtgctattgttaatgcagtgacaggggctgactgtaaatcgtggttccaa

SEQ ID NO: 120662 - DNA, 799 bp, Zea Mays
cactggccgccagctccagtccgacttccctctctctattttgttcttttttttcgtcgcttggcaaacagcttcgtctggcttccttgcctcggctaacggctaaaaaaaccagcgagcacgatttctcctctctctgtgagtgtgttttttttttacgtgctctcttgtctgcggccaacatacagctaactggcgagccgtggacgctcggccagctctgctggccgactaaggagggcgtcgtgggcctcaccgccggcgagtgcgtccctgcgggtgggcacactgccgtcggttgtccagcacagctacaagttgaggagctctgcagtaaaggaagtgtgtagtcaccatggtccatttcaagaataggtatatggtggtggagatctttatagatgcaggtagaggtgaacaggaccctataatcctcacccaatttaatataacaaaagttataaaagacagcattcagctcaactttggtgagtgtggcctagctggatctcttggatcattgcaagttaagtatgtcaatcctgtaacgaagctctgcattgtccgcgtgtctcgcgaagaccaccagaaagtttgggctgctatgacgatggtgcggtgcattgggaagatccccgtttcgttcaacttgctcgacatgagtggtaagtggctcagactctggatgatggtacagaacaatgatattgcattgcctttttacgtggttgttttcaatcaaactggcgcttgctttggtgcacggcgaacattccaaaaacaacatatttctgtagtt

SEQ ID NO: 120663 - DNA, 1186 bp, Zea Mays
cactggccgccagctccagtccgacttccctctctctattttgttcttttttttcgtcgcttggcaaacagcttcgtctggcttccttgcctcggctaacggctaaaaaaaccagcgagcacgatttctcctctctctgtgagtgtgttttttttttacgtgctctcttgtctgcggccaacatacagctaactggcgagccgtggacgctcggccagctctgctggccgactaaggagggcgtcgtgggcctcaccgccggcgagtgcgtccctgcgggtgggcacactgccgtcggttgtccagcacagctacaagttgaggagctctgcagtaaaggaagtgtgtagtcaccatggtccatttcaagaataggtatatggtggtggagatctttatagatgcaggtagaggtgaacaggaccctataatcctcacccaatttaatataacaaaagttataaaagacagcattcagctcaactttggtgagtgtggcctagctggatctcttggatcattgcaagttaagtatgtcaatcctgtaacgaagctctgcattgtccgcgtgtctcgcgaagaccaccagaaagtttgggctgctatgacgatggtgcggtgcattgggaagatccccgtttcgttcaacttgctcgacatgagtggaagcatcagggcttgcaagaaagctgcattggagtgcgatgaagcgaaatttgagcaatacaagctggttgcaggtgattgtatcacggcagagatcacccagtctgtagagaagtgctttgagaagatcagaggactagagagctaagcagaagaattgacatcatgtccacccacactcggatcctaaaacctgctgaccctgcaccacatccgtgatcacgtcacaccacaagttgtgtgtccagcgcccaccacagcaacggcctcttgctgccagcagcctccgtgcctccagcagctctcctctccaaggaaaagtctgaagtccgcaaccaaacaagtgttctgcagctgctctttgccgttggttgaagtctgcaaccaaacaagtgttatgcagctgctctttgccgttggttggagttcttggctccacactttcagaaagaattcatgtatacataaaatttattatatagagagtttgcttcgtatattagtaattttttaccaaaca

SEQ ID NO: 120664 - DNA, 1558 bp, Zea Mays
cactggccgccagctccagtccgacttccctctctctattttgttcttttttttcgtcgcttggcaaacagcttcgtctggcttccttgcctcggctaacggctaaaaaaaccagcgagcacgatttctcctctctctgtgagtgtgttttttttttacgtgctctcttgtctgcggccaacatacagctaactggcgagccgtggacgctcggccagctctgctggccgactaaggagggcgtcgtgggcctcaccgccggcgagtgcgtccctgcgggtgggcacactgccgtcggttgtccagcacagctacaagttgaggagctctgcagtaaaggaagtgtgtagtcaccatggtccatttcaagaataggtatatggtggtggagatctttatagatgcaggtagaggtgaacaggaccctataatcctcacccaatttaatataacaaaagttataaaagacagcattcagctcaactttggtgagtgtggcctagctggatctcttggatcattgcaaggtaccaccagcaattacttctgaaacccttttaatcttataccagtgtttgctgtactatgtctaccgctggctttttaatataaaagcacttatacgctctgcaaaaattccagttaagtatgtcaatcctgtaacgaagctctgcattgtccgcgtgtctcgcgaagaccaccagaaagtttgggctgctatgacgatggtgcggtgcattgggaagatccccgtttcgttcaacttgctcgacatgagtggaagcatcagggcttgcaagaaagctgcattggagtgcgatgaagcgaaatttgagcaatacaagctggttgcaggtgattgtatcacggcagagatcacccagtctgtagagaagtgctttgagaagatcagaggactagagagctaagcagaagaattgacatcatgtccacccacactcggatcctaaaacctgctgaccctgcaccacatccgtgatcacgtcacaccacaagttgtgtgtccagcgcccaccacagcaacggcctcttgctgccagcagcctccgtgcctccagcagctctcctctccaaggaaaagtctgaagtccgcaaccaaacaagtgttctgcagctgctctttgccgttggttgaagtctgcaaccaaacaagtgttatgcagctgctctttgccgttggttggagttcttggctccacactttcagaaagaattcatgtatacataaaatttattatatagagagtttgcttcgtatattagtaattttttaccaaacatgtgccacggtgtatatatagcaaactataccgggtggcaaacaaaccaacccacacgtatccacaaacttaataatggccacaacacgcctgacgacccaggagaccatgacggttttgaaaccacggacgaactcgataagtttcagtactttcctcacaggaccccgatacctgtagtagagatgttacctgatatgacgggttttacctgatatgaagtgatatgacgggttttacctgatatgaaggtaggt

SEQ ID NO: 120665 - DNA, 1231 bp, Zea Mays
ccctctctctattttgttcttttttttcgtcgcttggcaaacagcttcgtctggcttccttgcctcggctaacggctaaaaaaaccagcgagcacgatttctcctctctctgagctctgcagtaaaggaagtgtgtagtcaccatggtccatttcaagaataggtatatggtggtggagatctttatagatgcaggtagaggtgaacaggaccctataatcctcacccaatttaatataacaaaagttataaaagacagcattcagctcaactttggtgagtgtggcctagctggatctcttggatcattgcaagttaagtatgtcaatcctgtaacgaagctctgcattgtccgcgtgtctcgcgaagaccaccagaaagtttgggctgctatgacgatggtgcggtgcattgggaagatccccgtttcgttcaacttgctcgacatgagtggaagcatcagggcttgcaagaaagctgcattggagtgcgatgaagcgaaatttgagcaatacaagctggttgcaggtgattgtatcacggcagagatcacccagtctgtagagaagtgctttgagaagatcagaggactagagagctaagcagaagaattgacatcatgtccacccacactcggatcctaaaacctgctgaccctgcaccacatccgtgatcacgtcacaccacaagttgtgtgtccagcgcccaccacagcaacggcctcttgctgccagcagcctccgtgcctccagcagctctcctctccaaggaaaagtctgaagtccgcaaccaaacaagtgttctgcagctgctctttgccgttggttgaagtctgcaaccaaacaagtgttatgcagctgctctttgccgttggttggagttcttggctccacactttcagaaagaattcatgtatacataaaatttattatatagagagtttgcttcgtatattagtaattttttaccaaacatgtgccacggtgtatatatagcaaactataccgggtggcaaacaaaccaacccacacgtatccacaaacttaataatggccacaacacgcctgacgacccaggagaccatgacggttttgaaaccacggacgaactcgataagtttcagtactttcctcacaggaccccgatacctgtagtagagatgttacctgatatgacgggttttacctgatatgaagtgatatgacgggttttacctgatatgaaggtaggt

SEQ ID NO: 120666 - DNA, 1203 bp, Zea Mays
ctgcactgcactggagagtggagacgaccgacacttccgcccaacggctacgggcggcaggcggtgccgcgtccctctcgttgacgcggctggagctgggtgcgcgtcacaattactggcacacacacagtttctccaagcagctcgtatcgttaatcccgattattaaactgtcgcacaccgcaccttgccatgccaccgcgattatataaaattaatgatgcacgcggcagcatgtgcagcgtacatacaaaaccctggatcagccagcgttccattccaacaacagcacagcagagcaagagcgcaccagcacgacacagccaagctccactccaccgacacgctgcgctcgagcccgccggcgagatccatggcgcggctgctcccgacggccgcggcagcggccatcgtggccgccgtcctggtggcgggcctgccgggcgcccgggcggcgtctgcctcgccggcggcggacgacgcgccgccgtacaggaaccacaccgttggcggcggcgacgggtggttcttcgacgccaacaccaacgcctcgtccgggaactactccgactgggccgccggcgagaccttctacctcggtgactacctcattttcaagacgaacgacaactcgtcggtggtgcagaccaccaacgccacgacatacgggctctgcgacgccagcgacgacctggcggagacgacgtccatctacggcggcggcggcggcgggggcggcggcctcgagcagaacagcaccatcgcggtggcgctcaccgccgagggcgccaactacttcttctccgaggccgacgggggcgcgcagtgccagcaggggatgcggttcgagatcaaggtcgagcacggccggggcctgccgccgtcgctactgcaccagccgccggcgcccaagggccgcgtcctcgcgccgccgccggcgggcacggcgttctcgggcaccggcggggtcgagcccggcgacggcgccggggacaacggcggcgctggcacgagcggcgcgtgcagggcggccagcggccggttcttgggggtggtggctgctgctgctgcggctctggccgttttggttctttgagtagcgatggtttaaaggcattcgtcatttggaaccactgttctgcttatgtatgtgtctgtatttaaattcatcatttaatggagatttgtgttcgatgcttagaa

SEQ ID NO: 120667 - DNA, 852 bp, Zea Mays
ctaataaaccctgcacctccatcgcaccctctccgccgccaagaccatcctcgcatccgggttgccagctctccttgagcccagaagcacaccgcgcgccatgcgaccaccgagagggcgaggcggtggtggccggttcggcggaggaggaggccggggccgcggcgggggccgattcagcggtggtggccgaggtggcggcgggggccgcttcggcggcgggttccgcgacgagggcccgcccgcggaggtcgtcgaggtttcgacgttcctgcacgcgtgcgagggggaggcggtgacgaagctcaccaacgagaaggtgccctacttcaacgcgcccatctatctgcagaacaagacccagatcggcaaggttgaagagatcttcggccccatcaacgaatcctatttctctgtgaagatgatggaggggatcattgcaacatcgtacaatgaaggcgacaagttctatatcgacccaatgaaattgctgccgctctcacgcttcctgccacaaccaaagggaaatctcaaggagcacctagaggtggtgggcgtgggggaggaaggggttttgggcgaggccgtggtggtggttctttccgcggtggaagaggaccaccaagggggggtggtcgaggtccaaggggtggaagccgtggcggttttatagggcgaggaaggttctaggtgcagtttgagtttgatgatgttttccccttgaagcatcatagctgcacaattggaaacttccatgttattgtaaccagatatgtttaaggtagcagagcactttatctgtggaacttggattctcaactgaaacaaacggtttgtacctgttccgttccc

SEQ ID NO: 120668 - DNA, 1347 bp, Zea Mays
ctaataaaccctgcacctccatcgcaccctctccgccgccaagaccatcctcgcatccgggttgccagctctccttgagcccagaagcacaccgcgcgccatgcgaccaccgagagggcgaggcggtggtggccggttcggcggaggaggaggccggggccgcggcgggggccgattcagcggtggtggccgaggtggcggcgggggccgcttcggcggcgggttccgcgacgagggcccgcccgcggaggtcgtcggtcggtgccacccatactcctacccactccccgtcagggtattggctccttttctggtattctcgtttttttctgaccttctggtggggtttctgtctgtcttggcgtgcgcagaggtttcgacgttcctgcacgcgtgcgagggggaggcggtgacgaagctcaccaacgagaaggtgccctacttcaacgcgcccatctatctgcagaacaagacccagatcggcaaggttgaagagatcttcggccccatcaacgaatccgtgagcacctcctcgcctccctaatctaaaaaaaactactcttttttacgtcctcgtgggtactcgaggttgtggtgcatttctaatgtggtaagagcaataatattggcgtagcttgttgaaggtgttttgcttagagacggtgaggatttggtgcgcgattttgcatatttgtagtcttgtagtgaggtccttgttgtaatagcagtgcaccaagattttgggatatgttgccacatttgtactgtaaaacgacgacacggagcatgatattctgatgtgtcatttagtaaggcaactcttgttgagggaactttggaatttctgctttagctatgctactaatgttatcgtgaatatgatctttttttgtatgtgtagtatttctctgtgaagatgatggaggggatcattgcaacatcgtacaatgaaggcgacaagttctatatcgacccaatgaaattgctgccgctctcacgcttcctgccacaaccaaagggaaatctcaaggagcacctagaggtggtgggcgtgggggaggaaggggttttgggcgaggccgtggtggtggttctttccgcggtggaagaggaccaccaagggggggtggtcgaggtccaaggggtggaagccgtggcggttttatagggcgaggaaggttctaggtgcagtttgagtttgatgatgttttccccttgaagcatcatagctgcacaattggaaacttccatgttattgtaaccagatatgtttaaggtagcagagcactttatctgtggaacttggattctcaactgaaacaaacggtttgtacctgttccgttccc

SEQ ID NO: 120669 - DNA, 639 bp, Zea Mays
atgaagcactccaatgatcaaaagctagcaagcagcctgggagctgggaggcgaagtcctcgtacctactctgaaattacaatgctgatgaaaactctccaattcaagcgcttctggggtggagccagtaggtttctggtcttcccttggccattggctgacgcgactgccggtcctcgcactggcagcgagcgacgcgcccctttgctcctgcccgtcgtagccgtgggtccgcgagcagatcaagagatggcctcgacgacctacctctcctccttcctgtcgatgctgccatcgtgcgtccgcctgcggcgacgggcgtttgagccaccgcaccacgtcggtccgtccgcgcgtagtggttctttttccttgaccaccgacaagatctctgcgattgggtgcttcttggcctccgtcgccgactcgttgccctccggccacccagaccgctacgccgaccccctatgtccaaggttcgggtggtcgaccacgttggttatgggcgaaagccttgcttggccttctgtcagccccggcttgacttctatgtcaatctccttgttggaggcaatgtcgggatgcgtgtgtttgtcatctttaggcgctcttaggggcgattttctcgaggtcatctaa

SEQ ID NO: 120670 - DNA, 1573 bp, Zea Mays
cctatatctccacggtctacagcggttccccctataacaatcctctataccccaccacaccaatattatatactttcctcatcaactaactcaactaccatgaaatattaaatttatttttatttattctttgtatagtacacgggcgaattttggtccacatgtaattagcaaacttcataattactattactacattagtacataatcctgtacaatttgatgtatttttataaatacaaattctcattcttctagtacacgacacgagtggcttgcacgacacgactggcttgtaccggaagccacgatcgcctggcttccttcacacacctaaggcacctataaatatggtaccctgaggaaatgctccactcatctacacactcacctcttctatatcatccgccataccataagaagaccgtagtacgtactcgtagtttaggtcgtcatggagtcattgaaaagccttgtgttgtcctcgtcatccgacgattccgacgatgagattgataccttgttgcttgcccaacatgttgaccaccttgtacaaggagacacgagcacgcgccgtaggcgctcctcattgcctcgccgagttatccatagggaccacgctgctggagaaaatctcatcaaacatcactacttcggacctaatcctgtgtatccatcacatgtttttcgtcgaaggtttcggatgcatcgtcctttgttcctacgtatccttcgtgccgttcagcgagaagacgaatacttcactattcgttgtgatgcaacaggtttagcagggcttggtccattgcaaaaagtatgtgctgcattgcgtatccttgcgtacgggttaccaaccgatgcggtagatgagtacatacagattggacagactaccgctagggactgccttatccgtttttgtcgcgcaatcatatcttcctttagcgaacgatacctttgtatccctaaccacgacgacattgctcgcatactacgtgtaaacgccgacagggggtttcctggtatgctaggctctatcgattgtatgcattgggaatggcgcaactgtcctactgcatggcgcggacagttttgtgggcgaaattcgaggccaacaatgatactagaggcagtcgctgggtacgatttgtggatttggcatgccttctttggaatgcctggtaccaacaatgatctcaacgtgcttcatcgctcacctgtgtttgatccgttacgtaatgggacgatgccaccagtgcacttcactattaatgggactacttacaatttcggatactacttagcagatggcatatatccaaattggcctacctttgtaaaagctattcgccacacatttgaggagaaaaaggttcactttacaaccaagcaagagagttgtcgaaaagacattgagcgagcatttggagttttgcaggctaggtgggctgttctacgtggacctgcttatggttgggatcgtaatcacctcgcagagatgatgactgcttgcattattatgcacaacatgattgtcgaggacgaaggagatggtgcagctaatgtcgacttc

SEQ ID NO: 120671 - DNA, 2241 bp, Zea Mays
ccacgcggacggcggatctgagctgctggtgcttctacggggcctggcgatttgaattcgagtggtgcgtgtatagagcgtgagagagagaaaagagagtggctcttgcgctctgcagtccagttcttgaatccagagctgcgattcgtgctcgcctgacgccgatgggccggagcctgagcccgctgctacggcaggagctggacaacctggacaaggacgctgacagccgccgcgccgccatgaaggcgctcaagtcgtacgccagacacctggactccaagtccatcccgcacttcctcgccgaggtctccgacaccaccgcggccggcgccggcgccggcagcggcatgcccaccggcggcgagttcaccatctcgctctacgaggtgctggcgcgggtgcacggccgcaacatcgtgccgcagatcggcaacatcatggccaccatcatgtgcacgctctcctccagcgggggctccttcccgctccaccaggcctgctccaaggtggtgcccgccatcgcgcggcacggcatcgacccctccgcgcccgacggggagaaggccggcatcatcgcctccctctgcaggccgctctgcagcgcgctcatgggggggagccaggacggcggcgccgcctccggcgcggcgctgtgcctgaaggcgctcgtcgagtccagcaactggaggttcgcgtccggggagctggtgaacgaggtctgcctcaaggtggccggggcgatgcacgacagcgcgacgcggtcgaacgcgcacatgggcctcgccatggccctggtgaagcacaacggcctgatcgcggaggcgtacgcgaggtccatcgtgcgctccgggctgcagatccttgatggggacacggcggatagcagctcccagaagcgcctctcggcgatccagatgatcaatttcttcatgaagttcgttgaccccaggtgcctgtcttcagagcttggcagggtgattgatgtgatggagcggtgccagaatgaccgcatgcctttcgtccgaggtgctgcgtttgaggcatcacagagtgcgaggaacatcgccgcgcagaagggatcaagacatgaggttggcacgagcccgatggttggctccaatttccacaagagaagggagaagagcccatgccggagcctctggggtgccaagcgcagccctgcagcctccaccatggctgctgcttctccagtccagttcagatccccggaatcgcaggttgtggattcatccatcatgaacggcagcacgctccacgactcaccggtctcagtcgggcagtcctcttgcaactttgatcagagtcggcgcacgaaccggaggttgtggagcaatgatgccgttgatgtttctctgaaggatggcttgttcattcagctttgctcaaacagcaattcctatgaagatgacttgggcgaggtctgtgacagtgaagtgactgatgctaactttgagtgtaccaacacatttgcagggtttgtgtcaccaagccacaatggttccatatcaagggacaagactcccagtcccagggcttcagacaggccgataaatattgatgacgtgaagatatactcaacaccaaggaagcttctccgattgcttcaaagctcatacgactctgactctgctagcaacatcggacagtccactgcaaagctcagaggcttgtcgtcaccagatcaggaacacaagggactagtgatctcatctgaacagatgcaatctctgcattcagacaacaagggtgatgagatgaaagatgagaacgaaaccatttatatgcagaacagcaaaggtcggactcagactctatccaatgctgatgcatcagtactttccactaccgaggctgagaacacatccatcaagacttcccctgaaattgagctcaatggggatgatgtctgtattacaagcagcatagggaagaccaggaagtatagagcaaaattcactttgtttctgagcgtgatcgtgatctttttagcaatcatcaccatgctcatcaggatagagaatgatgatgattcagcgtaccttgtccccacttaatattttgtatgcttcattgctgtctgtttaaattcctatttttattttatcactatagagtggtttgtgttttgaacaattttgcagtcatctatccatgaatgacagcaaataattaaattagaattttcatgctcacaatgtgtttatagtgttctacagt

SEQ ID NO: 120672 - DNA, 769 bp, Zea Mays
gtacaattagttcttcatgagttgcattgtacagtacctcagttgagcctgtaattaactttattgttttgttatttcccctaggcttcagacaggccgataaatattgatgacgtgaagatatactcaacaccaaggaagcttctccgattgcttcaaagctcatacgactctgactctgctagcaacatcggacagtccactgcaaagctcagaggcttgtcgtcaccagatcaggaacacaagggactagtgatctcatctgaacagatgcaatctctgcattcagacaacaagggtgatgagatgaaagatgagaacgaaaccatttatatgcagaacagcaaaggtcggactcagactctatccaatgctgatgcatcagtactttccactaccgaggctgagaacacatccatcaagacttcccctgaaattgagctcaatggggatgatgtctgtattacaagcagcatagggaagaccaggaagtatagagcaaaattcactttgtttctgagcgtgatcgtgatctttttagcaatcatcaccatgctcatcaggatagagaatgatgatgattcagcgtaccttgtccccacttaatattttgtatgcttcattgctgtctgtttaaattcctatttttattttatcactatagagtggtttgtgttttgaacaattttgcagtcatctatccatgaatgacagcaaataattaaattagaattttcatgctcacaatgtgtttatagtgttctacagt

SEQ ID NO: 120673 - DNA, 626 bp, Zea Mays
gcacctcgctgtcaccgccgccaccgcgaagcaccccagcagtcgtcaccccttcagcaccctagcagtcacacggggaaggaccccaccaccgccttccttgaggtcatgccctgcagcaccctagcagccacacggggaaggaccctgccgccgccttccttgaggtccgcacgacgcccggcctccccctccagcgatggcgaggggtagggagaaatggcggcggctaggcttacgatttcggggtcgtcctgcttcaaattcgtaactgggttaccaagaaaccccggaacctgaaggctacctatctaagtactgggacatccacatggaagttctatgttctatgcacagcttcaagagtcatcaccactgttcgagcccacggaggaagatgaggatggcgagtcaggagactggtaccgcacttgggcccgtccccacgtctggttcatgaagctctgagcatggatatgttggggatgacgagatggatgtggggacttgtgcttgtgcttcatattaattatttgcatcataatgtctatgattgttgggagcagtcttgataaaatcgtaagaagagcagatagctgcaatagaaaaaactcagtttgagatta

SEQ ID NO: 120674 - DNA, 97 bp, Zea Mays
gaccacttgtgcaaagggacaagcaaggaaaaggtgcaaaccgatctctaatggatcattgcacacaacacaggtttaggattgtagtaatgttgtc

SEQ ID NO: 120675 - DNA, 1006 bp, Zea Mays
atccggatatcagaaatttcgccgtagtaataacagtataacacacaccgccgagacagaagagagagcagcagggcccggtcgagggccgaggcgaccaaggacctccaccgtcgcggcgagcagcagcagaggacgaacgatgcttccgggcgtggagctcgcgcggcggcggcgcgtgcactaccacggcgacgtggcgtcggcggcgggcacgggggagcacgtccaccaccactacgcgcacgcgcccgcgcccgcggcggggcccgcgctcgcggcgcgcatccggctcgaggagaagctgcgcggcgccgcgctgccgtcgacggcgccgtccaggtggagcaggctgatgcgcgacgggagatcggcccgaggcaacaacagccctcgaagcagcaggcgatacgagcaggacgccgtcgcgagcggcaccgagccctggcggccgccggcccccgccgacccgacggcggccctgctgcaggtggcgtcggcgactgtgccggcgtcggcgtcgacgcggcgccggcgcgcggagctgacgcggacactgtccaaggtggacgtgtgcgcggtgtgcctggacgaggtccgggagcggtgccagcgggtgacccggctgccgtgctcccacaagtaccactccgagtgcgtcctgccgtggctcgccatccacccggactgcccctgctgccgcgcgctcgtgccgtccctcgacacgctcgtccaagtctagcggtgctcgtggtggttggcgatggcgtggcgcctgccgttggtctcgtctcttgctctgctcgcggcgggtgacggaaaatgtttggatgtttgttaggccgcagctggaactggaatgcatgtttaggacgtagtactagcatagaggaggacttgtatagatggcttggtagccagtagactactggactaggagacgagctctggaactctggtgctgtgtttgtattcaaaaccatgtgaattgcacgagttttggcaa

SEQ ID NO: 120676 - DNA, 870 bp, Zea Mays
atgtaccagacgggcgaggcgccgtcatgcatggggtacagccgtacaggtgagacccgcaatccatcactggaaggagatggccatctgggccatgaagaggttgatgacgtccaggtagagggagatggctgccaccacgtactggttgtaggcgtggcgcttcagcagcttgttggtgtcatagacgatgaagcccgagaacaccacggtggccaggacgccgtagatggtcatggctacccttcccagcgggaagcagacctggatgatgatgtacaccagcagcacgacgaggcaggcgaacaggaaggggaacgtgaaggtgaagtcgtagcccctcttgacgccccagaaggtgaagagggtgagccccaggacagcagcagctgtgaggatggtagcttgcaggaccactgtgccgagggtggtggaggcggagacggcgatgctgagactgcagcagagagtgaatacggcgagcaggacgaggttcctggggtgcttctccctgtacttgagcatggggaacatgacgatgagcggggacaggaggatcgcgatgtacgtggaccagacggcggcgggggggccggaggcgaagaagcgcgggatcgggcggacgaggcacgcggtggccgcgacggccgcggtgagcgcgaactggagggagagaatggcgtacaccttccgcacgaaggcccagcgcaggcgcggatcctcctcctccgccactttcttcgccgcgggtgcctcctgctgcgccgccgccgccgttgcagccccggagcccgcgggcacggccgcctcgaggtcgcaaggcgccgggcgcgtctccattgcgctctgtcgccggtcgccggacgctga

SEQ ID NO: 120677 - DNA, 118 bp, Zea Mays
gtatacataaagttattattttatgttggcatcatgaaattgaatgtttaatccaaagtacaatttcacaacaaatatttaaatccatcggacttttaaaataaagaggggagaaaac

SEQ ID NO: 120678 - DNA, 408 bp, Zea Mays
atggccacgcgggtggcgcggcacggcgcgcaccgcccgcacctcgcgcggcacgtcggcggcgacgaccccggccccgccagcagccaccgccgccgggcggctgggaggacttcgtcggcggcggcggcaattgccgtcgacgagtctactcgcctcctcgccagcgccgctgctggcagacggatgggccgccgccctgccgccacaaccaaggccgcggcgaagattgcggcggcgaggagggcggcggcgtggcagcggcgccggctcgtccgcctccggcagctcacggcgcccatatcgcggcgggagaagagctcgcaggcagctgcactcgctcgatcgaccgtcggtccagatccagcttcaagagcgcgaaccacgacgcgcggtgctgccccgtag

SEQ ID NO: 120679 - DNA, 2218 bp, Zea Mays
atgtggaggctgaagatcggcggcgagggcggcgggccatggctgcggtcggcgagcggcttcaccggcaggcaggtatgggagttcgaccccgacgccggtacgcaggacgagatcgccgaggttgagaggctgaggcgggagttcacggagcgccgccgcttcgacaagagggccgtggcgcaggatctcctcttgcgcatgcaggtatttgcactacatgtcactggatcactcaatacggttttatcagcagagcatcgacacgagatctgtcgctatatttacaaccatcagaatgaagatggtggctggggcatgcaagaggttgggccaagcaccatgtttagctcatgcctgaactatgtcaccttgagacttctcggggaggcgtgtgcgcagcatgacgctttggccaagggacaagcatggattctgtctcatggaagtgcggcggcaatacctcagtggggaaagatttggctctcggtgatcggtttatatgactggaacggcaataattcgatcgttcctgagttgtggcttgttccatattctctcccattccatccagggcgattctggtgtttctgtcggttgatatatatgccaatggcttatttatatggcaagaagtttgtggggccaattacaccaaccatattatcaataagaaatgaaatctataagataccatatgatgaggtcgattggaacaaagctcgagatacttgcgctaaggaagaccttctctacccaaggacgttcgtgcaaaacgtcatttggacttgtgtgaataaaatcgtggaaccattgctaaatctttggccggctaagatgttaagagatacagcactgaagaacatcatgaatcatatccattatgaagacgaaagtactaggtacctttgtgtatgcccagtaaacaaggcactaaatatgatttgttgttgggttgagaatccaaattcagatgcattcaagcggcaccttccaaggatctatgattatatatggcttgctgaagatggcatgaagttaaaggtgtatgacggcacgcaagcatgggatacagcttttattgtcaaagcatattgctcgactgacctggttcatgagttttctccaacactcaggaaggctcatgagttcataaaaagtttgcagatccctgaaaaccaacccgaccatgaaaattattaccgccatagatcaaagggttcatgggctcattcaacattagacaatggatggtctgtatctgattctacagcagaagcaattcaggcattgttgttgttatcaaagttctcttccaatcttgtgggggatcccataaaagaagaaagattatttgatgcagtggattgcttgctttcttttatgaataaagatggtacattttcaacatacgagcgtaagagaactgcatctttgttggaggttctcaacccttccgagacttttctaaacattgttgttgatcacccgtcggtcgaatgcacgtcatctgcgattcaagctcttgttatgttcagagaaatgtatccaaggtatcgcgatcaagagataaaaaaatgtattaaaggagcatctaaatttattgagagcaaacaacaaaaggatggcacatggtttggcacttggggtgtatgttacacttatgggacattatttgcagtgcaaggattagttgttgctggaagaacttatgaaaacagttcttctattaggaaagcatgtaggtttctattgtcaaagcagctaatcacgggtggatggggtgagacatatccgtctaatggaactgcggtctatgcagaggccagtagtcctcatgtagtgaatacagcttgggcaatgttggctttaatttatgctggacaggttcagcgagatccaacaccattgtatggtgctgcaaaagaactgatcaatatgcaacaagagtcaggcgagtttccccaacaagaacacattgggagcttcaattgttccttttacttcaactatggaaactaccgtaacttgttcccaatatgggctcttggagagtttcggagacgaattgttgcagaaaagaagaggaaccaacaaacatgattgttttaggcatcaacaaattcggggtgaaagcttgtaaggggctcaagtttaacatgtggtgaaagacatgtcaatatactaaagctgatgtccatctggctaaaccatatgt

SEQ ID NO: 120680 - DNA, 1345 bp, Zea Mays
cgccgtttttctcaaacctggccatcctcatctaccttgcagcgccggcgccctatcttccgctccttccgttccttgcgctcggcgcgcaggtggcggccccatctttcgcttcctcccttcctccgccaccactcaccccttgatccgttctgcctcctaaatttggcgtcaccaagcaaccccactcatgccgttctcaaaaccctacccgaccaatccgtccaattccaaggctgtcggctttgcgttatgagcgccgggtcaggggaggggcggaggatcagatcagcagccgcacgagcattgagcgatatggcttctatgtaggatgcaactggacatcgccgtccactcgtctagctattgatgctgaagtcccgatgcttcatgccaccgcgatggtggctggttgatctccgatatcaagaggagggaagaggcactgaagaatggtgcagatccacatttgtttttgcataattgctgccttagctccaccaattgtatttcatgggaaatcattaacgtaagtttgccactccttttatctaaagtaatcaaagtcattagttattatgggcttgggtaatgtgagtaagcaccattgcatagatagccagtgatgttggctgctggaaaaggagaaatcaatgaattatagattgggatcacagaacttcatagaggaaactaggttgattgttcaatatctttttaagaacacttagtatcctggataatatgtgaaacaaacaatatgtgaaacaaataagtatttaaccagccgcatagaagcatgtttgctttgtgaccctagaaaccagccaggcacaagcagcacctcgaccccctcctcgaccagatgactactgtctcgaggcgtacagtggccactcacctagcgggtgtgtctagctcgtcatcggtctccaatgccacgttcgcgctactactccaatcattgctgacccgtatgatctccactgacttccacaaggagtgcaggcaccttcggtcccatccgctgttaaggagaacacatggttatggtgttccacagactggcattttattcattcattgaaaggcttacctcgcttatggtgttccacagagtgacatgaaactattttcacttatgcaaaagatttgtgcattaagaatattttttatcagagttcactcgaggaatgcaagaattaggataggtagattagatcttttttattggtgtatcctgagtttcctctaataagaatcatgtgtcaccacctgagtcaattttactaaacatttttttgctaccagccttaaatacatactacaaatgctgatttaccct

SEQ ID NO: 120681 - DNA, 3557 bp, Zea Mays
attcggggctgatttgcccccctatggcgaggatttgagtggactcgagaggaacaagtagaggggagtcctgatttgggcccctgccgtggtatgtgccatgaggaagctcttcttctccgagtcggcctgcaaggagaccaagctccactgcgcgccccactcatggctgcccctcgagagggggaagctctccaagttctccggccatgccgccgccggctcctccatagaggcattgatgaagatgccggagccggcagtgcttccgtacttcaagcccgcgaactatgtcgacatactggctcagatacacgaggagctggagtcctgccctcctgacgagaagtcctgcctgtacctgctccagttccaggtcttccgcggccttggggaggccaagctgtcacggaggagcctccagtctgcgtgggagaaggcgagcaccatacacgagaagctcatctttggggcgtggctcaagtacgagaagaaaggggaggaggcaatctccgacctgctcagctcgtgctgcaagtgctcacaggagttcaggctgctggattttgtgtcgcaagtctccactgggtcacacatgatgaactatgatgatgatgatgatgagtctgatgagtttcggggttctgcggtggttcatttccggataagagatgatatgattgcatgcgatcgacggaaacttgcagctctgtcaactccactgtatgcaatgcttaacggtggatttagggaatcctatctggaggtcattgacatgtctagaaatggtatctcccctattggcatgagggcaatcagtaaattcagcctatcaggaagactaccttatttgtcagcagatgctatcttggagatgcttgattttgccaataagttttgctgcaagggcctcaaggatgcctgtgagcgaaagcttgcttctttcatctcttcaaggcaagatgctatagatttcatggagtgtgctcttgagctgggctgttccattcttgctgcttcatgcttacaagtgctcttgaatgagcttccagagtgcttgaatgatgaacaagtggttaggatattctcctctgcaaataaggcacagagattgacaatggttggcaatgcatctttctccctatattgccttctcagtgaagtctccgtgagtaccaacccaacatcggatgtcactgtgagtttcttggaaaaactggtagagtcggcatcagattctaggcagaagcagctggccttacatcagctggcatgcaccagatttttaaggaaagattaccctgaatctgagtgcttgttcaatgctgccttttctgctggccatctttattcgttagtgggtttggctagattggcctctctgaggggtaataagcattttgctctcaagttgctagactctgtgatgtcatctcggtggcctcttggatggatgtatcaagagagagcactctatttggatggtgataacaagttagaaaatcttaacaaggctactgagttggaccctacccttacatatccctatatgtttcgagctgcatctttgatgaaaaggcaaagtgttgaagctgcattgatggagataaaccggatccttggatttaaactggtgctggagtgcttagaactaaggttctgttgctaccttgcccttgaggattatagggctgccttatgtgacgtgcaggcaatcctcactcttgccccagattatcgtatgattggtggccgggttgctgccaagcagctgcgaatgctagtgctagagaatgtagagcagtggacacctgctgactgttggatgcaactttatgatcgctggtcgtctgtggatgatatagggtccctctctgttatatatcaaatgctggagtcagagactgccaaaggagttttgtactttagacaatctttgcttcttctcagattaaactgtcctgaggcggcaatgaggagtttgcagcttgctcgtgagcatgctgcaagtgatcatgaaaggcttgtctatgaaggatggatattgtatgatactggccactgcgaggaaggactgcagaaagcggaagcatcaattgcaatacaacggtcatttgaggcattttttctgaaagcttatgctttggctgattcgagtcttgatccttcgaccacagcaacagttgtatcacttctagaagatgcattgcggtgtccctcagatagacttcggaagggtcaagctctaaacaaccttggaagtgtttatgtggattgtgggaagcttgacctggcagctgaatgctacattaacgccctaaagatcggccacaccagagcgcaccaaggccttgcgagggttcatttccttcggaacaacagagtcggtgcgtatgatgaaatgaccaagctgatagagaaggccaggaacaacgcgtcggcatacgagaagagatctgagtactgcgagcgggagctgacgaaaacggacttgcagatggtcaccaaactcgaccctctgcgagtctacccctacagataccgtgctgctggtaagtgccgtttgcccgcttcctgctgcatggcatatctagtttcttatacttttaatacgacaaagctaggacgtgatgtgatcctagccccaccagattcaaagcaggttgaaacttagaatataaaaattcttgacacggtagtttattaattgttaatggatgtagctcatgtgtgctcaactcccaagtggttggtgctactttaacgaaccaactaccatggttcctaacataaaagctggtgagaagtcaatgtatgtagcctgccgctgcctacgttcaattttctatcagtaggtgtaacaaccataatatatttgcatccagcccacgaattagctcacccgttccttgtttttctgtttcctgctttgctgacgcggactcgttcctaactcgattattggcgcgcagtgctgatggacaaccacaaggagaaagaggccgtcgcggagctgaccagggcgatcgccttcaaggcggacctgaacctgctccacctgcgcgcggccttccacgagcacatcggcgacatctcgagcgccctccgggactgccgcgcggccctcctggtggaccccaaccaccaggagatgctggagctgcaccaccgggtgaacagccaggaaccatgagcggagcgccgccatggtgtacatacaggacgtgataggaagcccctcatagccaaccccccgccataccagtgtatgttttgtaccatacacagcatgtcaatgtaaggatagtagaaaagccactttaggtccctccctggctccctccccttgcaaaccaaacacctacattccttgtgtgcctagttagatatgttgtttgccatatagcctttcccttagtaaattattgttgtcgactgtgattaagcctcctaattgtacccgccacgtggcccgtgctgccagaatcaagaagttttgactgtaccttctgtatgtaaatgcaatgggggaaaaatgatgaatggaagcttttgtc

SEQ ID NO: 120682 - DNA, 3142 bp, Zea Mays
attcggggctgatttgcccccctatggcgaggatttgagtggactcgagaggaacaagtagaggggagtcctgatttgggcccctgccgtggtatgtgccatgaggaagctcttcttctccgagtcggcctgcaaggagaccaagctccactgcgcgccccactcatggctgcccctcgagagggggaagctctccaagttctccggccatgccgccgccggctcctccatagaggcattgatgaagatgccggagccggcagtgcttccgtacttcaagcccgcgaactatgtcgacatactggctcagatacacgaggagctggagtcctgccctcctgacgagaagtcctgcctgtacctgctccagttccaggtcttccgcggccttggggaggccaagctgtcacggaggagcctccagtctgcgtgggagaaggcgagcaccatacacgagaagctcatctttggggcgtggctcaagtacgagaagaaaggggaggaggcaatctccgacctgctcagctcgtgctgcaagtgctcacaggagttcaggctgctggattttgtgtcgcaagtctccactgggtcacacatgatgaactatgatgatgatgatgatgagtctgatgagtttcggggttctgcggtggttcatttccggataagagatgatatgattgcatgcgatcgacggaaacttgcagctctgtcaactccactgtatgcaatgcttaacggtggatttagggaatcctatctggaggtcattgacatgtctagaaatggtatctcccctattggcatgagggcaatcagtaaattcagcctatcaggaagactaccttatttgtcagcagatgctatcttggagatgcttgattttgccaataagttttgctgcaagggcctcaaggatgcctgtgagcgaaagcttgcttctttcatctcttcaaggcaagatgctatagatttcatggagtgtgctcttgagctgggctgttccattcttgctgcttcatgcttacaagtgctcttgaatgagcttccagagtgcttgaatgatgaacaagtggttaggatattctcctctgcaaataaggcacagagattgacaatggttggcaatgcatctttctccctatattgccttctcagtgaagtctccgtgagtaccaacccaacatcggatgtcactgtgagtttcttggaaaaactggtagagtcggcatcagattctaggcagaagcagctggccttacatcagctggcatgcaccagatttttaaggaaagattaccctgaatctgagtgcttgttcaatgctgccttttctgctggccatctttattcgttagtgggtttggctagattggcctctctgaggggtaataagcattttgctctcaagttgctagactctgtgatgtcatctcggtggcctcttggatggatgtatcaagagagagcactctatttggatggtgataacaagttagaaaatcttaacaaggctactgagttggaccctacccttacatatccctatatgtttcgagctgcatctttgatgaaaaggcaaagtgttgaagctgcattgatggagataaaccggatccttggatttaaactggtgctggagtgcttagaactaaggttctgttgctaccttgcccttgaggattatagggctgccttatgtgacgtgcaggcaatcctcactcttgccccagattatcgtatgattggtggccgggttgctgccaagcagctgcgaatgctagtgctagagaatgtagagcagtggacacctgctgactgttggatgcaactttatgatcgctggtcgtctgtggatgatatagggtccctctctgttatatatcaaatgctggagtcagagactgccaaaggagttttgtactttagacaatctttgcttcttctcagattaaactgtcctgaggcggcaatgaggagtttgcagcttgctcgtgagcatgctgcaagtgatcatgaaaggcttgtctatgaaggatggatattgtatgatactggccactgcgaggaaggactgcagaaagcggaagcatcaattgcaatacaacggtcatttgaggcattttttctgaaagcttatgctttggctgattcgagtcttgatccttcgaccacagcaacagttgtatcacttctagaagatgcattgcggtgtccctcagatagacttcggaagggtcaagctctaaacaaccttggaagtgtttatgtggattgtgggaagcttgacctggcagctgaatgctacattaacgccctaaagatcggccacaccagagcgcaccaaggccttgcgagggttcatttccttcggaacaacagagtcggtgcgtatgatgaaatgaccaagctgatagagaaggccaggaacaacgcgtcggcatacgagaagagatctgagtactgcgagcgggagctgacgaaaacggacttgcagatggtcaccaaactcgaccctctgcgagtctacccctacagataccgtgctgctgtgctgatggacaaccacaaggagaaagaggccgtcgcggagctgaccagggcgatcgccttcaaggcggacctgaacctgctccacctgcgcgcggccttccacgagcacatcggcgacatctcgagcgccctccgggactgccgcgcggccctcctggtggaccccaaccaccaggagatgctggagctgcaccaccgggtgaacagccaggaaccatgagcggagcgccgccatggtgtacatacaggacgtgataggaagcccctcatagccaaccccccgccataccagtgtatgttttgtaccatacacagcatgtcaatgtaaggatagtagaaaagccactttaggtccctccctggctccctccccttgcaaaccaaacacctacattccttgtgtgcctagttagatatgttgtttgccatatagcctttcccttagtaaattattgttgtcgactgtgattaagcctcctaattgtacccgccacgtggcccgtgctgccagaatcaagaagttttgactgtaccttctgtatgtaaatgcaatgggggaaaaatgatgaatggaagcttttgtcaagcc

SEQ ID NO: 120683 - DNA, 1311 bp, Zea Mays
tttggagagtagcgatttgtaaataaaatgtgtaagtggacggcttttaatccttggtcgtacactcgtactccggcccggcccggtccggcctaaacacgcattcttccttctcccaacgacggaagaaacttcctgcctggatatccatccatccaaccgctcctccctcgtccggcaggcgacgactcgattccttcctcccttcctcctcctcgtctctttcatcggcgactccgatcttctctgccgtcgccgccgccgccaagagatcgacccgaccccgagcgcccgacccgaccccccaatccaaccaccaaccgccggcgcgcgcggaagattcagatttggcccctcgccggtaagggagaaagcgaggatgggtgcgtggatgtcgcgcgtgtggttcctcatgttcccagcgcgggagtacaagctcgtcgttgtggggctcgacaacgcggggaagaccaccacgctctacaagctccacctcggcgaggccgtcaccgccgcgcccaccatcggcagcaacgttgaggaggtcgtcttcaagaacctgcgcttcgaggtctgggatctaggagggcaagaaagcctgcgcacttcgtgggcgacgtactaccggggaacacacgccgtgatcgtggtgatcgacagcacggaccgcgcccggatcaacatcatcaaggacgagctgttccggctgctgcagcacgcggacctggagggcgcggtggtcctggtgttcgcgaataagcaggacctgaaggacgccatggcacccgcggagatcaccgatgccctctcgctccacagcataaaggaccacgactggcacatccaggcctcgtgtgccatcaccggcgatggcctctacgacggcctgggctggatcgcgcagaaagtcgccggcaaggcgaccgcgagctgacgtgcaggagagcagtggttgtgtgttcatgaacggattggatttgttgaagggtaggggtggtggcagggcgggtttgtttcttcctcggcgtcacgcccaatgcttatttatgtttttttaagaaaagtggcttgaaactttgtgtctgtattccaatcaatatgaatatatgaaaattgggaaatttgcatgccatcatcaggtatgagattctgttacctgacccttgtgcaaacgcctccggtcagtgagcctcatgagtggaatcaagcttgctgtgctaaacaggagataaagccttgcattaaggtgagttgccgcctgacctgagaagaggatgcttcatcggatgagattggtctggctgctgcgac

SEQ ID NO: 120684 - DNA, 274 bp, Zea Mays
gcagctgaactcttcttcaacggtgagattgtccagaggactcccgagaggcagaggagggtggagcccgtgccacagagggcagcagacaggccggggtacaatgacagaacccgctacgcacgcaggagggagaaccagcgatgaactgtgcgataaaatcataaaaaaaatgaccacagtgacaagtcccaggtggtttcagctctggaattcaaggatcaccgagtatcacctgtattaaattggaaatctcactttacgtgcagtctag

SEQ ID NO: 120685 - DNA, 169 bp, Zea Mays
gatttagtgtcccgtgaaatgattttttgtagtgctattgtattagtttggttaattagtgactattgtattagtgtggttaattagtaatcataactaattaagttaacgaaacctaggcgtcacccgtttcggcccaacacaccttacaagcgacgcatgtgaggta

SEQ ID NO: 120686 - DNA, 1155 bp, Zea Mays
cgacctatcatggaccgccctctatatcgcagagccgaaccatgattctgctgtccaagcctctagctctttgtcttggccatctcaagttcacaacagcagggctagtagtagtagttttgacggccaggctgggccgctggggccgtggttgggtaattgttttttttgagccaaggttgcttcggaggataattgaacttgtgccggagctgtgaatcatcgccagtctggtgacagctctgtccctctttgaaaaaaaaatactccctccgtcttcttgacttgtagccgtctgggtcgtctcctatgtccttgtcgcattcctgagagttgctaccaccggcgctaggggggaagaggctgccggaagatccgccatgagcagcgatcagcagaacgatgctcctggaagctacttcgtaggccgtccaaccaacccgggcgacaagacggaagaaccgcacgcccgcggggaccagaacccggcgaccgcgcaaactcccggcgagtacttcgttgggcgtccggcgagccatccccagcaggaacaggaagcagcacagcagcaaaccactaggcagagcacaccaagcttcttggccaaatggtaatcctaatctcttcgttaccactatgcaacatggaaggcaccactagcttatcagagtccataataacttcacatcgacgttcttacaacgcgttgttactagcaagttgccgacagatcggtggtttctgatcggtttctctcttctggctccggtctgcagctgtccctgcctcgccggaggtggagctgcggaatagatcaagaactgcctcctgcagccctgctaagggcacccaacgaattgtgcgcatgagaaatggagttaatctgggatggtgatctatctttctgtatctgaattgaaacttgtgctctggaaactcctcttttttttttttcctcagtgttccacttttaatcgtttcttctgcatccttgtgcatccataccactgtcgcgtagtgcgaattggtccaaccagctgatttttgtttgtttgcccccacccccaaaaaaacgatatgtttcatttcaaaaatgtcaatgtgtatttatgtattattatttactttgcttgaggttattgtgaacttgtatta

SEQ ID NO: 120687 - DNA, 1058 bp, Zea Mays
cgacctatcatggaccgccctctatatcgcagagccgaaccatgattctgctgtccaagcctctagctctttgtcttggccatctcaagttcacaacagcagggctagtagtagtagttttgacggccaggctgggccgctggggccgtggttgggtaattgttttttttgagccaaggttgcttcggaggataattgaacttgtgccggagctgtgaatcatcgccagtctggtgacagctctgtccctctttgaaaaaaaaatactccctccgtcttcttgacttgtagccgtctgggtcgtctcctatgtccttgtcgcattcctgagagttgctaccaccggcgctaggggggaagaggctgccggaagatccgccatgagcagcgatcagcagaacgatgctcctggaagctacttcgtaggccgtccaaccaacccgggcgacaagacggaagaaccgcacgcccgcggggaccagaacccggcgaccgcgcaaactcccggcgagtacttcgttgggcgtccggcgagccatccccagcaggaacaggaagcagcacagcagcaaaccactaggcagagcacaccaagcttcttggccaaatgctgtccctgcctcgccggaggtggagctgcggaatagatcaagaactgcctcctgcagccctgctaagggcacccaacgaattgtgcgcatgagaaatggagttaatctgggatggtgatctatctttctgtatctgaattgaaacttgtgctctggaaactcctcttttttttttttcctcagtgttccacttttaatcgtttcttctgcatccttgtgcatccataccactgtcgcgtagtgcgaattggtccaaccagctgatttttgtttgtttgcccccacccccaaaaaaacgatatgtttcatttcaaaaatgtcaatgtgtatttatgtattattatttactttgcttgaggttattgtgaacttgtattaatcatgaattgtcataccgtttacaaatatatacatgcgtcaagttaaccttgaagctttttcaggtga

SEQ ID NO: 120688 - DNA, 943 bp, Zea Mays
ccttgaaagtgaatatgtgagctctaatctccataattggattaacctcataggtgtgcggtgttttcaattttaaatcactatctgtctactgacggtgagcaattgaacatcatttgttggtttagttttcacatattcacccaaaatctatttcaagtcccccctttgaccaactcattattgtttctattgttgaggtgttgattaggagcagctgattaggagcttcatcaaccaaactgtagggaaagcattatagtaccataacaacactatgtgacatatcaggtgttgatcaggagcagttgatcaggggtctcatccaccatactatagagaaagcattgtaatatcataacaacaatgtgacaggtatgctttcttgttgttgctttttgtcgtttttatatgatattcgttcttctggtaccacaacgctgacaacattggtctatgggaggtaagttgataatggaacccaagcctctgtagatgttattggttgtttcagtgttgtgatttaaaccattctaatattcattcatatcttgcatgcaaatgttggggattgtcatgcagtcctgtgtaggaaaggaatagaagtggagatgtcaaaggatcacaagccgacatatgacacatcaaaggcatcaaagatggctccctcaacggagtactacatgcgacctaggttttgggagactgggaaatgaaactacctgaaggctcgccatcgcctcttattgctaaaccagagatctgttggatgatcccgatggaagatgacgagttcctcatcattggctacgatgggatattcgtgatgaccagccagaatgttatgagcagtccgcaagggactccagaggcatgatgatttgtgttccgtcgcaacatatgggcactctactatcatatatatagaagtctgcagggtact

SEQ ID NO: 120689 - DNA, 633 bp, Zea Mays
atggtttcccctgtggaaagagtggatctacctgttaggagctcggatttgtctgatccccaagattttctgttaggggatgaacagagaatggaggtattagaaattgattggggggcaatacaaattgatgatagatgggaggaagaaggagaacaagagactgcctctgagtcattgatgtatgatcggttaggattgttagctgaagatgaacgtgaaactactgaaaggcaagagactgttacagttatcgtggataagcacacatgcacttctagtggtcgtcgaaaaacaacaacacccaccagctcatgggttgcttccctagcaatgccattccttacgaagaaaccacatatgggagctaaagaattgcaaaataccttgcaagagcagcacaattggtcttctggcaaccagcactggccatctcccaccagcaaattgacaccagaaattggcactgcttcatttccagtcgccagatacgtcgttgcttgctgttgccagtgctggtcttctggtgttgtccaaaatgaagctggccatctgcaaggaacccaggaactaccagaaactggccatctgcttgatttcagtcgccatctgcaaggaacccagaaactatag

SEQ ID NO: 120690 - DNA, 2991 bp, Zea Mays
cgacgccgagatcactgggctacgagtacggctgcgcgccggcacagccaagcgcggcagcggcgcttgcgtcgaagggaaatggttacatgataggggagagctggatatgcattgtcatgccctaaccgcgtcttactcttatctcagcacttttcgctggttgctcacctcctccgtcctcttgtttaatgccgcaggttcgccggattcatcgccccattccgctctgggctaaggttccaccagcacaaccctatggcagaagcagtgctccttgctgtcactaagattggttccgttcttggagatgaacctgccaagaccattataaacaagctgtctgaaaaaattcaagctctgagggaactcccacggaaagtggatcacataaggatgaaactaataataatgagcaaagttatacagcagattggcacagtctaccttacagatgaacttgtgaagagttggattggggaggtccggaaggtggcttaccgtgttgaggatgtagtagacaaatactcataccatcttcttcaactggaggaagaagggtttctgaagaaatttttcgtcaagggtacccattatgccattgttttcagtgaaattgctgatgaggtagctgagatagaagaggagattcagcaagttattcagatgaaggatcagtggttgcagccatcccagcttgtccctcaccctgagcaactcgctgaaatcgaaagacagcgttcccaagacagtttcccagaatttgtcaaagatgaagatctagtaggaattgaagaaaatagaaaattgctgactggatggatttactcagaagagcaggctagcatggtgataacagtttctggtatgggtggactgggaaaatctacactggttacaaacatttatgaacgtgaaaaggtcaacttcccggtacatgcttggattgttgtgtcacaggtctacacagtcgagtctttgttgagaaagctactatggaagattgggcatatgcaaccaccagtgccaagagagattgacaaaatggatgtacatgacttgaaggaggaaataaagagaaagctccagaatagaaaatgcttgattgtgttggatgatgtttgggagcaagaagtatacttcaaaatacatgatgctttccagacactccatggaagccgcatcatcattacaacacgaaaggaccatgttggtgctattgcttcctttgaccaccatcttgagctccaaccgttgtgtgggcctgatgcatttgaacttttctgtagaagggcttttcacaacaagaaggaccacaaatgccccgaggagcttaaggaaattgctggtgaaatagtgaaaaggtgccaaggcctgccactagcaattgttacagtcggcagcttgctgtcatctagaccacaaataaacatttggaatcaaacatacaaccagcttcggagtgagttgtcaaccaatgatcatgtccgagcaatcttaaatctaagctaccatgatctatctggagatctcagaaactgcttcttgtattgcagcttgtttcctgaagactaccccatgtcacgcgaagcccttgtgcggctctgggtcgcagaaggttttgttctgagtaaagaaaagaatacaccagaggaggtggctgagggaaatctcatggaattgatccaccgtaatatgcttgaagttgtagactatgatgagcttggcagggttagcacttgcaagatgcatgatatcatgagggacctggcactttgtgttgccaaagaagagaagtttggttctgcaaacgattatggtgaactgatacaggtggaccagaaggttcgtcgcttgtcgttatgtgggtggaatgttaaggcagcagctaagtttaaatttccatgtctccgtactcttgtggctcagggaataatttcattctctcctgacatggtatcctcaattatgtctcaatcaaattatttgacagttcttgagctgcaagattctgagatcactgaggtgccagcatttataggaaatctctttaacctacggtatattgggttaaggcgcaccaaagtcaagtcactcccagagtctattgagaagctcctcaacctccacactctggatatcaaacaaactcaaatagagaaactaccacgagggattgttaaggtcaagaagctaaggcaccttttagctgacaggtttgctgatgagaagcagacggagttcagatatttcatcggagtggaagcacctaaaggtctgttgaacctggaagaactacagactcttgaaacagtgcaagcgagcaaagacttgcctgaacagctgaagaaactgatgcaactcagaagcttatggatcgacaatgtaagcggtgcagattgtgataaccttttcgcgactctttcaaccatgccacttctttccagcctcctaatctccgcaagagatgtgaatgagacactttgcctccaagcccttgctccggaatttccaaagctccacaggctaattgtaaggggccgctgggctgccgagacactggaatatccaatattttgcaaccatgggaaacatctaaaatatttagcgcttagctggtgtcagcttggtgaagatccattgggggtccttgctccgcacgtgccgaacctcacctatttgagcatgaacagggtcagtagtgcaagcactttggttctttctgcagggtgctttcctcacctgaaaacactcgtcctgaagaaaatgcctaacgtcgagcagctggagattggacatggtgctcttccatgcatccaaggtctgtacatcatgtccctagcgcagctggataaggtccctcaaggcatcgaatcgcttctctccctcaagaagctttggcttctgtacctgcacgcggagtttagaacgcagtggctaacgaacgggatgcaccagaagatgcagcatgttcctgagattcgtgtctag

SEQ ID NO: 120691 - DNA, 3123 bp, Zea Mays
tttcaatttaaatttgctttacctacaatatgaccagctgtctctgttgttcagcacaaccctatggcagaagcagtgctccttgctgtcactaagattggttccgttcttggagatgaacctgccaagaccattataaacaagctgtctgaaaaaattcaagctctgagggaactcccacggaaagtggatcacataaggatgaaactaataataatgagcaaagttatacagcagattggcacagtctaccttacagatgaacttgtgaagagttggattggggaggtccggaaggtggcttaccgtgttgaggatgtagtagacaaatactcataccatcttcttcaactggaggaagaagggtttctgaagaaatttttcgtcaagggtacccattatgccattgttttcagtgaaattgctgatgaggtagctgagatagaagaggagattcagcaagttattcagatgaaggatcagtggttgcagccatcccagcttgtccctcaccctgagcaactcgctgaaatcgaaagacagcgttcccaagacagtttcccagaatttgtcaaagatgaagatctagtaggaattgaagaaaatagaaaattgctgactggatggatttactcagaagagcaggctagcatggtgataacagtttctggtatgggtggactgggaaaatctacactggttacaaacatttatgaacgtgaaaaggtcaacttcccggtacatgcttggattgttgtgtcacaggtctacacagtcgagtctttgttgagaaagctactatggaagattgggcatatgcaaccaccagtgccaagagagattgacaaaatggatgtacatgacttgaaggaggaaataaagagaaagctccagaatagaaaatgcttgattgtgttggatgatgtttgggagcaagaagtatacttcaaaatacatgatgctttccagacactccatggaagccgcatcatcattacaacacgaaaggaccatgttggtgctattgcttcctttgaccaccatcttgagctccaaccgttgtgtgggcctgatgcatttgaacttttctgtagaagggcttttcacaacaagaaggaccacaaatgccccgaggagcttaaggaaattgctggtgaaatagtgaaaaggtgccaaggcctgccactagcaattgttacagtcggcagcttgctgtcatctagaccacaaataaacatttggaatcaaacatacaaccagcttcggagtgagttgtcaaccaatgatcatgtccgagcaatcttaaatctaagctaccatgatctatctggagatctcagaaactgcttcttgtattgcagcttgtttcctgaagactaccccatgtcacgcgaagcccttgtgcggctctgggtcgcagaaggttttgttctgagtaaagaaaagaatacaccagaggaggtggctgagggaaatctcatggaattgatccaccgtaatatgcttgaagttgtagactatgatgagcttggcagggttagcacttgcaagatgcatgatatcatgagggacctggcactttgtgttgccaaagaagagaagtttggttctgcaaacgattatggtgaactgatacaggtggaccagaaggttcgtcgcttgtcgttatgtgggtggaatgttaaggcagcagctaagtttaaatttccatgtctccgtactcttgtggctcagggaataatttcattctctcctgacatggtatcctcaattatgtctcaatcaaattatttgacagttcttgagctgcaagattctgagatcactgaggtgccagcatttataggaaatctctttaacctacggtatattgggttaaggcgcaccaaagtcaagtcactcccagagtctattgagaagctcctcaacctccacactctggatatcaaacaaactcaaatagagaaactaccacgagggattgttaaggtcaagaagctaaggcaccttttagctgacaggtttgctgatgagaagcagacggagttcagatatttcatcggagtggaagcacctaaaggtctgttgaacctggaagaactacagactcttgaaacagtgcaagcgagcaaagacttgcctgaacagctgaagaaactgatgcaactcagaagcttatggatcgacaatgtaagcggtgcagattgtgataaccttttcgcgactctttcaaccatgccacttctttccagcctcctaatctccgcaagagatgtgaatgagacactttgcctccaagcccttgctccggaatttccaaagctccacaggctaattgtaaggggccgctgggctgccgagacactggaatatccaatattttgcaaccatgggaaacatctaaaatatttagcgcttagctggtgtcagcttggtgaagatccattgggggtccttgctccgcacgtgccgaacctcacctatttgagcatgaacagggtcagtagtgcaagcactttggttctttctgcagggtgctttcctcacctgaaaacactcgtcctgaagaaaatgcctaacgtcgagcagctggagattggacatggtgctcttccatgcatccaaggtctgtacatcatgtccctagcgcagctggataaggtccctcaaggcatcgaatcgcttctctccctcaagaagctttggcttctgtacctgcacgcggagtttagaacgcagtggctaacgaacgggatgcaccagaagatgcagcatgttcctgagattcgtgtctaggacacaggaaagccagatggttatttctgcagtactatgctggtatatatggtgtgtctgtgaaaaaactattttttgtaccttttcttcccttaagtcctgagttgttgtatgtggacttcacttgcagacacaaacgctcgctttgggtagctcgttagacccatatatatacgtgttgtgttggttcagttgctttaagttacttgtttgttcgaggcatttgccttctgtattgaacttcatgcaaatgatgttatgatcaaacttgtatgtccatgtattttaaatttttttacatgcctcatagaaagtatggattcccat

SEQ ID NO: 120692 - DNA, 362 bp, Zea Mays
atgaaggaactttatcattcactgactcacaattgctgcatgttttatataatgagtttttggttgatggagctcgggttgtgggtaatagatgcatccagtcagatcgtgttcacttgggaaagggtacatggattttgtgctgaacacaaacttacaaaggcacatgtcttaactcttaatacaagtttttgcttaatgagttcatgtgagtaccaatgttcatatcaaactttggtgaatattcacctttcgcataacaattcttagtttcaatagattagcgtgtttcatggacatggaatggagaagatctaccccctcctgatacatgtgtactgcctggcacgcatgttgttatt

SEQ ID NO: 120693 - DNA, 112 bp, Zea Mays
ctttctagttttttattttgttctggctgtaaagtaaacaacaatattctctgtttgacatttgagatccctaacattaagaccatgtcatggacttctcaggccaactttg

SEQ ID NO: 120694 - DNA, 596 bp, Zea Mays
tcctcgcgcgtgtgcgattctgacgatgtgtcatggtggtgcctgcgatttcaggcgtcggagaagaagcagtcgaacccgatgcgggagatgaaggtccagaagctcgcgctcaacatctccgtcagcgagagcggtgatcgcctcacccgcgccgccaaggtactggagcagctgagcgaccagtcaccggtattctccaaggcaaggtacactgtgaggtcgtttgggatccggcgcaatgagaagatcgcatgctatgtgacggtgcagggtgagaaggcaatgcagctgctggagagtggcttgaaggtgaaggagaacgagctgctgaggaggaacttcagtgacactggttgctttggatttggtatccaagagcacattgatcttggcatcaacaaattttgtttgatgtgcagtgacacgaccttgacagtcaatatgctctttcaggttattttctcctgaaaccacttcttttgccatctcctaatgttatggtcccagttacatctccattcattgcaggagatggtcccagttactttacatggttctgttggacacaatgaagccatccagatatgctatta

SEQ ID NO: 120695 - DNA, 1133 bp, Zea Mays
tcctcgcgcgtgtgcgattctgacgatgtgtcatggtggtgcctgcgatttcaggcgtcggagaagaagcagtcgaacccgatgcgggagatgaaggtccagaagctcgcgctcaacatctccgtcagcgagagcggtgatcgcctcacccgcgccgccaaggtactggagcagctgagcgaccagtcaccggtattctccaaggcaaggtacactgtgaggtcgtttgggatccggcgcaatgagaagatcgcatgctatgtgacggtgcagggtgagaaggcaatgcagctgctggagagtggcttgaaggtgaaggagaacgagctgctgaggaggaacttcagtgacactggttgctttggatttggtatccaagagcacattgatcttggcatcaatgacacgaccttgacagtcaatatgctctttcaggagatggtcccagttactttacatggttctgttggacacaatgaagccatccagatatgctattaaaaatcctgctagtcattatggctttaaactgtaccatgtctgttctattttcagctaggcagagcatgttctatttacagcaggccagcagacaccaggcagtaatgtgatgtatgagtcaattatcaggatggaaatgttttttggcagctttctcagtgaatcagtatcaccgcagaacctttttggacacctagatgtcgagagatgcccattcctgaggaatatcaatggagctacaaccttttccctctcttctgctttgccagtagctgctcaaggaggcaagggtccaatttttgaggaagggtcaggctttgagtcagcattcaagctttttcatggccgagatggaatagttcccctttcagaaagatcatatgtatctgatgaaaaccacaatgagagcattgacgtcaagttatatacttagttaggctcaatttagagtacacttatgtagagtacacttatttatattgaactgtcggagttcatacatatgtattaagttatatacttagttaggctcaatgttagcacaaacagttgatgagcaactttaaatttagaatacacttatgtatgagttatttgacaatgcttatttatgagatattgaatgttattta

SEQ ID NO: 120696 - DNA, 1209 bp, Zea Mays
aaacaagatcattatcaaaccaatctctctctctcttgcaatgaccctctcaagcgcctagggctgctaccctagaaccaagcctgcggcagaggggtataacctcgccggagaagacaactatccctatggaccgaaggtccatgacacctggtatcagctccaggttatcctcaccaccaccagccgcccatccctcaccaccaccagccgccacgccatctgccgtcgcaacgccctcccacccgccctctccaactccagatgcattcactcgactcgaagagaagtgggatcaattcattgtgatgttccaccgctacaaggagaagacagagaaggaactccaagcagcggtgcggcttcaggcggcagcgcgagggttcctggcacgccgccaggtatagtcccttcgtggggagaagcaccttgctgtggcctccagggccaccccatggccgtcatcacatgagcaggccgtggtgcgcctgcaagccgcagtgcgcgacttccttattaggcgggcggtgcggaagctgcacttgctgatcagctcatcgctgcaccaactcgcagcctgcgcgcccaaccaccaggtctcgtctatactttttgaaccccatgcagaagtcgagatctgggtatgcagctcccctgcacagccaaagagggttgtctccttcattcgggcaactgccttggtgctggacagacccaacataagaacgggctggttcctctttcacctttcatccaacgtgaagtccgcagttcagctctttccttgggatccaggaggacatagctgcagttcaaatttatattttagttccacaattattttgtattttcgtcttaaataataaaggtaagccgagatataaaaggcttaaccttaagtcgtgtcaggtaagtctatggcagctcgaggacgagctggtcctcaagggagggggagatgtcatgggcataatagggagcgagaggcaacagccaggctgggataaggctagagaataagattgagatgagctgggataaggttagagaataagattgaaatgagagaattgtgaagagttggttagcatcagataagtccaagaaaataggagttagttgagagtttgtaggagaggttggttagccatagggctatttataagccgcatggcagtagggaataaatcaagcaagatcattatcaaa

SEQ ID NO: 120697 - DNA, 192 bp, Zea Mays
gtgcatttccatactcccgtaccttgcgcaggaaggatgcaaacaaggagcggcagtggcagcgcccgggaaggacaagaacaagaagccgttcggatcatgccgccacatcattcatcacactggctgctaccacagctttcttctcctccacgggtctcggggccagtcggctcgagcagcagtgcctag

SEQ ID NO: 120698 - DNA, 3464 bp, Zea Mays
ccaacctcaagcttttactggagttcgcagtgctgctgcagcagcagcacacgcagcttcgtagcatcaggccagggcgtgggactcggaagagacgccaccatcggaggagctctctcctcgctgaacatcatttgagatggcagaggcagcactccttgctctctcgaagattgggtcctatttgggaggagaagcggctaccttcattgcaaccaaattttctaatttgatcgagctaccaaatactgtgaggcgtattcggagggaacttctgatgatgaacatctttatacgtaagacaggtgcatcctatctcagtgacgagctcctcaaggcttggatcacagaagtgagaatactggcctaccgtgtcgagaacataatcgacaacttttcataccactctcttcaattcaagcaagaccctaaagggaaaaagttggcgaatggattaagctacggtctagtgtttagtgggattgctgctgatctagctcagatagagaaggaaatagagcatgtttcgaagttgaagaatctctggttgaactcagtccatgagcttcttcatactcaagttagcagtgctgaacagcaattccctcaatacagtttgccccaaattctaaaagatgaaaacctggtggggttaaaggaagaaagagagcagttaaaggaatggttgattcccaatgcacctgtcaacatgacaaatataccagctctcaaggtggtaactttgtcgggtatgggtgggatgggaaagaccaccctgctcactagtgtgtatgataagctgaaagatatcttcgaaatccatgcttggctcactgtctcacagacatacagaagtgtcgatactttgctgaaggagctactaaagattgttagtgcctctgagcacacaactcttgttaacaatgactatcagaaggaagtgattgtaccagttgatattgatataagagacaagaaacagctgaaaccagatgtcatcgacaagatgggcatcttagacttgaagagtactttaaaagcagtcctgaaacataagagatatatagttgtgttagatgatgtatggaatcgttgtgttcacgatggaataagcgatgtgtttgaagattgtgggaaggaaagtcgcattgtcatcacaacaaggaaacaagatgtagctgcacttgccacaccaggttaccagctcaacctaaacccattagatatcaaagatgctctccagcttttctgtacaaaagcttttcccaacaaaaaccactttgattggacatcagtacttcttgaacatgctaaagatatgatgaagagatatgaaggtcttccattggaaaagtgcccactcgagcttcaagagcttgctactcatattgtaaggaaatgtgaggacttctcagtgtcaaagtgtccatctgagcttcaggatcttgcaacttataccgtaaacaaatttaagggattctcactatcagcatgcccatcagagcttcagaatcttgctactgatattgtaaaccattgtaaggatttacctctggtgaagtgtccatcagaacttcaggagattgctattgacattgtaaagaaatgtaggggtttgccgctggctattgtatcagtaggcagtaggttgtcttcaagaaagcaaatagtgccagtttggaggcagatgtgcaatgaacttccttgtgagctggaaaaagatgaccaggttcgaggaattctaaatcttagctactatgacttgccaagtgatcttcgaaactgcttcctgtactgcagcctgtttccggaagattaccacttctcaaaggacgatcttgtgcgactgtgggttgctgaaggatttgttgaaaagaaaggggacaacactcctgaggaggtagcagagggctatcttactgagctgatccaccgtaatatgctgcaacttgtggaaaatgatgagcttggcagggtgaacacatgcaaaatgcatgacattttaagagagttggcccttcacatctctaaagccgaaatgtttggtacagtaaatgattttggtgcaatggtgcagatggacacagatgttcgtcgcatatcttcatatggatggaagaagatgaaaaaaaataaatccaagttgaaatttccgcacctccgaaccctgatggcaagtgataccattgtggactatgtaccatcaatactatctgaatccaagtaccttactgtccttgagctccagaattctgatttccaggcactgcctacatctataggaaatctctttaatctgaaatacattggcctaagaaatacaagaataacgtcactgccagactccattaagaatctctccaatcttcaaactcttgatgtcaaatcaactagtataaaagctctgccacctggtatagtgaacctcactaagctaaggcaccttcttgctgacaaatttgctgataagaaccagtcagagtttcggtactttgtcggagtggacgctccagaagggctttcgaaccttgaagagttacagactcttgagactgtgcaagcaagcatggacttaccggaacaacttgataaccttttgcaactaaggagcctgtgggtagataacatcacttctgcccactgtgcagggctttttgctaccttatcaactatgccacttctttccagtttgcttctatctgcagctgatgaaaaggagacacttctcttgaaccatttcaatccaacttgcacgaagctccacaagctaattgtgagaggattgtggtctctaacaggttgtccgatacttcagaaccatggcaggtatctcaagtatcttgccctaagcagatgccattttgtaggagacccgctggtggttctagcatctactgtaccgaacatcacatatctgagacttaacaatatacctagtccacctactttggaccttctggaaggatccttcccacaactgaagacgctagttttgaagaacatgaatgatgtcagccttctgaaaattagtagcggtgcacttccagtcatagaatgtctatatatcacatcactgcccaaattgcagacagtccctcgaggcatcaaatccttgagctccttgaaaaagctctggcttctgggtctccacagtaacttcaaggctcgatgggacatggagggaatgcagaaggatctacagcatgttctggagatacgtacctaacagcagaagctttgtttttgtgtttgtcaaacgtgattgctctttctgtagtaaaagtgtcctagaatgcaactgtatccacttcaaaatccatcaagtttgcagttagacattagggattggtgcatttgtggatcatttgtcagatgattgtttccgaaataataattccgaaaacatggtttactatctttgccatcagtatgcaatctagacttgccaaagtcgatgttcttta

SEQ ID NO: 120699 - DNA, 107 bp, Zea Mays
cgtggacatattgttttcttacagctatctgaagtttagtagctgtctatcttgttttttagggatctggaataacaggagcctgatggaagcatgaagatttttta

SEQ ID NO: 120700 - DNA, 1893 bp, Zea Mays
cgggtcaacggttcacacggtcataattggaagagttcgagttgcttgattgcttctgcggatgcgcttcccccatcctcacccaaaacctaccggcaaaacctacagcccttcgtctcccacacgcactctgccactcatctctaggttgtgtacgatcatcagcgagaggagctccctcgcttatttgtctctgaaacagacatcattgcttcagttagggaatgaagggagattccagcagacaaaatagcttagaggacaactcacaaatactaagtgcatttccaagggaaccaaagctagaattcctaaaaaacatcacgaaagacttctcaagtgaacgagtgattggacatggtgtctttggagtggtttataagggcatacttcagaatggacaactggttgctgtgaagaagcttgtgcaaacatccggagttcatgatagacggtttcagaatgaggcaggcaatctccagtttctggagcacagaaatatagtcaagttacttggttcttgttaccaagtagaaaagaaattggtggagagaaacaacaaacattttctatcagatgttccagaaaagtttctatgctatgaatatctgtctaatggaagccttgacaactatatttacgatgaatcttctggaattgattggaccatgcgcttcaaaataatcttggggatatgcaatgggttacattttctgcatgaggagcgaagtgaagccatagttcatttgaaccttaaacctagcaacataatgttgggtgacgacatggtgccgaaaattgcagattttgggctttcaaggttgtttggtgaagaacaaaccagaactctcaccaaaaacgttgtgggatggataggatacattgccccggaataccattacagaggagaaatatcagttaagtcagacatattcagtttgggtgttcttattcttgaaatagtgacaggactgaagagggacctcaatattcaagacatttcttctgagttactaattgacaatgtatctaaaaattggacagaaatgtcgcatatagaatcaaagtatccatccttggaagaacaacacctactacaagtaaaaagatgcattgaacttggtttgaactgtgtggagtctgatccaaagaaaaggcctactgtaggatcaataattggtaaactcaaagaaatcagtcatgaagctagcatacacaaatttatggagaagaaactgcaactgataactgaattcccaagggaaccaaagctacacttcatagaggttatcacaggggactttgccaatgaacgtgagattggtaaaggttcttttggggtagtttataaggtataatttaatttccatcaccatcaatttgagaaaaaaatacgggacatactatctgaatattcctctgttactaatgatatcaattaatcagggagtgcttcaaaatggagaagtggttgcggtcaaaaggcttttggtagttgcaaaaactaatctggataagcaatatctgaatgaagtatctagtctgattgatctcaaccatagaaatatagtgaagctatttgggtattgtaatgaaatacaacggaaactggtggagtcccatggaacatatgtttttgcagacacagaagaaaggatactctgctatgaatatttgcctaggggaagccttgacaagtatctttacggtattctactctctcattccctctctggttgtagtggaatattggccttctgttgtattgtatgttgtatcaaacatgcatttacgcttaacagtaggctgatttatgtaacaagttgtggaaacaccaggaaaaatattatacttgtgctccatacgtttagaataaaatgtaacttcaattag

SEQ ID NO: 120701 - DNA, 2187 bp, Zea Mays
atggatctagggttagaggatcggaggaaggaggagtcggcgggtcagggaggcgcgctgacagagaggcgcgcggcggcgcgggacagggaggcgcaaggcggcggcgggggcagggagtcttggatctgtgcgcgaggcggcgacgggggacacgaagtcttggatgaatcttctggaattgattggaccatgcgcttcaaaataatcttggggatatgcaatgggttacattttctgcatgaggagcgaagtgaagccatagttcatttgaaccttaaacctagcaacataatgttgggtgacgacatggtgccgaaaattgcagattttgggctttcaaggttgtttggtgaagaacaaaccagaactctcaccaaaaacgttgtgggatggataggatacattgccccggaataccattacagaggagaaatatcagttaagtcagacatattcagtttgggtgttcttattcttgaaatagtgacaggactgaagagggacctcaatattcaagacatttcttctgagttactaattgacaatgtatctaaaaattggacagaaatgtcgcatatagaatcaaagtatccatccttggaagaacaacacctactacaagtaaaaagatgcattgaacttggtttgaactgtgtggagtctgatccaaagaaaaggcctactgtaggatcaataattggtaaactcaaagaaatcagtcatgaagctagcatacacaaatttatggagaagaaactgcaactgataactgaattcccaagggaaccaaagctacacttcatagaggttatcacaggggactttgccaatgaacgtgagattggtaaaggttcttttggggtagtttataagggagtgcttcaaaatggagaagtggttgcggtcaaaaggcttttggtagttgcaaaaactaatctggataagcaatatctgaatgaagtatctagtctgattgatctcaaccatagaaatatagtgaagctatttgggtattgtaatgaaatacaacggaaactggtggagtcccatggaacatatgtttttgcagacacagaagaaaggatactctgctatgaatatttgcctaggggaagccttgacaagtatctttacggtgcatctcatgagcttaactggaatatcagcttcaaaataatacaaggaatttgtcatggtttacagttcttacatgaatcgcaaagacccataattcacatggatctcaaacctggcaatatattgttggatgataacttaatgcccaaaattgccgattttggtttatcaaggctctttggcgaagagcaaacacgtgcactcacttcaaatgttgtgggatcaagagggtacatggctccagaatattactacagaggtgaagtctcaaccaaatcagatatatacagtctgggcatccttataatcgagatagtaacagggttaaaagtcgattctaacactgtagacttatcgtctaagaaccttatcgacaatgtacaaaggatttggacaaaaatgccgcagatagcttctaagtacccgacgttggaagcaagcaacctccaacaagttaaaagatgcattgatgctgggttaaattgtgtgagcgaaaaaccaagagaaaggccatccgcaggggaaattatcaagcagcttaacggaagcagctttccatctcgcaactagatgcttagggcctttggtctttttctagtttctgaccactaaaagctgatgcggaccgtcaatcgccttggcttttcaatcaccttttatgagaatcgtttcagtaaaaaccatctaaaattaacataaacacataaccgattaagtcgtcacaatagtaggaatatgtcactttctagattatgaactctttggaccacttcattttcttccatacgtgatctctacgatacttagattctcttcacaaccagattctttctgcagccagattctcaaaaaagctggtcagaaaaaaatgaaccaaataggccttagatcttgatctaaatcaaattcttagggcaaattttgtaaccctatttttctaatagatttctattttactaaggcttcgtttgtttcgttggaattgaattccattctaatgatcataatttagacacaaactaattgaattaaaatatttgtatatgt

SEQ ID NO: 120702 - DNA, 234 bp, Zea Mays
gttggtgattggtggtgcgagggcagctgtccacgagatgcgacggaagaagaactccggcgagtgattacgggcgcccagacgactccccagttgctacaacacctcacgggcactgctcgtaaagagacaaggtcccgggtccaaacgccgcaggcagtgcgttcacggcgcgaggatttccggcggcagcccgatgacagcggtagatcgacactctcccttccacgatga

SEQ ID NO: 120703 - DNA, 1194 bp, Zea Mays
atggcggctatcgctgaagatcgtcaaccgcagcatggcgtcaacagagaagctgcgacgaaggcggtacacacgcagttacagatggagcgtagcgacgaaggtgacagcaggagtcaagaggagggctcgtactgctactgcctggttaaaagcgtgagtcacctgagccgcaataaccgtggctttaccacgctgccagagaggtacgtcctgccgccgtccgaccgccccgacgacgacgggctcggcagggtgaagctccccgtcgtcgacctggcgcgcctgcgcgatcccgcctaccgtgcttccgagctggacacgctcgacgccgcgtgccgcagctctggattcttccaggtggtgaaccatggggtggcgcctgagctggtcgaggggttgctggacgtggcgcggcggttcttcgagcttccgctagtggggcgggcacggtacatgtcgccggatgttcgagcgccggtgaggtacggcaccagcttcaaccaggcgaaggatgccgtgctcttctggcgtgacttcctcaagttagcctgccagccgctacacgccgtcgtcgcctcgtggcctgacgaacctgctgatctcagggaagtggcagccaggtacgccatggcgaaccaacagttgttcatgcagctcatgggggcagcactggaggctctgggcatcccctgccaccgaagccagggtctgctacgggagctggaggcggggtactcgcagatcatgctcaactgctacccggcgtgcccgcagccagacctcacgctggggctgccgccgcactctgactactgtctcttcacgctcctgctgcaggaccaagtcaagggtctccaggtcctgcgccgtggccactggttcaccgtcgatgccgcccctgggtccatcatcgccaacgtcggcgaccatcttgagatctacagcaacgggctgtacaagagcatgttgcaccgcgtgcgggtgaactcgacgcagacgcgcatctcggtggcctccttccacagcgtgcctgcggagcgggtgatcgggccggcggcggagctggtcgacgaggcaaacccacggcgctacatggataccgactatgccaccttcctcaacttcctcgcatccgccgaggggaagcataagaccttcctccagtcaaggaagctgccaatgctaagctag

SEQ ID NO: 120704 - DNA, 96 bp, Zea Mays
cccttatctttcagcaattgttctccagtatacctcatatcactcattgacttgaaacttttcccatttctacatgagcacgacatgatttgtaca

SEQ ID NO: 120705 - DNA, 1960 bp, Zea Mays
gaccactcgttcctcccaactcttcttttgcttgatcattcccatatattttttgtcttctcccgtgccaccgcctcgccctcgcccctcctaccgcacccggaagctaggtttagccgccgccttctcccttttcgccgcggcggccgcaagaaccgacttctccccggagaagccccaagcaagcgacccccgcttcctctccgcgccagatctttgtttatgagctcgaaggagaagcccactcttggaggcacgcggattaagacccgcaagcggaatattgcagctcctttggaccctgcatcattctctgatgcaattgttcagatctatttggataatggtggagacctggaacttgtcgccaaaagtatcgagtcttcagacctcaacttctcacgttacggtgacaccttttttgaggtggtttttgttggagggcgcactcagccaggcactgtaaaacctgaagaaggagaccgccacccttattcggtgttagattgtgcgtcacagcgtgaagcaattttgcctttcgtactctatatccagaaaacattgcgcaggaggccttttttaataaagaatcttgaaaatgttatgcgtaaattcctgcaatccttggagttctttgaggaaaatgagaggaagaaactcgccatattcacagcccttgcattttctcagaagctatcagggcttcctcctgagactgtgttccagccattgctcaaggataatcttgttgccaaagggatagtactttcattcattactgagtttttcaaggagtaccttgaggaaaacagcttggatgatttgattgcacttttgaagaaaggcaaaatggaggacaatctgttggacttcttcccatcagctaagagatcttctgaggctttatctgagcatttcaccaaagaaggtctgactagccttgttgagtacaacgaaaagaagatgtttgaggttaaacttaaggagataaagtcaacactgactgctatgataaatgatgaggctgcaatatctgaagtgattgagactgtcaagcagcaagttaaggatgctaaatttcctgatttagaggttattcgcatgttgtgggatgtgctcatggaggctgttcagtggtctgggaagaaccagcagcaaaattccaatgcagcacttaggcaggtgaaagcttggactgagcttttgaatgctttttgcacgagtggcagactcgaactggaacttatacacaaagttcagacacagtgctatgaggatgctaagctgatgaagctgtttccggaaatcataagaacactgtatgaccaagatgtcctagctgaagatactatagtcctttggttccgtaaaggttcaaacccgaagggcaggcaatcttttgtgaaagctctggagccgtttgtcaaatggctcgaggaggctgaggaggaagaataagctcttgatttggagattggccgaatgtgacgaattatggttctcgaaaatattacctttttttttatttcgaaagctatgaaaggttgaggagttatggttgctgctagttattgccgagtttgttactggcgatagatttatgttatgctgtttaggcacttggctctcggctgcagtatgttgctgttaaggtgttgaaacttctgttatcattactgaactggtttataatgtgacgtcaatttactatgggtattgtacatcactactgggtggcgcaaagcactcgggaaagcttgcaaacctaatgtaacactcggcaaagaagaatcaatgaactgtacaacgatctctttctcgagagcattatgtcgggcactcacgaagtttttgttgagtgtcacttagtgcttagtaaaaaaaagtctcgataacaatgataggtgattgagactgtaccgagtgttttcaatagcactcaataaataaagatagcctt

SEQ ID NO: 120706 - DNA, 1638 bp, Zea Mays
cccgtgccaccgcctcgccctcgcccctcctaccgcacccggaagctaggtttagccgccgccttctcccttttcgccgcggcggccgcaagaaccgacttctccccggagaagccccaagcaagcgacccccgcttcctctccgcgccagatctttgtttatgagctcgaaggagaagcccactcttggaggcacgcggattaagacccgcaagcggaatattgcagctcctttggaccctgcatcattctctgatgcaattgttcagatctatttggataatggtggagacctggaacttgtcgccaaaagtatcgagtcttcagacctcaacttctcacgttacggtgacaccttttttgaggtggtttttgttggagggcgcactcagccaggcactgtaaaacctgaagaaggagaccgccacccttattcggtgttagattgtgcgtcacagcgtgaagcaattttgcctttcgtactctatatccagaaaacattgcgcaggaggccttttttaataaagaatcttgaaaatgttatgcgtaaattcctgcaatccttggagttctttgaggaaaatgagaggaagaaactcgccatattcacagcccttgcattttctcagaagctatcagggcttcctcctgagactgtgttccagccattgctcaaggataatcttgttgccaaagggatagtactttcattcattactgagtttttcaaggagtaccttgaggaaaacagcttggatgatttgattgcacttttgaagaaaggcaaaatggaggacaatctgttggacttcttcccatcagctaagagatcttctgaggctttatctgagcatttcaccaaagaaggtctgactagccttgttgagtacaacgaaaagaagatgtttgaggttaaacttaaggagataaagtcaacactgactgctatgataaatgatgaggctgcaatatctgaagtgattgagactgtcaagcagcaagttaaggatgctaaatttcctgatttagaggttattcgcatgttgtgggatgtgctcatggaggctgttcagtggtctgggaagaaccagcagcaaaattccaatgcagcacttaggcaggtgaaagcttggactgagcttttgaatgctttttgcacgagtggcagactcgaactggaacttatacacaaagttcagacacagtgctatgaggatgctaagctgatgaagctgtttccggaaatcataagaacactgtatgaccaagatgtcctagctgaagatactatagtcctttggttccgtaaaggttcaaacccgaagggcaggcaatcttttgtgaaagctctggagccgtttgtcaaatggctcgaggaggctgaggaggaagaataagctcttgatttggagattggccgaatgtgacgaattatgctatgaaaggttgaggagttatggttgctgctagttattgccgagtttgttactggcgatagatttatgttatgctgtttaggcacttggctctcggctgcagtatgttgctgttaaggtgttgaaacttctgttatcattactgaactggtttataatgtgacgtcaatttactatgggtattgtacatcactactgggtg

SEQ ID NO: 120707 - DNA, 1341 bp, Zea Mays
agaaatgtttatgtttatactgtattggtagaacttatttggagagtttgcatggcagtattgcatgttcatgtaatccactttattttcctcaattattattgcagaggcacgcggattaagacccgcaagcggaatattgcagctcctttggaccctgcatcattctctgatgcaattgttcagatctatttggataatggtggagacctggaacttgtcgccaaaagtatcgagtcttcagacctcaacttctcacgttacggtgacaccttttttgaggtggtttttgttggagggcgcactcagccaggcactgtaaaacctgaagaaggagaccgccacccttattcggtgttagattgtgcgtcacagcgtgaagcaattttgcctttcgtactctatatccagaaaacattgcgcaggaggccttttttaataaagaatcttgaaaatgttatgcgtaaattcctgcaatccttggagttctttgaggaaaatgagaggaagaaactcgccatattcacagcccttgcattttctcagaagctatcagggcttcctcctgagactgtgttccagccattgctcaaggataatcttgttgccaaagggatagtactttcattcattactgagtttttcaaggagtaccttgaggaaaacagcttggatgatttgattgcacttttgaagaaaggcaaaatggaggacaatctgttggacttcttcccatcagctaagagatcttctgaggctttatctgagcatttcaccaaagaaggtctgactagccttgttgagtacaacgaaaagaagatgtttgaggttaaacttaaggagataaagtcaacactgactgctatgataaatgatgaggctgcaatatctgaagtgattgagactgtcaagcagcaagttaaggatgctaaatttcctgatttagaggttattcgcatgttgtgggatgtgctcatggaggctgttcagtggtctgggaagaaccagcagcaaaattccaatgcagcacttaggcaggtgaaagcttggactgagcttttgaatgctttttgcacgagtggcagactcgaactggaacttatacacaaagttcagacacagtgctatgaggatgctaagctgatgaagctgtttccggaaatcataagaacactgtatgaccaagatgtcctagctgaagatactatagtcctttggttccgtaaaggttcaaacccgaagggcaggcaatcttttgtgaaagctctggagccgtttgtcaaatggctcgaggaggctgaggaggaagaataagctcttgatttggagattggccgaatg

SEQ ID NO: 120708 - DNA, 1720 bp, Zea Mays
caatctaagttcttgtgtcatcaccatttttgctagtaattttagaactttttgatctgatgtcatgaaaaggattagccttgtcacagtggtaaagctgcctccttgtgaccaggaggtcgcaggtttgagtcgtaaatgggtctgacactctggccctcccatacctggcaaatataccgggctgcccttttttgatctgatgtcatgaactgcagactcatgtttgtgaaaatacaggtggtttttgttggagggcgcactcagccaggcactgtaaaacctgaagaaggagaccgccacccttattcggtgttagattgtgcgtcacagcgtgaagcaattttgcctttcgtactctatatccagaaaacattgcgcaggaggccttttttaataaagaatcttgaaaatgttatgcgtaaattcctgcaatccttggagttctttgaggaaaatgagaggaagaaactcgccatattcacagcccttgcattttctcagaagctatcagggcttcctcctgagactgtgttccagccattgctcaaggataatcttgttgccaaagggatagtactttcattcattactgagtttttcaaggagtaccttgaggaaaacagcttggatgatttgattgcacttttgaagaaaggcaaaatggaggacaatctgttggacttcttcccatcagctaagagatcttctgaggctttatctgagcatttcaccaaagaaggtctgactagccttgttgagtacaacgaaaagaagatgtttgaggttaaacttaaggagataaagtcaacactgactgctatgataaatgatgaggctgcaatatctgaagtgattgagactgtcaagcagcaagttaaggatgctaaatttcctgatttagaggttattcgcatgttgtgggatgtgctcatggaggctgttcagtggtctgggaagaaccagcagcaaaattccaatgcagcacttaggcaggtgaaagcttggactgagcttttgaatgctttttgcacgagtggcagactcgaactggaacttatacacaaagttcagacacagtgctatgaggatgctaagctgatgaagctgtttccggaaatcataagaacactgtatgaccaagatgtcctagctgaagatactatagtcctttggttccgtaaaggttcaaacccgaagggcaggtagcaacacagaactgataaatgaaatgtagcaattgcctggtatttctgtcagtttctaatgattataacttaatgacaggcaatcttttgtgaaagctctggagccgtttgtcaaatggctcgaggaggctgaggaggaagaataagctcttgatttggagattggccgaatgtgacgaattatggttctcgaaaatattacctttttttttatttcgaaagctatgaaaggttgaggagttatggttgctgctagttattgccgagtttgttactggcgatagatttatgttatgctgtttaggcacttggctctcggctgcagtatgttgctgttaaggtgttgaaacttctgttatcattactgaactggtttataatgtgacgtcaatttactatgggtattgtacatcactactgggtggcgcaaagcactcgggaaagcttgcaaacctaatgtaacactcggcaaagaagaatcaatgaactgtacaacgatctctttctcgaga

SEQ ID NO: 120709 - DNA, 1774 bp, Zea Mays
caatctaagttcttgtgtcatcaccatttttgctagtaattttagaactttttgatctgatgtcatgaaaaggattagccttgtcacagtggtaaagctgcctccttgtgaccaggaggtcgcaggtttgagtcgtaaatgggtctgacactctggccctcccatacctggcaaatataccgggctgcccttttttgatctgatgtcatgaactgcagactcatgtttgtgaaaatacaggtggtttttgttggagggcgcactcagccaggcactgtaaaacctgaagaaggagaccgccacccttattcggtgttagattgtgcgtcacagcgtgaagcaattttgcctttcgtactctatatccagaaaacattgcgcaggaggccttttttaataaagaatcttgaaaatgttatgcgtaaattcctgcaatccttggagttctttgaggaaaatgagaggaagaaactcgccatattcacagcccttgcattttctcagaagctatcagggcttcctcctgagactgtgttccagccattgctcaaggataatcttgttgccaaagggatagtactttcattcattactgagtttttcaaggagtaccttgaggaaaacagcttggatgatttgattgcacttttgaagaaaggcaaaatggaggacaatctgttggacttcttcccatcagctaagagatcttctgaggctttatctgagcatttcaccaaagaaggtctgactagccttgttgagtacaacgaaaagaagatgtttgaggttaaacttaaggagataaagtcaacactgactgctatgataaatgatgaggctgcaatatctgaagtgattgagactgtcaagcagcaagttaaggatgctaaatttcctgatttagaggttattcgcatgttgtgggatgtgctcatggaggctgttcagtggtctgggaagaaccagcagcaaaattccaatgcagcacttaggcaggtgaaagcttggactgagcttttgaatgctttttgcacgagtggcagactcgaactggaacttatacacaaagttcagacacagtgctatgaggatgctaagctgatgaagctgtttccggaaatcataagaacactgtatgaccaagatgtcctagctgaagatactatagtcctttggttccgtaaaggttcaaacccgaagggcaggcaatcttttgtgaaagctctggagccgtttgtcaaatggctcgaggaggctgaggaggaagaataagctcttgatttggagattggccgaatgtgacgaattatggttctcgaaaatattacctttttttttatttcgaaagctatgaaaggttgaggagttatggttgctgctagttattgccgagtttgttactggcgatagatttatgttatgctgtttaggcacttggctctcggctgcagtatgttgctgttaaggtgttgaaacttctgttatcattactgaactggtttataatgtgacgtcaatttactatgggtattgtacatcactactgggtggcgcaaagcactcgggaaagcttgcaaacctaatgtaacactcggcaaagaagaatcaatgaactgtacaacgatctctttctcgagagcattatgtcgggcactcacgaagtttttgttgagtgtcacttagtgcttagtaaaaaaaagtctcgataacaatgataggtgattgagactgtaccgagtgttttcaatagcactcaataaataaagatagcctt

SEQ ID NO: 120710 - DNA, 495 bp, Zea Mays
acactcggcacgacgatcggcgccttaggcatggacactgaggagccgaggtgcccggggatgtcgcgttcactggcagcgctgggatgtcttccatcgtgcgtgctgaggtagatgataatgccaacgtagaaggggatgatgcttagttgggttcaactctatcctgtcctgtcagtttggatggcgaaggtggagtgttgagagcaccatagatggttccaataagagaatgagaaccagaatgtcaaaaactagggtttggaaagattggaagcctctcttcaaaatcacgaacgataagcaagttcggtatgctgctatatgtaagatttgcaatgtagagttgtttgctaagtctagtggtggtactggtcatctattgaggcatgttgctgcttgtaccggaactgtaattgctattatgtgaactgtaactgctactatgtcttcactggtgaaaaatctttgtggtctgtttcactatttgtgact

SEQ ID NO: 120711 - DNA, 363 bp, Zea Mays
atggcctccaaaggtgtagaggatgttggtggcaccggtgaagtagagcaccatcttgcttgggcccgagtgcgtcacaccttccacctgaccgtgtgcgatggcggcaatggtgaggtaccatgcggtgtaggtggtcatgaggaggccgaggaaggaccagatccggtagttgtggaaggaggggatgaacacggtggtggcgcagcaggcgccgaagatgtacgtccacgtccgcttgtcatacttgtcgttgatgtagtagatgttgcttgcacatgcgatgagctggatgacggagccgaagaggaggaaagtgcagttgaagaagaggccgacgttcctccagtgcttccccagtag

SEQ ID NO: 120712 - DNA, 631 bp, Zea Mays
accagctacccgcgaccgcaactctagcctctagagctctcccctagcgacgccaatcctagcctcaggagctcttccctgagacccggctccatcgtcttctgtgacatcgtccccttctcctcgataagtcatggcggtgagtagggtggtggcctactagcctatggtgggagtttggtttggggatccgctgacctgcatcactgtctgcttctgagtgcaaagtggaagcaatgcatgaagtcgacatgaagaagaaaaatgcaacgaactgtatctagtgcagtttaattggtgttacttgatgttggtgtttcgttgcattacagttttatgttatattgactatctgtttgcgtgaatggagatgacattgatggatggattagcttcgttacatattagatggtattcaaattaaactttgtgtgaatcatatttgtttgtgtgaatggagaccaatctgtttctgtgatgtttcatttgtttctgtttttttctaattttttgtgttcattgcgcctcattgtgtgaatggagaccaagctgttcaaagtgtttcgttgtacgaatggagaccaatcagtttgtgaatggataccaatatatttatgtgatatttttgctc

SEQ ID NO: 120713 - DNA, 543 bp, Zea Mays
accagctacccgcgaccgcaactctagcctctagagctctcccctagcgacgccaatcctagcctcaggagctcttccctgagacccggctccatcgtcttctgtgacatcgtccccttctcctcgataagagtgcaaagtggaagcaatgcatgaagtcgacatgaagaagaaaaatgcaacgaactgtatctagtgcagtttaattggtgttacttgatgttggtgtttcgttgcattacagttttatgttatattgactatctgtttgcgtgaatggagatgacattgatggatggattagcttcgttacatattagatggtattcaaattaaactttgtgtgaatcatatttgtttgtgtgaatggagaccaatctgtttctgtgatgtttcatttgtttctgtttttttctaattttttgtgttcattgcgcctcattgtgtgaatggagaccaagctgttcaaagtgtttcgttgtacgaatggagaccaatcagtttgtgaatggataccaatatatttatgtgatatttttgctc

SEQ ID NO: 120714 - DNA, 203 bp, Zea Mays
tttttttttggatagatggtgttggaaagcagttgagattaatgatttggtctctcgaacgaatccacccttttctatgcacatgttatgtattagtaatatataatgatagagagctgacagctgtcttttccacacattagattttagggtttttttgtgaggctgtgaaaaaactctttatatgaggaaaaaatatttca

SEQ ID NO: 120715 - DNA, 1792 bp, Zea Mays
catttgtggagctgcgtgtcttttcacccgcctccaccaggccaccccccgccattacgaaataaaagggcgccactgccggccatgccattagggctactaacacaatactaatcgtggagcagcgcagtcggagtcggtcgcatcgtcctgataaagtgccttcgatccatccacaagccgttgccgctcgcccctacctttttttttgcctgcaaagttttagctttcgaaagggattatagaatgtagaagaagagggccggcgggaccgggagctacaagggctactagtagtgtctagataatacacttgcacctccaatggacttcacacttcgatcagtgtcgccaacaagtagctagacgatgagcagaggagctgagaagaagaattggccgccgtctcggtcttcttcctcctcctcttcttcaccgacgtcgtcgtgggtcgccagcaggtccatggcggggttctaccgctacccgtcctccactcgcacctccggcaaggacagaacccagccgccgccagcaccagctgcaccgacacaacaacaaggcgacaagagcagcagcaagaagaagaggaggagtatcagcatcggccggagcatcacgtgcgcgggctccatctgcagtaccaaggagagctcggtcatgagccgggaccgccgcggcgcctccagcaggtcgctcagggcaccctacgtcgacgtcgacgtcaacgacgcctctgccgccgccatctccgccacgtcgtccttcaactcggagaccaccgtggcgtcgacgaccaccgtcacgtcctcgtcctcgtcctcgtccgtcgggacctccttcaggggcgtgcacatcaggaagctctccggctgctacgagtgccactccgtcttcgaccccaggagcttcggcgccgccgccttcccctgcgcggactgcgacgaggtgttcgccaaggcagagtcgctagagctccacagagcaaccaggcatgcagtttgggagctgggccccgaggacacgagcaggaacatcgtggagatcatcttccagtccagctggccggccgggaagcagcagcaggcgccggtctgcaagatcgagcgggtactcaaggtgcagagcagcgacaggaccctggagaggttcgagcagtacaaggagagcgtcagggagagggcgagcagcgaccggggcaggaagaacaaccctcggtgcgtcgccgacggcaacgagctcctcaggttccactgcaccaccttcacctgctccctcggcctcgccggcagcaccgcgctgtgccgggcgccgccgtgcaagctgtgcgccatcgtcagggacggtttcagggtcgacgacgacggtaagattgcgacgatgggcaccagcgggcgcgcccacgacatggcgcaggcggtgctgtcggagtcggacggtgacaagagagcaatgctcgtgtgcagggtcgtcgcggggagggtgaagaagaaggccagcgatgagaagaagccttcagaggactctggctttgactctgtcagccccagcacagaaggcgtctgctcggatttggatcaactctttgtcttcaatcagagagctatactgccctgctttgtagtcatatacagtggctattagggttgtagggacctaagttatagcttattagctagttttgtttcctttcactgtcacctgctcctttaatccagttctccttttttttatgggccagaagtgcaagttttggctaaaaatcaatcgcagttcctccgtcgttaccgtt

SEQ ID NO: 120716 - DNA, 2297 bp, Zea Mays
acaccaaggcacctgccaataaattttgcctactggcactccatatattagaagcaatatgaatccgtatttcttgggattcattctcccttttgtggcatctctgctgcttaccaagagaaagtccgagaagaagaggggggtgccagtcaatgtgggtggagagcctggctgcgccatccgtaaccacagatttgaaagacctgtcaagacgcgctgggaggggatttccacgcttgctgagctatttgagcaatcgtgcaagcagtttgcctctacacccctgtttggcaccaggaagctcattgcaagagaaatggtagtggctgctgatggaagatcctttgagaagctccatttgggaaactatgagtggagaagctatgctgatgcattcaaaactgtctgcaatttcgcttctggtctactgcggattggacacctcaaggatgagcgtgttgctatttttgctgacacacgggctgagtggcagattgcgttgcagaccgaggtaactactgttgtatgtggacgaaaagaatttaaaaagctgattgatataagtgggcaacttgacactgtgaaacatgtcatctacattgatgaggaaggcatctcagttgaagtgtccttggctgaaaactgtactagctggacagtcaagtcatttgaagaggtagagagtataggcttgcaaagacctgttgaagcaaacttgcctctcccatcagatactgcagtgattatgtatacgagtggaagcacaggaatgcctaagggagtcatgatgagccaccaaaatgtcttggctgtagtttcagctgttatgacgattgtgcctggtcttggcaagaaggatgtgtacctggcatatcttcccctagcacatatccttgaattggcagctgaggcaatcataactggtgttggggcttcaataggttacgggtcacctttgaccctgactgatacatcaaataaaataaaaaaggggacgcaaggtgatgcttctgtactgaagccaacgctaatgactgctgtacctgctatacttgatcgtgttcgtgatggtgtacgaaaaaatgtagatgcaaaaggtgggttagcgaagagattatttgatattgcctatagccgtcgtctagctgctgtcaatggaagctggttgggtgcgtggggactagagaagcttttgtgggatatgctcgtcttccgaaaggttcgtgcaatcttgggaggacggattcgctttattcttgcaggtggagcacctctgtcaggggaaacacagagatttatcaatatatgtcttggggctccaatatctcaaggatatggcttgactgaaacctgtgctggtgggacattttcagagtatgatgaaacatctgttggtcgcgttggtccccctttgccttgttcatacattaagttgatagactgggccgaaggtggatacttaacaaccgattcaccaatgcctcggggtgaaatagttattggaggtccaaatgtaactaaaggctacttcaaaaatgaagcaaaaacaaatgaggtgtacaaggttgatgaaagaggcatgcgatggttctactctggcgacattgggcgcttgcacccagatggatgtcttgaaattatcgaccgcaagaaggatatagtcaagcttcaacacggtgaatatgtttctctaggaaaggtggaggctactttgagtgtgtgctcatacgttgaccagatcatgatccatgctgaccccttccacagctactgtgtggcacttgttgtaactgcacagagtgagctgaaatcctgggcctcaaaacaaggaatgacatatagtgatttctcagatttgtgccacaagcaagggacagtcaaagaagtcctccaatctttggtgaaggctggtaagcaagcacggttggagaagtttgagatccctgccaaaatcaagctgataccggagccgtggacgccggagtcaggcctcgtcacggctgccctcaagctcaagagggaggtgatcaagaaggcatacgagatggaccttgcccagttgtacagtcagtgacctgccgctacagtttctcaacgataggggtgatcctggtagctaccggcaacaacagttttttttatttgtacctcgtactatgttcctgtctttcttttaagacaatagttgactggtaaatcagttgccgataatgtgtagccttccattgcccgcccaaagagaactataattagcccttatttatttggctattatcatattcacctcaattcaaata

SEQ ID NO: 120717 - DNA, 235 bp, Zea Mays
attttttgtttgtttactggcttcatataattccgaaaacacaagttttcttgaagcctcttgctcatatctctcatcaaagggtgctgcaaaattcagaacaaattagaaccattaactataatataataaaattagaatataataatataattaactataatataataaaataaaactataatataataatataataaatataatattattattattattttttgaattgcag

SEQ ID NO: 120718 - DNA, 438 bp, Zea Mays
atgacatcttgcctagagatgtcaaaaataaactgtcctgttcgttttagttgggaggacctaaatctattcctaagaaaagatgcagccacagaactgaaaagaacacctgaccaaaccccaattcatgatgtttacactgcatataggtccctgcaatattggaattccacaatctctagcatgcgggtattaagaaccaaaagaaaattaacgtatggagcagaacctgatcatcgaaggaaggctcagagtgtgatgaagcagagccagagctatcgctctccccagggctcttatccaatgacttgcgcttccagagccaactgcggcgatccatccgacaaccaccagaacattcaaagcagcaacagggaaggttggcgttgccttgccaccaccaaatgtccaaatgcggggttcatatatcagcactga

SEQ ID NO: 120719 - DNA, 1490 bp, Zea Mays
ttcttgccccctacgcagccgtgtgccgtacaccgtgcacgcacgccgctcctcgcctccctgcaccatggacgccggcgagtgctccacctccaaaccccctcagccctctgccgcctccccgccctgcggcggggaggaggtcgcgtggtgcgagatcaggcggaatgccggggacgcgtcgtccgccactattcggaaccttagctcggatgcaattattgttgatggaagaattgtcgaacaagaatgcgtagacatcaaaccaggcagtgagattgtctctggaccccagaaagaagaggcagaggatcatgaaaaaaaaaatgtcaagattgttctagatatcgagaatgcaaaatgcagcatatgcctgaatttgtggcatgatgttgttactgttgctccatgcctgcacaacttctgcaatggatgtttctcagagtggttaaggaggtcttcatctaattcacgtgataaaagccagagcgctgcatgcccacaatgtaggacaacagttcaatcagttggaaggaatcacttcctgcataatattgaagaggctatattgcaagctttttcctcactacagagatctgatgaggagattgcgttgttagagtcgtatgcttcagttttgggtcaacagaaaaaccaatcaaggaaaagacgtttttcacgttctagtgatgataccgacaattcagatctaccatgtcctcaatgccgtaatgaatttggtggatttagatgcagcccaggatctgtgcacttgcaatgcagtggatgtggaggaatgatgccagccagatctaacatcagtataccacaaaaatgcttggggtgtgataaagcgttttgtggggcttattggtattcgcaaggtgtgagttcaagtcattgcaatctgatctgcaaccaggatactttgaagagtatttatcagcgacatatctctgcacttcctgacacaattcatgggggcaatccatatgaaaaagatattacagaaagatgtatacagcaatcaggcaaaacattgcaagttgtaatctcagagtggatatcaaaatttgacaacatggaaattgatcgttcaaggttgcaattgaataatgtggatgcaattacttccaggacatatatctgcaaccattgctacagcaagtttgttgatttcctgctctactggttccgtgtatcattgccccaaaatcttcttccacgtgatgctgcggagagggagagctgctggtacggtttcatgtgccgcacccagcaccatcggcctgaccacgccaagaagctgaaccacgtgtgtcgcccgacaagaggcaaccagccctagtgagacttgactgtttctgtcaccattgtcatcaccatccattgtatgtgtgtgtcatcaaaatggtcaggaagtgtggcgcgtccatgtttggaaccctttttggtttgatcctggctggacctgacaaggaaattatatt

SEQ ID NO: 120720 - DNA, 1622 bp, Zea Mays
ttcttgccccctacgcagccgtgtgccgtacaccgtgcacgcacgccgctcctcgcctccctgcaccatggacgccggcgagtgctccacctccaaaccccctcagccctctgccgcctccccgtcctcccccaccgtatgggctaggctggtgcccgccgattccgcgtgcccgacggtggaggtggccgaagacgactccgtggtctgctccctcgttgcgccgccctgcggcggggaggaggtcgcgtggtgcgagatcaggcggaatgccggggacgcgtcgtccgccactattcggaaccttagctcggatgcaattattgttgatggaagaattgtcgaacaagaatgcgtagacatcaaaccaggcagtgagattgtctctggaccccagaaagaagggcatttaatatatacatttgaaattacagaggcagaggatcatgaaaaaaaaaatgtcaagattgttctagatatcgagaatgcaaaatgcagcatatgcctgaatttgtggcatgatgttgttactgttgctccatgcctgcacaacttctgcaatggatgtttctcagagtggttaaggaggtcttcatctaattcacgtgataaaagccagagcgctgcatgcccacaatgtaggacaacagttcaatcagttggaaggaatcacttcctgcataatattgaagaggctatattgcaagctttttcctcactacagagatctgatgaggagattgcgttgttagagtcgtatgcttcagttaagtcgaatatgaaaaaccaatcaaggaaaagacgtttttcacgttctagtgatgataccgacaattcagatctaccatgtcctcaatgccgtaatgaatttggtggatttagatgcagcccaggatctgtgcacttgcaatgcagtggatgtggaggaatgatgccagccagatctaacatcagtataccacaaaaatgcttggggtgtgataaagcgttttgtggggcttattggtattcgcaaggtgtgagttcaagtcattgcaatctgatctgcaaccaggatactttgaagagtatttatcagcgacatatctctgcacttcctgacacaattcatgggggcaatccatatgaaaaagatattacagaaagatgtatacagcaatcaggcaaaacattgcaagttgtaatctcagagtggatatcaaaatttgacaacatggaaattgatcgttcaaggttgcaattgaataatgtggatgcaattacttccaggacatatatctgcaaccattgctacagcaagtttgttgatttcctgctctactggttccgtgtatcattgccccaaaatcttcttccacgtgatgctgcggagagggagagctgctggtacggtttcatgtgccgcacccagcaccatcggcctgaccacgccaagaagctgaaccacgtgtgtcgcccgacaagaggcaaccagccctagtgagacttgactgtttctgtcaccattgtcatcaccatccattgtatgtgtgtgtcatcaaaatggtcaggaagtgtggcgcgtccatgtttggaaccctttttggtttgatcctggctggacctgacaaggaaattatatt

SEQ ID NO: 120721 - DNA, 1637 bp, Zea Mays
ttcttgccccctacgcagccgtgtgccgtacaccgtgcacgcacgccgctcctcgcctccctgcaccatggacgccggcgagtgctccacctccaaaccccctcagccctctgccgcctccccgtcctcccccaccgtatgggctaggctggtgcccgccgattccgcgtgcccgacggtggaggtggccgaagacgactccgtggtctgctccctcgttgcgccgccctgcggcggggaggaggtcgcgtggtgcgagatcaggcggaatgccggggacgcgtcgtccgccactattcggaaccttagctcggatgcaattattgttgatggaagaattgtcgaacaagaatgcgtagacatcaaaccaggcagtgagattgtctctggaccccagaaagaagggcatttaatatatacatttgaaattacagaggcagaggatcatgaaaaaaaaaatgtcaagattgttctagatatcgagaatgcaaaatgcagcatatgcctgaatttgtggcatgatgttgttactgttgctccatgcctgcacaacttctgcaatggatgtttctcagagtggttaaggaggtcttcatctaattcacgtgataaaagccagagcgctgcatgcccacaatgtaggacaacagttcaatcagttggaaggaatcacttcctgcataatattgaagaggctatattgcaagctttttcctcactacagagatctgatgaggagattgcgttgttagagtcgtatgcttcagttaagtcgaatatggttttgggtcaacagaaaaaccaatcaaggaaaagacgtttttcacgttctagtgatgataccgacaattcagatctaccatgtcctcaatgccgtaatgaatttggtggatttagatgcagcccaggatctgtgcacttgcaatgcagtggatgtggaggaatgatgccagccagatctaacatcagtataccacaaaaatgcttggggtgtgataaagcgttttgtggggcttattggtattcgcaaggtgtgagttcaagtcattgcaatctgatctgcaaccaggatactttgaagagtatttatcagcgacatatctctgcacttcctgacacaattcatgggggcaatccatatgaaaaagatattacagaaagatgtatacagcaatcaggcaaaacattgcaagttgtaatctcagagtggatatcaaaatttgacaacatggaaattgatcgttcaaggttgcaattgaataatgtggatgcaattacttccaggacatatatctgcaaccattgctacagcaagtttgttgatttcctgctctactggttccgtgtatcattgccccaaaatcttcttccacgtgatgctgcggagagggagagctgctggtacggtttcatgtgccgcacccagcaccatcggcctgaccacgccaagaagctgaaccacgtgtgtcgcccgacaagaggcaaccagccctagtgagacttgactgtttctgtcaccattgtcatcaccatccattgtatgtgtgtgtcatcaaaatggtcaggaagtgtggcgcgtccatgtttggaaccctttttggtttgatcctggctggacctgacaaggaaattatatt

SEQ ID NO: 120722 - DNA, 238 bp, Zea Mays
ggtcgcggcccatgggcgggcacgagcacagtccgtttaaggcaggcacgaaatggcccatatagaggcacggaaaggcccatatatttattaaaatcacacttcattcgacactttcatgtacttgataaagaacacaaagctagagataatgttagttagatgttttttgtagctttgaattagagtatgtgatgtaattttatttttgttatgaacattagataatgaaatgaac

SEQ ID NO: 120723 - DNA, 1406 bp, Zea Mays
cgccgtgagttctccatcgtcgtcgcgttatccttcgcgcggaagccgggcgccgctacctccgaccaagagcccccgattgaagggcgccgcctgtcaattagagcactcgaatgaaggcctgcagagtccgccgcatccgcaggccgtccccctttgtgccctctaggaggtacgcaatccgcggcggctcggcatcggagtcgtcagagttgacggcggcggcgtcggggttctcgtcgtcgctgtcgctggcggcgttgccttccagcagacggttcttgattcccgcctcgacggagggggcgccgccgcctgacgacgagccgtcgtcgtcccagtcggcgagggagaccacgttgaacaagaccgctagtggaggagagtcggatgatggctgaggtgcagaggctccagagcgcgggagcatccatccccacggagctcgaagcgacagcgatgccgggcaagtcccggccactgcccaagagtgggcgcctcacgacggtcgcgtccaagcgaggaggaggaggagcagcagcagccagcaagcagctgcataggcagaaaaccgagcgccatttggatgacggcatctcgattgaccagcttcacaagctcagccagaagaacatctccgcgtggagcatgaagaggctgatgaagatcgtccggtacgaggcgctgacaaccatggacgagcagctcaagcatgcaacgggcgaggacgagctggcgacagagatacacagcgagtacgaggccaaggttgcggccaagaggatcttccagaacgtcgccaagcctggatccaagcacatatacctgtcagatttgatgcgtttcatgaggcaggaagaagctctgaaggcgacggatctcttcgaaggagcgcaggagcacaacagggtcagcaagaggtcgctcaagaactgggtggtaaatatctcagacgtacgcgcgacgaggacaaggcccagccccggcgtagagctacgagggcgagatcgcgaggccgccgagcacggccagccaccttcagcacggctccgctcctccccagtgaagcacttcgcgcgcggcggcgctgatctcttttcggtaggcggtggcaggtgaactgaagctctcatcgcgatggaaaactcacggcgacaacgtcgggggacggaagccggtgtcaacgacgctaatactggtctaatctattaatggagtcttcatgtctattttagagtgtgggctttgccctaccttttcataacagcgaatctctctccttagcctctgtttcgtcgaaaccgccccgtggtgtttcataatggcagatttctcgagatgtcacgcctttactatataacatgagttctgtacaaaataattaaataaatatatcatatgaagac

SEQ ID NO: 120724 - DNA, 117 bp, Zea Mays
aggggtttaaacctcagtgttatggcttgtaagggctttggcctgacttttttcttcttcttaaatataatgatatgcagctcccctgcatattcgagaaaaaaagaagtaccacaa

SEQ ID NO: 120725 - DNA, 681 bp, Zea Mays
attccactccatgggcgcaagtttacttggtctaatcagcagaatcagcctactcttgtcaaacttgatagagtcctgtgctctattgattgggaggagttgtttcctggtgcagtgttacaaagtgcggcttctgaagattctgatcactgtcctttattattgggtctcaaagtttgcaaaggtgttaaaaggcgcttccattttgaatccttctggacgaaaattgaagggttccacgaagtggtgcacaacgcctggaattcggttcctgttggccactgccctttctccacttttgatttaaaacttaaagggacagccaaagcccttcaaggatggagcagcaagaaggtggggcacattgagactcaactgcatcttgctagagatttgatccatcaacttgagattgcgcaggatggtcgtattctgtctgtgttggaaaggtggttgttaagtaaattgaagaagctcgctctggctttggcctctaccaagcgtaccattgcccgccttagatcaagaatttcttggctcaaggaaggagatgcaaattctaagttgttccattcctttgcacggtacagaaagaagaaaaatagtgtatccaagcttactgttggaaatcaagtccttaatgctcataacgacatagttgcagcagtggatcagttttac

SEQ ID NO: 120726 - DNA, 342 bp, Zea Mays
gttcttcggagatatggatcctcagtccagcatgcctcctcttcgccatcgggctcatttcttttgatcgcagtttttcatcattacacttttcgtctttaggctgaatcggtcagtttggctttgtattcggttcttggtggctctccggcgggtttccatgttgttgaagaatcagaccgccattttcgtttttccatcgcctctaagaaagttggcttcatggtcctggctctaaaacgcatcatctctacaagctttgatgtctatttcgctctttggagaaatgggagtccaaattggagaaaggaatatgctctttggtgcaaaaaaggaggatga

SEQ ID NO: 120727 - DNA, 1331 bp, Zea Mays
ctatcacctaaaatctaggatatattattccccccaaaacaaaccctaaccggccggcccaattctcacgcgctcgccgcctaggagcattcacgttggcggcgggcggcggctcggttcctctcctccaccgcacctccaagaatccacctccacgactgagctgacggctcggtagcgccatggcagttcaccggctccaaccttccccatccggcctacagtgctccaccgcccggtcgccagtgctcctccatgggccacggctgacgggtgcacgcaccgggcgacgagcacccaccaccggttatgtgcaccctctctccttcggtccttcctccctttcttccgtgctaagccaccgagcacccaagcggtttggcctgatgccacatctctggtaggagaggtggatttggtggacctagattcgatgtgcagagagcgacttggaggtggctgacatcttcaagcactgcatcatgcagttacaactactgttggccatacagggaaatgctgggcctattataccaattgttcaaagcatggaccttgtataattacatgtttttatcatagatagattaatttctgaaatgcccatagattggtatatttgtggaaatttatttgccaactgtaagcccgtcgtgatgcatagaacatttgtggtataagatttttctgttgatgtttgcaggttatttttccagcacttgacattcgagtgaaaaatgtcgcagggacatattctcttgaacataaaggagaaaatgatctcttcgcacatcagacaaggcttctactctttcagaagaaagtcatttttaggagaatcgtgaacaaaatgaccagatgtttaggcctggttggaaggacatttttcgaatgaatcagagtgagctcgaggctgagatttgaaaaggtctctcgagattctactcttgatccaaggaggaaggcctatctgatccaaaatctcatgaccagccgttggatagttgctcagcaataatcaccacaaccaagcgtcgaaggacataatggatgtacacgatgacctggatgtgttccttcgtaccgagacccagggaaacaaatatttgggctgtgagcattacaaaagaaactgcaagcttgttgctgcatgctgcaataagctattcacttgcagattctgtcacgataaagttagtgaccatacaatggacaagtatcttcaccacaaccattcattttaccgtccacacctttcctgctgagggatgctttcaaggatttcattttaacatcgaaccaatatcaattaagcatggcattttatttgg

SEQ ID NO: 120728 - DNA, 1708 bp, Zea Mays
ctatcacctaaaatctaggatatattattccccccaaaacaaaccctaaccggccggcccaattctcacgcgctcgccgcctaggagcattcacgttggcggcgggcggcggctcggttcctctcctccaccgcacctccaagaatccacctccacgactgagctgacggctcggtagcgccatggcagttcaccggctccaaccttccccatccggcctacagtgctccaccgcccggtcgccagtgctcctccatgggccacggctgacgggtgcacgcaccgggcgacgagcacccaccaccggttatgtgcaccctctctccttcggtccttcctccctttcttccgtgctaagccaccgagcacccaagcggtttggcctgatgccacatctctgatggttggtgcaggtaggagaggtggatttggtggacctagattcgatgtgcagagagcgacttggaggtggctgacatcttcaagcactgcatcatgcagttacaactactgttggccatacagggaaatgctgggcctattataccaattgttcaaagcatggaccttgtataattacatgtttttatcatagatagattaatttctgaaatgcccatagattggtatatttgtggaaatttatttgccaactgtaagcccgtcgtgatgcatagaacatttgtggtataagatttttctgttgatgtttgcaggttatttttccagcacttgacattcgagtgaaaaatgtcgcagggacatattctcttgaacataaaggagaaaatgatctcttcgcacatcagacaaggcttctactctttcagaagaaagtcatttttaggagaatcgtgaacaaaatgaccagatgtttaggcctggttggaaggacatttttcgaatgaatcagagtgagctcgaggctgagatttgaaaaggtctctcgagattctactcttgatccaaggaggaaggcctatctgatccaaaatctcatgaccagccgttggatagttgctcagcaataatcaccacaaccaagcgtcgaaggacataatggatgtacacgatgacctggatgtgttccttcgtaccgagacccagggaaacaaatatttgggctgtgagcattacaaaagaaactgcaagcttgttgctgcatgctgcaataagctattcacttgcagattctgtcacgataaagtaactcaagaggtccacttattgactcttatgaccatgtaattggtgttaatacaactacattaacatgtaaaggttggtagatctggaaggtcttgatggtctaatacctatctatgagtacggaagaaaaggcgggagaagtcggtctctgcagcatcgcgcgtgaaaaaaaatcagccaattccacgagcattgatgttgtcatgacttcaaaagaggagagaccatgctaagaataatgcattatgacatttgtcaggcttacatatcgactgtttgatatggatagatgtataggtttatgaccaatccagttcaaagcaattggagtatagaagaaataaggagaaacaggaaagctctgtacatcttgcattttgctgttgtttgtcgaagtttcaatgtctgtcgcgtgacaaaatatagttgtaatttatattttggcatgcacgaaacaggtgtatttattcatttttgaacgaaattttatgtcaaatcc

SEQ ID NO: 120729 - DNA, 1300 bp, Zea Mays
ctatcacctaaaatctaggatatattattccccccaaaacaaaccctaaccggccggcccaattctcacgcgctcgccgcctaggagcattcacgttggcggcgggcggcggctcggttcctctcctccaccgcacctccaagaatccacctccacgactgagctgacggctcggtagcgccatggcagttcaccggctccaaccttccccatccggcctacagtgctccaccgcccggtcgccagtgctcctccatgggccacggctgacgggtgcacgcaccggttatttttccagcacttgacattcgagtgaaaaatgtcgcagggacatattctcttgaacataaaggagaaaatgatctcttcgcacatcagacaaggcttctactctttcagaagaaagtcatttttaggagaatcgtgaacaaaatgaccagatgtttaggcctggttggaaggacatttttcgaatgaatcagagtgagctcgaggctgagatttgaaaaggtctctcgagattctactcttgatccaaggaggaaggcctatctgatccaaaatctcatgaccagccgttggatagttgctcagcaataatcaccacaaccaagcgtcgaaggacataatggatgtacacgatgacctggatgtgttccttcgtaccgagacccagggaaacaaatatttgggctgtgagcattacaaaagaaactgcaagcttgttgctgcatgctgcaataagctattcacttgcagattctgtcacgataaagttagtgaccatacaatggacaagtaactcaagaggtccacttattgactcttatgaccatgtaattggtgttaatacaactacattaacatgtaaaggttggtagatctggaaggtcttgatggtctaatacctatctatgagtacggaagaaaaggcgggagaagtcggtctctgcagcatcgcgcgtgaaaaaaaatcagccaattccacgagcattgatgttgtcatgacttcaaaagaggagagaccatgctaagaataatgcattatgacatttgtcaggcttacatatcgactgtttgatatggatagatgtataggtttatgaccaatccagttcaaagcaattggagtatagaagaaataaggagaaacaggaaagctctgtacatcttgcattttgctgttgtttgtcgaagtttcaatgtctgtcgcgtgacaaaatatagttgtaatttatattttggcatgcacgaaacaggtgtatttattcatttttgaacgaaattttatgtcaaatcc

SEQ ID NO: 120730 - DNA, 629 bp, Zea Mays
tgtcattgtgtgaagaatgtttggtggttagtctgaccacatgtgttagttgaatatgagtgccgagcagtagcatgcatataagttccactgcattcaatatttacattttttttcttatttccaggtaactcaagaggtccacttattgactcttatgaccatgtaattggtgttaatacaactacattaacatgtaaaggttggtagatctggaaggtcttgatggtctaatacctatctatgagtacggaagaaaaggcgggagaagtcggtctctgcagcatcgcgcgtgaaaaaaaatcagccaattccacgagcattgatgttgtcatgacttcaaaagaggagagaccatgctaagaataatgcattatgacatttgtcaggcttacatatcgactgtttgatatggatagatgtataggtttatgaccaatccagttcaaagcaattggagtatagaagaaataaggagaaacaggaaagctctgtacatcttgcattttgctgttgtttgtcgaagtttcaatgtctgtcgcgtgacaaaatatagttgtaatttatattttggcatgcacgaaacaggtgtatttattcatttttgaacgaaattttatgtcaaatcc

SEQ ID NO: 120731 - DNA, 1237 bp, Zea Mays
tcgtcccgatgccatatggatttctctatcgacacagttcgcaataatcaactcgtttctctccgattgctcctccgagtccgagactccgttctctcccgcatccaccgccgtctcatccccaatccgagcaacgcctcccctcgcctccaaaaccctacccctcctgtcaccggcgggggcatgaaccggtgatcgcttacctggtctcgtctgtctgcgcacgcgcgaggtcagtgagtgagcattgcggtggtccgatcgcccgcggggggccatggcgtctgtggcgggatcgggcggcggggcaagcgcgggggccggtgggttgaagacttacttcaagacccccgaggggcggcacaagctgcagtacgagaagacgcactcccccgccgtcgtgcactacaaccacaacggcaagaccgtcgcccagatgacggtggcatatttgaaggagaagccagcaggccagggttccacgccttcaacaccaagtgctggtagtgggatgcggtctgcagctgcgagactgcttggcactgggaatggtagccggacacttagcttcgggagcaatggtaccagcagggctgtctcaggaagcagccgcatgggtggaggtattggtgtgtcaactagtgcaagtggatcgcaaggcatggcgaactacgatggaaagggctcatacatcatattcaatactgcggatacgctcttcatcagtgatctcaactcacatgacaaagatccaataaagtccatccacttcagcagctcaaacccgctttgccatgcatttgacccagaggccaaggatggacatgatctgctcattggggtgttctcaggagatgtctattcaatgtcactgaggcatcagttgcaagatcctggaaagaagcctgtttcataccagcattttgttaataaagacaaagacaaagataaagatccaagtcaagttgatgcccattctctcccggttttagcggttgatgaggtggtagctcctggatctcctgactccactgctcaggacgtggactgggatccagttgacgcccattctctcccgttggtctcggttgatggggtggaggctcctggggttcttgttggcactgttactagtgagcctgttgttcagctggtgtctactgttctatctatgtcagctgcaccgcctggttctgggaatcaggtgactgaggtccttccggtcagagtgatgtga

SEQ ID NO: 120732 - DNA, 435 bp, Zea Mays
atggatgcttttctttacatagttatgaaatttcagtgcacctgtgttgcatgggttccggagcgtgaaggaatttttgttgttagtcatgctgatgggaatctgtatgtgtatgacaaattcaaggatggaaatactgattggacatttccaactgttaaggatcaaagccaggtgctaatttcacatgcaaagtcgagtaagggcaatccaattgcaaggtggcacatctgtcaaggtgcaatcaatggcatttccttttcaccggatggtgcttacttggcaactgttgggcgagatggttatttaagagtatttgacttcacgaaagaacaactaatatttggtgggaaaagttactatggtgcactgttgtgttgctcttggaggttgtatacatttttaacttgtgtagtcctgatgactgatgagtaa

SEQ ID NO: 120733 - DNA, 599 bp, Zea Mays
aggatacccaactgcttctctgggatctggcattggacgagattgctgtccctctacgccatccttccggtgggtcaccgacattcagtagtggaagcccttctgcacactgggataatgcatgccctccaaccggtgttctccaaccctctccacggatgcgagatgtgccgaagctctcacctctcgttgcacaccgggtacatgtagatcccctatctggcttggaattcaccagtgaatcaattgtcactatatgccgtgaggggctaatcaaaatttgggcacgacccatccatagtgaaaacaaccagcagccagattcttctgaacaggttataggcagtgccactgctaaggataagatgttaacatcgtcaaataaagcagagtagcttgggaaggcttgcagtaaaggattgaagaggctttgctagcatttttgttagccatttcttatcctgcttcatcggcaacgtttctagttacagaagtgtcattgttgccatcaatgttggcgaaagaaaataacagaacttgctcctgtacatatacagacattgccataagatgaaatattacaagcttactggtttgat

SEQ ID NO: 120734 - DNA, 823 bp, Zea Mays
atggcactgacagtgttggagaccaccgagcagcagctcctcccgtgccagcagtccgtcgagcagggactctcgtgcctgggctgcggcgacgacgagcgcgggggaggaggaggtggccccgcacacggccccgcccagggcgttcccgccgccgctgccgtcgctggcgcggcgcaggtggagcccaccaccatggagatctccaccacacatggatttctccggcgggggcggcggccgcagccgcgccgagccgagccggcccggtggctcgagatcgcccggaagctactcgccgcgcgagacctggtcgtctgcaagcgactgcccaacttattatactgaacagttattcctgaaaaactaaccacactatgaccagcaggggagaaagcattggtctgatccacactagggttgttccttgtatgtccagtgccaaccagcgttgccttgctgcttgtatgtgatgcagcctgagtgaaatctttctgctgttttgaaagcacttcagtcaacagcaaagatctctcctcactctcaaatgtaagccatactctcagatcacgtgggaagtaacttctccactttgatagttgcaaaagagtaaatggaccctgaacattcccagaaggatccttgtagtgccagactttctccggctccgtgtcatttgacattgttactccagaagatgaaagtgatccagcttcatacatagttctgtttgctgtgctgttctccaaacttcttgctcctgatccacatattgtactttttgttgacaaattttttggatggtggctacaatcagaaactt

SEQ ID NO: 120735 - DNA, 2294 bp, Zea Mays
tttcgttgaagccgcatccgtcgcgtttcataatgtcaaatctctcgcgagcgaggcagacccacgggccgcggccatctcacggtggaagcagccaagcagccggcctggcgcccctccccttccgtcccgccgctgctgccgtgcctcgtgcctgccagcggcggatgccgccccgccccgctgctgaccaccgccgctgctgagcatggccgccgctcccgcgggcgctcagaaccgctgcgtcttcgttggcaacataccatatgatgcgacggaggagcagctcgtgcagatttgcgaagaagtcggcccagtcgtatccttcagattggtgattgacaaagagaccggcaagccaaaaggttatggcttttgcgagtacaaggatgaggaaactgctttaagtgcacgccggaaccttcagggttacgagattaatggtcgtcagttacgtgttgattttgctgaaagtgggaggaacactgatagaaatagagaaaagggtcgtggaggaccagggatggcatctaatgttgatagtcaaaaacggttagctgggacttctgttgttggagagacaaactttcatcagcctgttggtctcccaccggcaatacatgctgcatctgtgatggctggtgtccttggtggagctcagactgcaaatgttcaaaacggtttacctgtccagtatggacttggaaacgaccctcttactcattatttggccagaatgtcaaggcatcagttgcacgaagtcatggctgaattgaagttcctaactactcaaaacaaagaacattccaaaactttgctgcaaggaattccacagctgccaaaggccttatttcaggcacaaataatgcttgggatggtgacaccacagatgatgcagatggcaaagagccaacagccgttgggctccttagcacaatcttcatctcacctcaatgagccatatccacagccagagccagatgctatggttccagtagtctcaagaccatcaagtttgccaactaacgtactaccaaacccagttatcctacaggaacaaacagctgcaatacatagttttcctcagcatcaacatgcatctcagccccaagtcaaaatgtttccacatggacaaccgtctgggatcaccgcacaatctccaatgctacatcagccccttggtggttcttccagtgttcctattcaatctcttgtgacctcagtaggcttaacctcacaggttcagcctccatttgtgccagagcaccctggaccacctgtcatgcctacaagtgtacaacagctacctttgacccaccctcatcttgctctggtagccgccgcacctgagactctaccaaatgaaataagggttgctgatcaagcaagtcatttgacagagtttactcatccttcaaaattgagaaaattggaggatggaacctcggtgcctggaatggtgaacagcagccatgctatttatacagctccactgcaagcagtgggccctagtggaccatcagggagctatagtgctggtgctggtagcttacaacaaccagggaatgaagggcagattacgcctgatgtggagtcagctcttctgcagcaagtcttgcagctgacacccgagcagctgagttcgttgccaccagagcaacagcagcaggtgattgaactccagaagatgctttcagctggtaaatagaagcaaccgagctagtgcagcaatattgccggtcgaggatctggcacgtcacataatggcgagttggcaactagtggaagctggaagtgatcctcagatttgttatcaagtcactaggccgcttcataacctgtcagcattttcttgtgggcatcttgatgccatcagttttgctcagaagtatccatatggctttctttcttcagatcagagataaaagaaatgttacaggagatggtagtttaaagaaagggatacacattatccatcactgctgtatcattatagggagaaaataacaataatctgtatccaaaggagctgtttttttttctgcttctccaaaatgggatatagcatcagatttttgtcctttccatttcgtgcaacagttgcaggtaggaaatgaattttgcgtaagcttgttatgttatcgagtagcatcctttatatttattctttatatcccttctttttctttatatcccttctttaccatttcttctaatgctccgtttggatatcggtattggaggacatgaagttgaattgatttcaataccaaatcagctatgatattaaaatg

SEQ ID NO: 120736 - DNA, 585 bp, Zea Mays
aatgtcaaatctctcgcgagcgaggcagacccacgggccgcggccatctcacggtggaagcagccaagcagccggcctggcgcccctccccttccgtcccgccgctgctgccgtgcctcgtgcctgccagcggcggatgccgccccgccccgctgctgaccaccgccgctgctgagcatggccgccgctcccgcgggcgctcagaaccgctgcgtcttcgttggcaacataccatatgatgcgacggaggagcagctcgtgcagatttgcgaagaagtcggcccagtcgtatccttcagattggtgattgacaaagagaccggcaagccaaaaggttatggcttttgcgagtacaaggatgaggaaactgctttaagtgcacgccggaaccttcagggttacgagattaatggtcgtcagttacgtgttgattttgctgaaagtgggaggaacactgatagaaatagagaaaagggtcgtggaggaccagggatggcatctaatgttggttggttttttttgttcaccatttagtttatgtatattctttcaatttctatgcgtattttatgtttatggatgcta

SEQ ID NO: 120737 - DNA, 1460 bp, Zea Mays
ccgttcttatctgttccagccgcagccttgatttttcctaccgtgtgtgcctgtcttctttcctgggagaaaaatcacgctgctccattctctggtttctttcagccgctcaccgccggtgagatcgcagccgtcgttcttatcttcttgcgccgctcctctgttgccgcttaagtattggataaaatcctgcgcgccgaggttcttcctcatggcgctcggcctcttcccagcgctaccggccatccctctgctcgccctcgctccctctgttggctcagaccgcgcccccttctcggccccatctccatggcgtccggccggatctccagtgccgcgccggcttggagcttccatggtcgcatctctttttccctgtgatttcatgacgtccctgcgtcgcatattccccgagctcgtcgccatggctgcacccagcagctccctgccgcgcccagctcttcgcccttttccctatggcgcgtctcccggccctggctcaacgatctgcgttctccctgctctcccaagcaacgcgtcgtggagctcctccttgcgcgcgcccagtcagcgcctgtgcgctgcggtttcctcttcatcttcctcaagctcgccgagcggttcttcccccagcacatctccctgcccaatcgccccatttcctcatctccctcgagctcgcccctgcctcagcttggactgcgctgctcggctctagtgaaagaagatccctctgcccagccgctccttgctccctgcacgccggagctcgcccagctcggcctcctccccacgcgcgtccttggtttcttgctcgcccagccgtttctccctgcaagcttcggctccctgcgcgtctgctccagctcggccatggccgtcgcagccaagtccctttcccccagccggtttttctgcgcgcgaagttcctttggctgcgccctccctttctcttccagctcgcgcaggtctgctgctcatctcccatggtggttggtcactgctgcgcagcttcctggtgccgcgacccccgccgtgatctcctctaccgcgccgaattgcgcagcgccgttgacgcctgccgattgttcgatactttgcgcggctagtcgtcgcggtcatacacagcagtgcctgctcccagctccgcgccccagtccctagtgcccgaccgtcgtcgccactggcagtacaccgacgcagcgttcctgcacatcaacaccaacaagtcgtcatgcatcgtcgtgctggcacgtcaatgccgtcaatcgccatcctcgtctacactaaagatccgagaagattagacgcggaggaaaacaaattagtacgtggcgggaaaattctcgatatggaagaagaagtgtgattcgatgcgacactcaccgtgtattcaggggaaaagttagagctgaaagacatcgtccatttcacgatttcaagccggatttaattatggt

SEQ ID NO: 120738 - DNA, 1457 bp, Zea Mays
ccgttcttatctgttccagccgcagccttgatgttttctaccgtgtgtgcctgtcttctttcctgggagaaaaatcacgctgctccattctctggtttcttccagccactcaccgccggtgagatcgcagccgtcgttcttatcttcttgcgccgctcctctattgccgcttaagcattggataaaatcctgcgcgccgaggttcttccttatggcgctcggcctcttcccagcgctaccggccatccctctgctcgccctcgctccctctgttggctcagaccgcgcccccttctcggccccatctccatggcgtccggccggatctccagtgccgcgccggcttggagcttccatggccgcatctctttttccctgtgatttcatgacgtccctgcgtcgcatattccccgagctcgtcgccatggctgcacccagcagctccctgccgcgcccagctcttcgcccttttccctatggcgcgtctcccggccctggctcaacgatctgcgttctccctgctctcccaagcaacgcgtcgtggagctcctccttgcgcgcgcccagtcagcgcctgtgcgctgcggtttcctcttcatcttcctcaagctcgccgagcggttcttcccccagcacatctccctgcccaatcgccccatttcctcatctccctcgagctcgcccctgcctcagcttggactgcgctgctcggctctagtgaaagaagatccctctgcccagccgctccttgctccctgcacgccggagctcgcccagctcggcctcctccccacgcgcgtccttggtttcttgctcgcccagccgtttctccctgcaagcttcggctccctgcgcgtctgctccagctcggccatggccgtcgcagccaagtccctttcccccagccggcttttctgcgcgcgaagttcctttggctgcgccctccctttctcttccagctcgcgcaggtctgctgctcatctcccatggtggttggtcgctgcggcgcagcttcctggtgccgcgacccccgccgtgatctcctctaccgcgccgaattgcgcagcgccgttgacgcctgccgattgttcgatactttgcgcggctagtcgcggtcatacacagcagtgcctgctcccagctccgcgccccagtccctagtgcccgaccgtcgtcgccaccggcagtacgccgacgcagcgttcctgcacatcaacaccaacaagtcgtcatgcatcgtcatgctggcacgtcaatgccgtcaatcgccatcctcgtctacactaaagatccgagaagattagacgcggaggaaaacaaattagtacgtggcgggaaaattctcgatgtggaagaagaagtgtgattcgatgcgacactcaccgtgtattcaggggaaaagttagagctgaaagacatcgtccatttcacgatttcaagccggatttaattatggt

SEQ ID NO: 120739 - DNA, 1172 bp, Zea Mays
cactctttttccccccttcctctcatgctctttctctctcccctctctctctctctctctcttctttgttgggtgcactccacactcactcaccaggcgttgcgcttgtctccggtctcatgatgaatctaatcctctcatcaattgcagaaaaaaggtaatgcacaggaaactgaaacaacgcataataagagacatgcaacgcaaagccttttgctgaggccaacaaggaaaggaaggtagcgtaaagcacgagagagactcaccatttgcgaggtcgagcatgaagtcggccgggttgacgtggaagcccggcgcgaagccgacggaggcgaagtagtccatggcgtcgcggccggcgccgaagtagaggcagctgccctcggcgagcagcagcacggagtcgaacatgcggtagacgcgggaggagggctggtgcacggacaggacgacggtgcgtcccttccttgccagcgccgacagcgtcgccacgaggcgcgccgcggcggtggagtccagccccgacgtgggctcgtcgaggaccagcaggctcgggttcaccagcagctcgtgcccgatgctgacgcgcttgcgctcccccccggacacgccgcgcacgaaggcgttcccgacgacggtgtcggcgcacgccgcgaggcccagctccgcgatcacggcctcggccgcggcggccttggcggacgccggcgcggaccgcgggaggcgcagcatggcgcagaaggccagcgtctcgcgcaccgtcaggtgcgggtgcagcacgtcgtcctgcgccacgaaccccgtgcggcgctgcacggcgcggcacggagggcgcccgcccgccaggaccgtcccgctgtggcggcccgccagccggccccccaggatggacagcagcgtcgacttgccgctccccgatgggcccagcaccgctagcacctcccccggacgcgcctcgccggtgatccccttgaggatcgtccgctcctccgccgtcgcgggggcgccgggacccgagtgtgatatccggccgcccggcggcgccttggacgccgaccgctccgtctgcttgacgcggtacgacacgtcgatgaactggagacaaccgacaaatcggtgtgttaatttggattcaattcctttggaagcaggtatatatagccgtcgtctcc

SEQ ID NO: 120740 - DNA, 1676 bp, Zea Mays
gtgccctccagaataccaaattccccgaccttcgccgagcttctccaacgctccagcggttgatgtccgtcccaccgcggctctccgtcgatttctacgatgacgacggcttcgactgggaggccgccgtgcaggagatcgacagagcctgcgccttcgcgtcggcctccgcccccgctcccgctcccgcccccgcccccactccggcgccggtgcatcatccgctgccgccgcggccccccgagccatcggcatcggcgccgcttcacaggccaccggcggcgggcggcggcacggcgcggcagtcgacgctcgaccgcttcgtcgactcatttaccaagaggcgactagagaaagagaggcccgctccagcgcccgtgcaggcggcgtcgtggggcgtgggggtggagccagtcggcggcggcctagggcggccgggtgtccgcgcgggcgagggatgttcgggacaggcgaacgagagagctgtggaggaccggttcatcgaatccttcaccaggaggcagcaggagaaggagagggctgcgtcggaggtggcaccggcactggctggtggtcaggggcgccctgcagctcgtgctggcaagggatgctcgggtcggggcaatcgtgctggcaagggatgctctcgtcggcccagtatggagattgagtatggtctctgcgctgtctccctggaccacgaggctgtcaagacatggatctatccaactaatgtagaagtccgagagtaccagaagtatatggttgaaaaggctctgtttaccaatacgttaatagctttgccaactggacttggcaaaacttttattgctgcggtagtgatgtacaactactttcgatggtttcccgaaggaaaaataatatttacctgcccttcacgtcctcttgttactcagcaaattgaggcatgtcacaatacagtgggaataccacaggagtggataatagatatgaaaggagatcaatgcccttctattcgatcagttcactggaagtcaaagagagtgttctttgtcactccacaagttcttcagaatgatatacaatctggtatatgcatggtacaacaaatagtttgcttagtgatagatgaggctcatcgagcgtcaggaaattatgcatactgcatggttatccgagagttgttggcagctcgtgtgcctttaaggattttagctctaactgctacaccagggtccaagcattcagatatccaaagtgttatagacaatttaaacatttcggagctgatttattgtgatgaagaagattctagagtgaaccaatatgttaacacacgcaaagttgaacttgtgcaggtcccttttggcagtgatgctactcaagtcgctgatatgcttttggatattatacgcccacatattaatcggttgcgtgatgctggtgtgattgaccatcgggactattcaaattggacccaatttgaactgctgaaatttaaggataaattcaaggaagtacccccaccaaacatccatgaaatcgagagaggggaaattgaaagatcttttgtaattcttggcccactttgtcacacaaggaagttgcttttgagccatggaacccaatttgcacatgggtatcttgacaaacgattgaagggagggtattgtcttcacacttatgctacataa

SEQ ID NO: 120741 - DNA, 3198 bp, Zea Mays
atgggaaagtgcctagacaaggcacttaggtgccaagtgagctggactcaaggattattatattttcccattaccgagaaagtgtcaatgaaatatattgctcactacaggatattgatgataaacttgtcagacctgttgaattcattggtcaaagctcagcaggatatactagggaaaagaacatgtggcatgagtgagggattgtgttcagttgatcccatggtttttgaggtgatgtgctgtcctgtggtgctgggggtacacctaggtaaccaactgaaggggcaaagccaaaaaactcaacaagctattttgaagaaattccgatctggggtatataatgttttggtggcaacatcaattggcgaggaaggacttgatattattgaggttgatctcgtgatctgtttcgatgccaatgtctcaccattaaggatgattcaacggatgggaagaaccgggagaaagaatgaaggtcaggaattgcaggggtacagaaagaaacaaggagattgtcgaaccatgaggaagctattgcataacagtgagagatttgaataccatgctagtcctaggatggttccacatgtctataaaccagaagttaagtatgttaagttgacaatagacaagtatattcctcacgcaaagaaaatgagggttgccgcaaaagaagcctcgccaattccatggaagatgtcggaggcagacggtcaaatgattactaggtactttagtgtgtgcaaagaagaagtttggaggccgtcccttgtggcatttcctagatttcagctttatccaagtgtcgttcacaaagttccacattcatttcggacaacagatatgctaactgatgctatgaagcaacttcaagacccatctcttttcaggacaaagtgtgaaatccctttgcaagaacctgctaatgtttctgctgtggaggagggtctggaacatgaaggtctctatgctgctaatggaaatgaggaaatgcctcaggaatgtgacggtttagaagcttcatcgagtgtagtgtggaatgaaaatgtttctgtgccaggttctccagttaagaagtatccggttcacactttcttcagtggtgattatgtaactgtggatagaagaggcagcgttttgattacttatgtacctgtcctgcctcaaaaaattgcattcagtaaggacataaaaagtgcagtttggaataacaaagatcagaacaaagccaaaccttacagatcagcagcaggcgtctgtaggacaacagttgaatttgtccttggtaccaatacagacaaacatttgtttgtggataatttatcaactgtagccatgcattcccctgagtgctcttggcatggtgacaatgttgatgacaatcatgtgcttactactgtaccatccaaaacactgacaagcccaagggagaaaatggacacaccctgcaatgttaaactgccagagtccacctattcatatcaggaagacatggagcttaattcaaggctaacagtatatatggaagaaggaattgttcctgagtctccagtggttgaagttagccacctacgtctagagatggatgaagctgcagactttggagctgtgccaaagcgtggttctccaaagtcacgtgatgagagggctcatgccaatgtagctggaagtcacaaaggacctttgaactttgagaaaaacgatcaattgctttgtggggaaaacgagtttgatggatcatcaaggttgtatatgctagatcagactcgagccaaaacagaagagccaatgcatccttcaaatgtgaagatggctactactacaagacatactcctgggaatatgctgtgtgatagtttctcaggtgattatcagcttaggtcagggggggatgcatcgggatcagtccagcaagcacctaagtacagaagactatgcaaatatggtgacaagatcaaaagagtctcttccatatctttggatggctgtgatgataggtttgaagaatgcaatattgctaataaagataggccaaaccaaataaaacatgctatggggacaaaaaggaagaccaagaggcgtctagatgcctatattgacgaggaagtcggggtgtctgaagatgcatatgtttcagaggatgaggatgataatcagagtgaagataaatacgaagatagcttcattgatgatcaggcaactccaactgaatttacacaaactgaacaaggtgatcgacacaatggtgacatgatgggtttctacaggcaatcgttgtttactcagtccccagtagttctaccctcaaggtaccttgatgtttcttacaattctgcttctcggaccggaaattcaagctattcttcagaggctaggcacaattacactgagactcccaaagagattcaaacacaacatcataccataaacccaagcccatcgtacagttttgtacaggatcgatgtgaaagagggatcgccaattgtgaatcatcgactaagctggattgcagaaagagaaggctaagcttccagcaacctctggcgatccctgttataaaccttgaaccagaaccagcaccagaaccatctccacacgtcgccagcagagtcgctgatcacctatattttgatgatggtttctttgagaaccttgatcttgatgcaattgaagctcaagcaaccgaacagtggagacagaagaccacacaatcgacgcagaaaccagtggaaattaagaatgcatcagacatgagttttgcacctccgtcattcgatttaggtctctgatagtggtggtaaagttagcatccattcatgatgtcatctagctgcagtacctagccatctcagagcatgctgagaactgcacaagcaatgaggttttctgcagaaggcccgaacctgcatcacatgacaatgccgcaggatctggcatgtctgccgctgtgatatttatcggcgccctggagctggaagatgcgctggcggcagattttgtagagtatttatctcagtacaggctcaatacaccatgtatattctcctgtaaatactgttcgatgtataagggtcttattgtatgcagacatttcagagacttgatgtgttaaacccagtggcaaaggtgacgtcagtgtcggtttttgttgcgcaggattatcctcgctctcgatgctgaaccgactggttttg

SEQ ID NO: 120742 - DNA, 2404 bp, Zea Mays
gcagcgcccctcccctcctctcccctcgctgcggctctgcttcgcagccaaccaaccactcgaccgggtggtccacctcccaccccatcacaccaccacaccaactcggtcaaatgcatgggcacggggccatggctcactcacagggatccgggtcaatggggcgggcaccctcggccctcgctcctccacgctctccacctcgacccctctttcgtataaaaccaaccactcctcccccgctcctccccggctccttgcctttgttctgttctccattcgcgaaaggctcgcagcaaaaccacgccatcgatcgccgccaccagtccagcatcctccgatcgactacgtactcccacccactccggcagcagcgaggcctctctgtctgtgcgcggcgtggctgtcgtcgatctctgcctggcgggcggccggcatggggaggtccccgtgctgcgagcaggcgcacaccaacaagggcgcgtggaccaaggaggaggaccagcgcctcgtcgcctacatcaaggcccacggcgagggctgctggagatcgctaccaaaagccgcaggtctgctgcgctgcgggaagagctgccggctgcggtggatcaactacctgcgcccggacctcaagcgcggcaacttcaccgaggaggaggatgacctcatcatcaagttccacgagctcttcggcaacaagtggtcgctcatcgccgggaggctgccgggcaggacggacaacgagatcaagaactactggaacacgcacatcaagcgcaagctcctcgcccgcggcatggacccgcagacgcaccgcccgctcgccagcgcgaccgcggggcagcagcattaccagctgcaggagccgcagaagcgagcggccggcggcggtccagcaggccatccgcaccaggaccacttggaggtcgtcgtcatctcgaactcgccggacgaggcctacagccgtagcagcgacgacgagccgcggtccgccacgccgccgcggcgccacctcgacatcgacctcaacctgtccatcagcctagcggcctaccagccgccggaggaaaccggcatcatcaagcagccactggtgatgaagcaggagcaggaaacggcggcgggcggcaccaatgccgcggcggtgtgcctgtgcctcaacagcctcgggtaccggccgggcgtcgagtgcgtctgcggcgacggcagctcctcctcctcctcctcgcactcccactcccactcccaccaatgggctctgaattttttacaggcggcggcgccctgctacagaggccaatagtgtagtaagagcgatcagtgacatcattaaaatgggagcgttattacgatcgagactgagggtgagggaggggggcagagctgagcagggatagtagttaactacagctagtagtagtagtagtacgtaaaagacacacatgcttaggctttaacaagtctctgaaacacgcatcatgggttatgagttgtgctctcgtcttgtcgtttcaattcggaggacaaagtgatcatgctatgcccatgcctcctcaacaaatcatgctttagagtagtttgatcatcgatgatcttcttccatcacctatagctagagcagatgttctcttcttgcggcaaaaaaaaaccccccgcatcagtagtcatgtgcatgcatggctgataatggcctgccttcttcctgcctgagatgctgatgaaaagcaaagcgcagtgaccacttggacggtgcttcgctggtggctatggacaagccaggttactggatgtctgcagccacacatgacccacttggacgcgcgctgctcacagaaacagaaaagctgggtgccggtttttggcttggaaaaagcttgtctagcttgtagagcgagggaaggggaactgggcatcggagcatgatgcatgcgaatgggattgatgagatgagagatgcccttcctttcctctggactctgttggttggttaggtacagtaggtaggtaggtacaaggggcggaagggatgtgaatgcaagggatgaaaagtgccacggagcagcggcatggattggttgggggccgcttttgtttggtttcttattattaatggcctacttgtaactggtcggagcatgagcatttgagttgagcatgcatgatggtggtggttggtagtctattggcaggtagtgtcaggaactcacgacaagatccaagcaagctttcaggcttttaatttcgagcagagtgggggccagcaatggtgaacttcagtttaagcacagcaccaaacagtggtctgggctagagtagggaaaattttaccgccgacacacgacccgataaacccgattttctagtttatcgctgggccccatctattttacctatcgaccaaaaa

SEQ ID NO: 120743 - DNA, 682 bp, Zea Mays
agtcttctccgatccgagtccgacgatctgtctcttctgtgttggtcgccccggacacaggctaatcaagttcaagttcgaccgcgcgcaggctagctccacgcggccatgccatcgctaatgtcgctgacgccgtggcggaggaagaagagggtgcctggtgggccggtgacggtgcgcacgcggcggcgcacctcgctgggtgctctgtggcggcgcctggtgcggacgctcacctgcgcgcgccgcccctactactgaccgaccgatagacgatgtatctatcatcctccatggacgacgtgctacgggaggatgatatcggttgccagctgatgagagaggtgctgtgctaacagatgagggatcgatgcaatacaatgcaagcaagcttgtccgtgatgtgtttgttcatagtcgtatcatgtgagacggttctagctaatgtatcgtgtcgactacttttttataccacctacgtatatatatgtataatttctatatctaataacatgtgcccttcctcttgaaaagtttgggctctgcttgcctgaaatttagattgttgctacttcagatgtctgaaatatagattgtgttcagtgacgtttcacattgtattagatctgcatccaaaaccaagagtctagatttgtttatagtgaattatatatagtagatc

SEQ ID NO: 120744 - DNA, 765 bp, Zea Mays
accgccaccatctaggctagtctacagctagtacacaccccacaacaatataatcgtcgtcgtggcggattggagttgacagttgccataccaccagtactagctcgctcgctcgcttgctctcagaactgatcgctgtgaggagtatgccgtcgctgtggccaacgaggaagaagcgggcgcgaggctcggcggtccggtcgtggtcgcgccgccgcgggagcaagaaatcatcgtcgtcgtcgtcgctgggggcgctgtggcggcggatggtcgggccacgcagggggacccggacccggactcggacccgggcccgggggaagaagccggggctgctctcgcgcgccgcgcgggtgctctcctgcggccgccgctcctactgatcgatgccatccggcgcggaccggccggcgggcatcgaatcgtccgaatcgagatctgccgtgacgtgcgcgcgtgacttgtctctattcccttcgtgcgcgggttgttgccatgcccgcgagcgctgctgtttcccgtgtcgtgttcgtacctgcgtgggagctatagatgcactcgtgttgtgtgtataaatcattctgtatataaacttcacttgtaatgttgatgttgttgtcatggcgtccagcgtctcaattcttcgttcagttgcagagtgggtttgttgtataccgttccatcaatattcgatccctgagctacaccaaaaaaaaaatgaaaataaaaatggaacacaaaacaacatagctttatatttaa

SEQ ID NO: 120745 - DNA, 2269 bp, Zea Mays
ctgctgcctctgcaggctctgcaaggctgctagctgaccaaactccccctcctccgaccttcccgaatttctgatgctgttgccacttgaatgctctcctctcgcgcggtgcctgccgttgctgctctgatgccgatggatcccgcgccgacccaaccgcatccgcatgccacccacctcccctccgcctcgatccgcattaattactccgacctcaccacttcctcgccgcttccaaatcccaataataccatcgcgtaaatccagatatcagggcagctggaactgaaggtggcgggagccgagtgatccggcggtgagctgagcggggcgggatggcggcggagcaggggcggtcgctggcggagacgcccacctggtccgtggcaaccgtcaccacgctcatggtcgctgcctgcttcctcgtcgagcgctccctctcgcgcttcgccaagtggctgcgcaagaccaagcggaaggccatgctcgccgcgctcgagaagatccgcgaagagctgatgctgctcggagtcatctcgctgctgctcagccagacggcgcgcttcatatcggagatctgcgtgccgtcctcgctcttcaccagccgcttctacatctgctccgagagcgactaccaggacctgctgcgcaacacggacgccaaccagacggcgctcgacaagaacatgttcggtggccaacggctgcacgtctgtggcgagggccatgaaccttttgtttcgtacgagggccttgagcagctgcaccggtttctcttcatccttggtatcactcatgtgttgtacagttttgtaacagtggttctgtccatgatcaagatctatagctggaggaagtgggaaaccttagcaggtccaattgctgctgaggaattgaaagctaggagaaccaaggtgatgagaaggcagtcaacctttgtttttaacaatgcttctcatccatggagcaaaaataaaatacttatttggatgctttgctttttgcgtcaattcaagggctccataataaggtcagactatttggcactgaggttgggctttgtcacatatcacaagctaccacattcatatgacttccataaatacatggtacggagcatggaagatgattacaatgggactattggtatcagttggccactttgggcatatgcgattgtctgcatattaatcaatgttcatggtatcaatatatatttctggttgtcctttgttcctgttattctggtgcttctagtgggtactgaacttcagcacgtcattgctcagttggctttggaagtcgctgaggcaacagcgccttatgttggctcacaacttaaactgcgtgatgatctattttggtttggaaagcctcgggtactctggtggcttatacagttcatttcatttcagaatgcttttgagctggcaacattcttatggtctctgtgggaactcagtgcacaaacatgtttcatgaagcactactacatggttgccattcggttgatttctgggctcctagttcagttttggtgcagctacagcacactgccgctgaatgtgattatttctcagatgggttccaagttcaagaaatcactggtctcggagaacgtgagggagtcgctgcacagctggtgcaagagggttaaggacaggagccgacacaatccgctcttctcgcggaacgggaccctcacgaccagatccgtgtgctccctagacaccacctacgagacggatcacgagacgaacacggtgtgcacgctgtcgaggacggcgtcggcgacgtcgctggacgaccagttgaccgtggtcaccgtcgatgacgagccgtcctgcattgagaaggatgtctgacgcagttgctgattcgccaaaactacatactgcaccgacctgtgtgttaggaggtactctaggactgaaatgaatgtatatgtgcagtggttgcccctatcgtggcagtgaccatgtgtatatatagaactaaaaaaactataatgtctcttagctgagagtgagaggctgtacatggaaatacttgaggcagcttggaccaaatacaaaactgcatcttttcgagataagccgtccgttgcaactgcacgtaaccatgtaactcctttccctacttctactttgaagcacgactttcaactgtcgtgcatcatgcgtgtcgcgcatatgtttattctctctcgagatcttatctcactaagggttagtttaagaacccattttttctaaggcctcgtttattt

SEQ ID NO: 120746 - DNA, 1074 bp, Zea Mays
tataagctccctgatttgggatttgctctaaattaactcacctgaaaatattggttgggctcaatactaaaagggtgaaaaaaatctcttctgaacattgcaggctcctagttcagttttggtgcagctacagcacactgccgctgaatgtgattatttctcagatgggttccaagttcaagaaatcactggtctcggagaacgtgagggagtcgctgcacagctggtgcaagagggttaaggacaggagccgacacaatccgctcttctcgcggaacgggaccctcacgaccagatccgtgtgctccctagacaccacctacgagacggatcacgagacgaacacggtgtgcacgctgtcgaggacggcgtcggcgacgtcgctggacgaccagttgaccgtggtcaccgtcgatgacgagccgtcctgcattgagaaggatgtctgacgcagttgctgattcgccaaaactacatactgcaccgacctgtgtgttaggaggtactctaggactgaaatgaatgtatatgtgcagtggttgcccctatcgtggcagtgaccatgtgtatatatagaactaaaaaaactataatgtctcttagctgagagtgagaggctgtacatggaaatacttgaggcagcttggaccaaatacaaaactgcatcttttcgagataagccgtccgttgcaactgcacgtaaccatgtaactcctttccctacttctactttgaagcacgactttcaactgtcgtgcatcatgcgtgtcgcgcatatgtttattctctctcgagatcttatctcactaagggttagtttaagaacccattttttctaaggcctcgtttatttcgttggaattgaattctattctaataattataatttagacaaaactaattgagttaatatatttatttatgtaatgtatttgtatgttatcctaaatcatatcagatagatagttatacattatatttatgttatagagaaataagtaaaagagtgtgctataaattgtatattagaaaagtaacatgtaaatctataaaattaattacaattctaaaaaa

SEQ ID NO: 120747 - DNA, 1108 bp, Zea Mays
ggcaagccagccacgccaatcacctgtccagctgtcctattcctacctccagccacaaagacgagctccacgattccacccacaccgaatcttgacggaacgattccaccaagaaccgcgggcaacaattcacaccgcgcttctcttctccagcgatgcagacgacggcggcggcggctgtggcatgggcgcctggcccatcggcgtccacctcgtcatcgtcctcgccgtccaccttcagggtgggggttgcgtcgacggccgtgcgggcttgttccgcgcccaggcttgttgcgtcctccgcgcccctgggctgtcgacggctgcgacaagtggttcaagctgttgccaatccagaccctgcgatcgagcttccattgactgctgaaaatgttgagatggtgttggatgaagtaaggccgtatcttatggcagacggaggcaatgttgcgttgcatgagattgatgggaacgtggtaaggttaaagctgcaaggagcatgtggttcatgcccggcttcagtaacaacgatgaagatgggtattgaacggcgcttgatggagaaaataccagagattgttgcagttgagcccattgctgatgaggaaactggccttgagttgaaccaagagaacattgaaaaggtacttgacgagattaggccataccttgctggcacaggaggtggcgagctcgagtttgtcacaatcgaggagcctattgtcaaggttaggcttacaggcccagctgctggtgtgatgactgtccgagtagcattgactcagaagctccgtgaaaaaatccctaaaattgcagctgtccagcttttgccataagattagaatcttttagaagccaggcaccagtcacagttgataatgtaaatgcactaccgcaataaatttaaggagttgtaatgtgtagcctgctgagcatttagctcctcttcagcgatattatgatcatcgatacacaatgttcaagtaaaggtgttggttggatttgtaaccagagttttggtttttgtctgtatgacctgtattctcgttaatcacgatggaagaaactaaatcaggtcatgttcggttcaaaggaattaaatctcatc

SEQ ID NO: 120748 - DNA, 1767 bp, Zea Mays
cggcagaacatccgtcgacgtcgccgacaggcgacacgaggctcacggctcacggctcaccagtcacctctaggtcttttccaaaaaaaaaagaagcccctcctatccatccctatccctacccctacgagtatccaagtccaaccagcaagaggggaggcgctgcacgcaggtcacgcggcgatggacatatgcgatgtttgagcaggcggtggcagatttctgctggcatgcgagggaagtagtgtcgtcagggatggggctctggggttggccgtgggggcgacgtgggccgtcgggcttcggctccgcgtccaccgccgaggaggtcaccgccggcgtcgacgcaagcaacatcactgccatcgtcacaggagcgacgaatggcattggaaaggagacagccagagttctagcactgaggggagccaaggtaatcataccagctaggacactggagagtggcctcaagttgaaggagagcctcgcagatgaggtcccaagctccaaggtacacgttatggagatggacctgagctgtctcagctccgtccgcgacttcgcacggtccttcaattcatcccacaagcatctgaacctcctcataaacaatgcagggatcatggcctgcccttaccagctgtccaaggatggaattgagctgcaattcgcaacgaatcatgttggccatttcttgctgacaagtctcctgctagacaagatgaaatcaactgctgcagagacaggtgtgcagggaaggatcataaacgtatcatcggtcgcgcataaaagaagtgatggtacatgctttgagctgaacaagctaaacgataaggctaggtacaaaccgttcattgcatacgcgcattcgaagttagccaatattctccacacaaatgagttgtccaggcgttttcaggaagaaggatgcaacctgacagcgaattccctgcatcctggagtgatcatcaccaatatcattcgctatgttgctggaaacagtgcgctgatttcggctctctcccctgtagcaaatcttgttctgaagagcgtgccccggggggctgcaactacttgttacttggcattgcaccctaatgtcaaaggtgtatctggtaaatacttcgctgattgcaatgaagcaacaccgactgctgtcgcgagagactcagagctggcgaagaggctatggtcgttcagcgaagaacttgtcaagatctatgctgatatgtcacagacgacacaggcaagcgaagaggaggaaaccacggttacgaaagacgttttccaagacaagtagcgtaatatatgttgctgcgttttctactttttgtacatgtcctctgggcccgaatggccagtgactgtaatagcacctaagtgcccgagactggtaaggggtattcagacaatcaatcaagaaaccacggtgcggctgaggcctgaggcagtcctctccgtcgttcacccaaatctgagatcactcgtgtgctcacgtcgacggtgattagccggtggccccgggtgttgcaagatagaagaccaaaattatacgatcatatggaaacaagatgtgcctgcaatcatatgatatgagagtactagtgttggataatttttattcttcggaaagcgccaaaatcataaacgtttgatagttttagcattaagagcagccttggttgtttatttgtttccatgcttcttgaattgtcaggaagatcatgacttgtgacgacattaacagctgttacactattggactgg

SEQ ID NO: 120749 - DNA, 104 bp, Zea Mays
ccttgctgcacgttcccagcttcttaccttcagcccttcaccaaacagcagcagcatcacaaatcaacaaacaatagattaaactgtaaaagagatgaacaaat

SEQ ID NO: 120750 - DNA, 109 bp, Zea Mays
tcaaagagtctagttttcacataatcattaccctcatggaatctaaaagggaaatggcctcaactattttctataatcaattttggtgttcgacgaccatcacaaatcc

SEQ ID NO: 120751 - DNA, 76 bp, Zea Mays
ctcttctgtaatttctatcccactatgtcacttgggtggtcccttcgtgacgatggtgcccttcctaaactccttt

SEQ ID NO: 120752 - DNA, 1030 bp, Zea Mays
ggagcaggaaggttgggcgaccaagcgccgtctcccgcggcgagcaccgacgagcagcaggcatggccatggatggaggagctggagcgccggcagagggcagagatggagcagggaactcggccaggaaagggactcggaaccgggcgcgacggctggacgcagggcgagccatggagatgggcgccgagatccatggatgcagggaggagggaggagctcgcaggctagctggggatggaggaggagaaatccacgcgcgccatagaagggcttcgacagggacagggcgctgctgggaaatggagggagagaagcaagggggcagctaggctcttggccgaccggagttggaggaggaagccgcggcctgaacgccggcgagccaggcgcggccatggctggggaagaggaacagcaggcgatttggagcgcggcgtgcttgaagatggagcagaggaagcagtgcagagaaggaacgcggggcacagggaagcgcgcgtcatggctgggaggatctggggcgagctgcgcgcgtgcagaaggcagggagagcgcgggcgggcctgaggagaagacgagggaggcggccagcacgacgaccccagagtacacgcggccagcgaacggcggcatgggataagaacagcagatgagcggcgcaggggaaaaaaaatccagcgatggatgtagacgatggctggaagaagaagaggataaggcagccgaagaagaaaaatatcaggagaacctctcttttcctatcgcattcaccttttatttgttcttttgaccatttctccatatagtacttacgaaaggctggaaagcagcaggggtattttcatctcgtggtaagcaggaacaagagatgcacgggagtgtagtaaagcatgtcatgggcggtgaaaaaaatcggagagaaagcagctggaatttttctcagatttttccccattttctgtttattttatgaataaaattgcagatgttttagatcatgatttttagcgatgaacaaagagtcgac

SEQ ID NO: 120753 - DNA, 3523 bp, Zea Mays
cacatttggcatggtgctcgaaccttgttccgagatgtttttcctagtattgatccagacttggatgctcaagtggaatttggaacattcgaaaaagttggagatccaactacaaggagacaggcagcctgataccacattgctatgatatctttcacctccattttttgtttgatttgacatgaggaacatctcatgtcctttctttgactcttttttatatgggaaatgatcccaaatgataagtgaataggtgaggaagttataattgtaaataaaccaggatcgaatctatggaagcattggtttatacgttccttttagttccgactttagggatatttttttcgctatcttcttccgagaaccacctaaggttccgactaagaaatgaaataatttaattgaagtaagaagtcccccggaggggagacttcttacttgacttcttacttcaattagtcccgatgttcttcgaatggatctcttaattgttgagagggttgcccaaacgcggtatataaggcatacctagtaaagcttacaagtaaaccaaatatggagatggcgactaaagttgatgtttccatttttatagaatttcaagattacaatggatctatgaaaagatcgtgtatttacaactacaacggaatagtatacaaagtcaacaccaatgattaaatagaatttatggctacacaaaccgttgaagatagttctagacctaagccaaaacggactggcgcaggtagtttattgaaacccttgaattcggaatatgggaaagttgctccgggttggcggactactccttttatgggggtcgcaatggctttattcgcgatattcctatctatagttttagaaatttataattcttctgttttactggacggaattttaacgaattaggtttctactaactaaaactatgacttcatagtttttccatccaaaaaaagcctttctactttaagctccacatttctagacattttggtagttcgaccgtggatttttttgttttggtatctctggaatatgagtgtgtgacttgttagaattgatcctattgataatacatagaaggggcatgttatctttatcaagatgatttctaattcatcagatattatttattctagtatctggaacacgaaatacatagagtggataaaaaaggaactatgattcatactcactatttatacctcgcaaccagacttaaaaaaatgaagtagttcttaataaaaaaataaattttcttccttccaattttgtttgcccaaaagagaactcttttctctttcaataaatgatcatcaagcagttcttattcgaagaacccttgccttttgtttatcttgagactcaatcatcgtggctctagtatgaatgtaaggttttaattgaactgattcataggatcgcaacaagataatttctatcagaaaaccactagaaattttgattttattttttgactagtcaaaaaataaaatcaataaaaaatagggaacatgaaagtcaagaggcctctaatgatcaacataagggaaagaaagacagatgagccaacttgagattttttggcattattatcacaaagaagaaattgtggatttttcttatttcatatcttcaaggcaaatcgatccaataccgtggctgatggagttttgaaccttttttctaatatccgtagaaacatttgtgtatttctgcttgagccgtacaagatgaaattttcatatacggttctcgaagggggagtcgggctagttacctatctcaataaagtatatgattggtttgaagaacgtcttgagattcaggcaattgcggatgatataactagtaaatatgttcctcctcatgtcaacatattttattgtttagggggaattacacttacttgttttctagtacaagtcgctaccggttttgctatgactttttactaccgaccgaccgttacagaggctttttcctccattcaatatataatgacggaggccaaatttggttggttaatccgatcggttcatcgatggtcagcaagtatgatggttctaatgatgatcctgcacgtatttcgtgtgtatctcacaggtggatttaaaaaaccccgtgaattaacttgggtcacaggtgtggttttggctgtattgactgcatcatttggtgtaactggttattctttgccttgggatcaaattggttattgggcagtcaaaattgttacatgtgtacccgaagctattccggtaataaggtcccctttagtggaattattacgtggaagtgctagtgtgggccaatccactttgactcgtttttatagtttacatacctttgtactacctctgcttactgccatatttatgttaatgcactttccaatgatacgtaagcaaggtatttcgggtccgttatagggaaggcatagcatagagaattctaattctcatatatcatatcgggtaggttgtggtatttcattgctacaaacatgggttattgtaaaataagacatgtcatttggatacttctcttcaacttcgaagtatttttatacaaatagttgaaatgaattttacgaaagaaaataaggcggattatgggagtgtgtgacttgaattattaatttggccatgcagatagagaattggatctgccacattagaattcacgaccaaaggtgtttccgcatccaatcaacacgtaagtcccctatctaggaaggatagactggttcactcgaggagaatattttctatgatcataccccaccaaccatgtaatccatgaacaggctccgtaagatcctatagagtataaatggaataagtcatgtgatatgatccaattcaatttttattacacttactttttattatagtatggaaatgcattcattttctttgcatcgattttgatccgcaatactatcggagtaaaagaagggacctaaggaagaacacaggctaaactttttgattttttattagtaacaagtaaatactttgtttggacataagaaacttgcgatatcaaggggataaacaacaactaatcaagagacaatccacaaagcaattgatcatgatcaaatttgtaagcccacttggatattgagcatttaaggataagaataggattcttttcaatgagtagttataggcgcaacttcggaaaagataatttgataaagtttttcttaccttgagtcattgagtcattatatacccctattctattatggatcctccacggtcttatttctttcgttcttgctcgagccggatgatgaaaaattctcatgtccggttcctttgggggatggatcctaaataattcacctatcccaataacaaagaaacctgacttaaatgatcctgtattaagagcaaaattagctaaagggatgggacataattattatggggaacccgtgtggcccaacgatcttttatatatttttctggtagtaattctgggtactattgcgtgtaatgta

SEQ ID NO: 120754 - DNA, 2425 bp, Zea Mays
gcagtccactcagaccgatgggcgatggcgaggaagggggaaggaaaatatcaaaaggaatctcccaagtccaaacagaccccatcgcccgccgcacgtcacgacatgcccttctccctgctagtgctgccaccgctcccgctgaaaaagattattagtttttcatttctatttttaataattgaacctcttctgccggttcttctccctccttgagtactacttcctggcaatttatcttctccaacaaggtccgacatcaacaagtgattgctcgcggccccgcaagcgagagagaacttttcaacccaaacaaacagtccaatccaattcctagggcaatccggtgaacgtgtgcgtgtgtatatacatacacacggccgccgccgccgcaggcctcgctcctaccgccaccggactcccctttcgcgtccgcttctcttgttgttgctgtgctctcctgttaccgggacccggaggaaggcaggaaggaaggaaggaaggaaggcggggatggcggaggagacggtgcgggagctgcgcgcgagcttcgcggcggggcagacgcgcccggccgagtggcgggcggcgcagctcaaggggctcatccggatgatcgacgagaaggaagccgagatcagcgccgcgctccacgaggacctcgccaagccgcatatggagtccttcctccacgagatatcacttacaaagtcgtcgtgcaagtttgcgctcaaggggctcaagaactggatgaagcccgagaaggtacctgcggccataactacattcccgtcctccgcccaaatcgtgccggagcccctcggcgtcgtgctcatcatctcagcctggaactaccctttcatactctctatcgacccagtcattggagcaatcgctgctggaaatgctgttgttctgaagccatcagaaatagcgccagctacctcgtcactgttagcaaagctgctacccgagtatgttgacaactcctgtattaaagttgtggagggaagcgttccagaaacaaccgcactcttggaacagagatgggataagatcttctacacaggtaatggaactgtaggacgtatagtgatggcagcagccgcaaagcatctgaccccggtagctctggagcttggtgggaaatcccctgttatcgtggattcaaatgttgatctccatgttgctgctaagaggattgttgttggcaaatggggatgcaacaacggccaagcatgcattgctccagattacatcataacgacaaaatcatttgcaccggagctggtggcctctttcaaaagagttttggaaaggttctatggggaggatcctctggaatcagcagacttgtctcgtattgtgaattcgaagcagttcaaaagattgacaaatttgatagaagaaaaaagagttgctgacaagattgtgtacggcggcaaggctgatgagaagcaactaaaaatttctcctacactattgttagatgttcctgaagattcagaaattatgacaggcgaaatatttgggcccttgcttcctattgtgacggtcgaaaagattgaggaaagcttcgacttgatcaatgccaagcctaagccactagccgcctaccttttcaccaagaataggaagctgcaagaggagtttgtggcaagcgtccctgcaggagggatgcttgtaaacgacactgcgctacatctcaccaacccgtacatgcccttcggcggcgtcggcgacagcgggatggggtgctaccacggcaagttcggcttcgactgcttcagccacaagaagggagtcctgatccgcggctttggcggggaggcgaacgccaggtacccgccctacacgacggagaagcagaagatcctgaggggcctcatcaacggcagcttcatcgccctcatccttgccctcctgggcttccccagggagaagcgttagatgctccggcctcttgtcggtttcggtacagcctttttagtccctgttcgtcgtcaggtgcacagtatacaccgtcatattctgtcaaatagatgcaatgcaacgactgcgcgccgtgcttgtgttgcaagcgtggataatgcatatatattgtagcattgacatgatgtgcgttattgcattacgtaagggagttggataaataagtgtgatttgtttgtcaattattcagtgttgagaatggatgatacttgcatacagtttacttcacgatttaggggactaaagtttagtctgtttagttttagtgactaaaagtactcgaaacgcatcaaatgacacttataagaagactaaaatatcttttaacatggtgaaattaatatagtttaaaggtgaaattaatatagtttagtgttttttagttatcctttgagacactaggaattaaaacagggaagtgtaaatgaaataa

SEQ ID NO: 120755 - DNA, 1867 bp, Zea Mays
gtcagtttcttatgaacacgccctcaactcaactggccagctgctgtggggactctgcaaagggtagcgttgcgtgtaaattggtttcttggtggtgtttgcttccacggtctccccggtcttccgcttccgcaaaatttaccacactttgctcgctatatacgtacttcaattcagctagcactagtacaaaacacacatgtttacttgctagcagcatttgtcaaatcttgtaccatgcagtggcaagattgtttagttctcagtagtcacatcaagattaatttcatccttgtctggtacgagcaactgaggaccgcgtgctgcttctcctgtgttgtgttggtgcctcagatatcacttacaaagtcgtcgtgcaagtttgcgctcaaggggctcaagaactggatgaagcccgagaaggtacctgcggccataactacattcccgtcctccgcccaaatcgtgccggagcccctcggcgtcgtgctcatcatctcagcctggaactaccctttcatactctctatcgacccagtcattggagcaatcgctgctggaaatgctgttgttctgaagccatcagaaatagcgccagctacctcgtcactgttagcaaagctgctacccgagtatgttgacaactcctgtattaaagttgtggagggaagcgttccagaaacaaccgcactcttggaacagagatgggataagatcttctacacaggtaatggaactgtaggacgtatagtgatggcagcagccgcaaagcatctgaccccggtagctctggagcttggtgggaaatcccctgttatcgtggattcaaatgttgatctccatgttgctgctaagaggattgttgttggcaaatggggatgcaacaacggccaagcatgcattgctccagattacatcataacgacaaaatcatttgcaccggagctggtggcctctttcaaaagagttttggaaaggttctatggggaggatcctctggaatcagcagacttgtctcgtattgtgaattcgaagcagttcaaaagattgacaaatttgatagaagaaaaaagagttgctgacaagattgtgtacggcggcaaggctgatgagaagcaactaaaaatttctcctacactattgttagatgttcctgaagattcagaaattatgacaggcgaaatatttgggcccttgcttcctattgtgacggtcgaaaagattgaggaaagcttcgacttgatcaatgccaagcctaagccactagccgcctaccttttcaccaagaataggaagctgcaagaggagtttgtggcaagcgtccctgcaggagggatgcttgtaaacgacactgcgctacatctcaccaacccgtacatgcccttcggcggcgtcggcgacagcgggatggggtgctaccacggcaagttcggcttcgactgcttcagccacaagaagggagtcctgatccgcggctttggcggggaggcgaacgccaggtacccgccctacacgacggagaagcagaagatcctgaggggcctcatcaacggcagcttcatcgccctcatccttgccctcctgggcttccccagggagaagcgttagatgctccggcctcttgtcggtttcggtacagcctttttagtccctgttcgtcgtcaggtgcacagtatacaccgtcatattctgtcaaatagatgcaatgcaacgactgcgcgccgtgcttgtgttgcaagcgtggataatgcatatatattgtagcattgacatgatgtgcgttattgcattacgtaagggagttggataaataagtgtgatttgtttgtcaattattcagtgttgagaatggatgatacttgcatac

SEQ ID NO: 120756 - DNA, 165 bp, Zea Mays
atgtgccattcaaattgtctcgtctcactctgttacataataactgctccagattgcttctgccctgtacataatcagcacctcatctcaggaccaagcatttttctcggcactagccacaggaaggtgacacctaccatctaccaagtaccaactcacacctaa

SEQ ID NO: 120757 - DNA, 117 bp, Zea Mays
atgccccaactgaaggaaggtcctgcatctgaaattcaaccccaataccagccgcccgacatcttcttctcggagcagaaacaaatggggagggaggtggctattgtcgttgtgtga

SEQ ID NO: 120758 - DNA, 399 bp, Zea Mays
atggagaatgctggttgtgagcttgattctcgattgttgaatcgtgcggttagggaattactagagaaaaatgaaatgcagcatctcatccaagtggcgcacacccaagccaaggcagtgagcttccccgtctccatcaccgagcaagctctgtttttttctgcccaccgaatcattcgttcctcgcgcgtgtgcgattctgacgatgtgtcatggtggtgcctgcgatttcaggcgtcggagaagaagcagtcgaacccgatgcaagagatgaaggtccagaagctcgtgctcaacatctccgtcggcgagagcggtgatcacctcactcgcgccgccaagctcgaatatggtattgctttggatttggcagtagccagcaaggttgttcaggcttga

SEQ ID NO: 120759 - DNA, 2987 bp, Zea Mays
ttcgctttcggcctttggccaccaccatgcaagaagcgtcacgaatcatgagccaagggaccgacggggaggttgccggcgttgtaaacagccatgacgacaaggaccatgtccatggcacgatcagacgcgtggccgaagccgattccgagaaagacgaagtgcatggtggtggccaggagccaatattctttcagtgccttgatcaggagcaaccccccgatccggtgcatttggaggacgctagggtcgaatttccctccgacgaggatggtgacggtgatgacgtccgcgtctcctttgcaaccgccgatggtgatcgcctcctcgaggagcaggcggagctggacctggacgtggaggaggagcaagaggacacatccaggtatgactacgttacgtggatggcgccggagcccgtgtccatccacgagcgccgccgccggctgctccaggggatgggcctcacgagcagcaaggacctcctccgcagccggaacgcgagggcgaggcttccgcctgacatccctcgctacgtaccccggagacagcagcagctacccgcggccgaagcgccgagcacaacgagggccgcgccggccgtggccgcggcacttcccgagttcgcggaacaccaccctaacgacgccgtcttgacccggtcatgctccgacagccgtctcgtcgtccgcggaggcggcgtaaggaagatgcaaccgttccgccgcgtgtgctcgctgccgcactctctgcaaggatcgccagcccacaaggcactcagcgcggctgcccggtgtccgttatcatcagcgccgtcaaaggacggaggaactagcaaaaccactgccggtgacacgggtggtggtgggttcaggaacccgaacaacgacagggaattccaggcgaacagccaattgaacagtgctcagcgcagtgctccgctgaacaaagacgagctcgagcagttcatcagccacgctccgctcgtgacgcagcccgtgcgccgcagccagagccagccggtgccgggggctggaacggccaagggcgacgaaaaaccggctgagaagagaagaacacggtggctgaggaacatcaagctcgtcgcgtctgctgccgggctcagaaacgacaaggacggcggcggcggcagcagatcggcccggacgccttcggtgaccatgtccaagtcggcttcgaccaccgctgccatgtcgtcggccgccacgggccccgagcggctcaaggtgcaccactacggcaagtccagcagggagctgaccgggctgtacatgcggcaggaggtgcgcgcgcacgagggctcgatatggagcatcaagttcagccccgacggccggttcctcgccagcggcggagaggacagcgtggtgcgcgtctgggaggttctggacgtggacgcctcctcgtccgccgtggcgcatgagatggagatgtccacctccctgcctccgcagccgccgcctgcatccaccgacggcggcaggtcggtggcagcgccctggctggcagcgcagctgtccaggaaggtgaggagggggaggagcagcaaggacgcgctcccggagcacgtcatcgtgccggagtccgttttcgcgctcgccgagcagccgtcgtgcgctttggagggccaccaggatgacgtgctcgatctgtcgtggtccaagtcccaggttcgcaggccgttccagtcactcttgcttgccattgtcgacgcaactgctgctgctcagcgaacagagggcctgacgtgccgtgggcgccattgttggttgcagcagctgctgtcgtcatccatggaccacacggtgcggctctggaacgtggacacgaagacgtgcctgagggtgttcccgcacagtgactacgttacctgcgtgcagttcaatccagcggacgatggctacttcatcagcggctcgctggactgcaaggtgcgcatctggagcgtaccagaccggcaggtcgtcgactggagcgacctcaacgacatggtcaccgcggcgtgctacaccccagacggccaggctgcgattattggttcgcacagggggagctgccgattctacaagacaacagattgtaagcttaaccaggaggcacaaatcgacatgagcataacgaagaaacgcaggtcccaggccaagaagatcaccggattccattttgcgccggggaacccgtcagagatcttggttacatcggcggactcgcagataagggtgttcaacggcatcagcgtcctccagaaattcaaaggcttcaagaacaccagcagccagatctcggcgtcctacaccgccgacggccgctacgtcgtgtgcgccagcgaggactccaacgtctacgtgtggcgccgcgtccccggcagcgtcggcggcacgggcggtgccagcatcagcgtcagggccaagacgtggctcaccagccggtcctacgagtacttcttctgccgagacgtgtctgtggccgtgccgtggcccggttcgccgtgcatcccgtgcgacgcgtcccggcgcgtcaacggcaacggcaacagcgacacgcccaggagacagacctcgtcgcgccgcgacgacgacgtcgttggcgctggctgcgtaccgcgggggaccatgtccgggacgatggcgtaccatggggggcagttgttgcagccggagctgtcccgtcgtgagtcacagtcgtccgctcggtggcacggcggcgctgagggcggcaacgcgtggggtatggtcttggtgaccgcgagccgtggcggtgagattcgggtgtaccagaacttcggcctgcctttgaccaatctcttccactagctagaaaggatagccagagtttgctggtgctgtctcgtttctggtctaatatttccaaaggaatagattttgcagatgagctgatgtacaggctgatataccagaagaacattttcaggaaaaaaatagacgggaaggatagaagtgcagtgt

SEQ ID NO: 120760 - DNA, 587 bp, Zea Mays
gcaggcattaactaaactctggagtccttgtgacttccccttccctataaattccactaacgtatgcttgaactgccaatagaacatcaagtttagattcttgttcacgcgttcaaagatgcgtggggaaaacaacatagtcctccttctcctcctcctgtttgctgtaatttctccgaaccaagtaattggtagtgcttgtactccggaacagaaggctgccatcctaaatcaatgcgaagagtacatcaagcctggatacccccttatactgccatcgtacgccagtgtgtgttgcgacaaggtgagagatgtgccaaatagggacatgaactgcatcgtcgatctgctcacgcctccagagaaggcgaaacacggtgtcgacaagataaaacgtctgaaagatctctgcgacaactcgcctcatcatcaggtggtggtgtagacagacagcagctgtcattgctaatggagttcggaggcaagatatatggtctagtaaataaagtcgtcgatcaaagcatgacaactgtcaaatgtatctttgattaagtaaagtatcactcaagatttccagtttctttttt

SEQ ID NO: 120761 - DNA, 575 bp, Zea Mays
gcaggcattaactaaactctggagtccttgtgacttccccttccctataaattccactaacgtatgcttgaactgccaatagaacatcaagtttagattcttgttcacgcgttcaaagatgcgtggggaaaacaacatagtcctccttctcctcctcctgtttgctgtaatttctccgaaccaagtaattggtagtgcttgtactccggaacagaaggctgccatcctaaatcaatgcgaagagtacatcaagcctggatacccccttatactgccatcgtacgccagtgtgtgttgcgacaaggtgagagatgtgccaaatagggacatgaactgcatcgtcgatctgctcacgcctccagagaaggcgaaacacggtgtcgacaagataaaacgtctgaaagatctctgcgacaactcgcctcatcatcagacagacagcagctgtcattgctaatggagttcggaggcaagatatatggtctagtaaataaagtcgtcgatcaaagcatgacaactgtcaaatgtatctttgattaagtaaagtatcactcaagatttccagtttctttttt

SEQ ID NO: 120762 - DNA, 509 bp, Zea Mays
atgcgtggggaaaacaacatagtcctccttctcctcctcctgtttgctgtaatttctccgaaccaagtaattggtagtgcttgtactccggaacagaaggctgccatcctaaatcaatgcgaagagtacatcaagcctggatacccccttatactgccatcgtacgccagtgtgtgttgcgacaaggtgagagatgtgccaaatagggacatgaactgcatcgtcgatctgctcacgcctccagagaaggcgaaacacggtgtcgacaagataaaacgtctgaaagatctctgcgacaactcgcctcatcatcaggtgctgaaagcctcacaaatcccgttttgcgtacaacaaggtggtggtgtagacagacagcagctgtcattgctaatggagttcggaggcaagatatatggtctagtaaataaagtcgtcgatcaaagcatgacaactgtcaaatgtatctttgattaagtaaagtatcactcaagatttccagtttctttttt

SEQ ID NO: 120763 - DNA, 579 bp, Zea Mays
tgttttgtttaacagatttttggacatagttatatagaagttgcaattacaccagaccagcagttgcaatcattgtttgtttaacagatttttgaacatagttatatagaagttgcaatcataccagaccaccagttgcaattacaccagagagcagttgcgatcattgttttgtttaacagatttttggacatagttatatagaagttgcaatcacaccagaccagcagttgcaattacaccagacaacagctgcaatcattgtttgtttaacaaatttttggacatagttatatagaagttgcaatcacaccagaccagcagttgcaattacaccagacagcagttgcaatcattgtttgtttaacagatttttagacatagttatatagaagttgcaatcacaccagaccagaagttgtaattacaccaaaccagaagttgcaatcatatgtttttaacaaaatttcccagagttattcagtacttgcaatcacatcagagcaactcagcagttgcatccacaccacaccagcagttgcaattacaacacaccagcagttgcaatcattttgttta

SEQ ID NO: 120764 - DNA, 2488 bp, Zea Mays
tttcaccccttgttttcgacatgccattgctcctccctcaaacgccacggcttttttcacgaaccaactgtgacaatccagtcaattctgatctctaggccctcgcttccccttcctgtggatgccatcggggcgctcaccgggacaacatactcctcgacagcgacgccgccgcgcttccttgaggaaagctcgtagctgcccccgcgcaaagctccggtctttcttggccctgacccctcctccccgccgccggcgccgcgtgagcacgccgcgcttggcttgatgctcgacttctgcgcgccccacgggcccgccaagctcccggttgcgtctgtcgctggggtgcgagtcgccggcaggtggttgtggcgatcggcggcggttggggcggtgcgccatggcgtctccgcgcgggcctcatccttcggttcccggatcgggctcgattctcagaattttcacacaagggacctctcccagttgttgtggatcggtccggtgccaggtgacatcgcagagattgaggcctactgccgcatattccgtgctgccgagcagctccatactgcagtcatgtcagcactctgtgatccagagacaggagagtgccctgtacgctatgatgttgaatcagaggatctgccggtgctggaagacaaggttgctgccgtccttggctgcatgctggcgttgctgaaccggggaaggaatgaggtgctctcagggagatcaggtgttgcaagtgccttccagggatctgaggacagcactgctgataggatcccaccgctcgccttgttccgtggagacatgaagcgttgctgtgagagtatgcaggtggcgcttgcaagctaccttgtgccaagtgaacctagggggttggacatatggaggaagctgcagagattaaagaacacttgttatgatgcaggtttcccgagggctgatggttatccatgtccgacattgtttgcaaattggtttccagtgtacctttcgattgtgtcagatgattcaggaatggatgagctagaggttgcattttggaggggaggacaagtcagtgaggagggactggcatggctacttggaaagggattcaaaactattgttgatctccgggaagaagatgttaaagatgatttgtacctttcagcagttcaggaagctgtctcatctgggaagatagaggtggtgaatatgccagttgagattggaactgcaccatcagctgaacaggttcagcaatttgcagctcttgtgtcagatggcgcaaagaagcccatttatctctacagcaaagaaggtgtttctaggacgtctgcaatggtctcaagatggaaacagtatgttactcgttcagagagattggctgtccaaaatcactctctaaatgggaatggtaacatcctgacaaatcacaagaccatgcagcacactggcataccaagttcctctccgaatggagctgaaaatggtatgataacagaatctgataggaccatgaacaatggggaatcaagtgagatagacatagatacagctcgtcataatctggaggtcactaatgccctttgtaatgatcaaagcactcaacaaggtgaaatgcctgacaccgtggcagaactcttgtcaaactttaaactggagagtaacccccttaaagcacaatttcctacttgcgatgttttctctagaaaagagatgaccaagttttttagaagcaaaacagtttatccaaaatctgttctgaactctaggagacgatcaagtagcttggttataaggagaaaacaaaatctctgcacggagcgtagtggaaccaatgactatgaagcagcagagtttgcagttctcagaagttcaaatggaaaatcatttgacagtgattatattctatcagttgcttcaggtatcactgatggaaaaccttcaaacaatgaagcctcattaattgaggaaaaggaaagggaagtttcagttgccactattgacactagagcatctgccaacagttctaatagaaaggttcaggttggatcacaagaatctgctgaaaagaatagtaccccttatcttgagagaaacaaatcagataatgttgatagaaatatgtgtgcatctgcaactggtgttgttagactccagtcaagaagaaaagcagagatgtttctagtacgtactgatggattttcttgtactagagaaaaagtaacagaatcatctctggcttttacgcatcctagtacccagcaacagatgcttatgtggaaatcacctccaaagactgtcttacttttgaagaaattaggagatgagctcatggaagaagctaaagaggtgaatgccaaatttccatttagagcatatatattgtttttctttccttgattcttcagaaacccacacaggttgtattcatttcttgtatctggtatcaatggattactcatctcaaggaagctttagggtctttgacatatat

SEQ ID NO: 120765 - DNA, 2259 bp, Zea Mays
atgtcagcactctgtgatccagagacaggagagtgccctgtacgctatgatgttgaatcagaggatctgccggtgctggaagacaaggttgctgccgtccttggctgcatgctggcgttgctgaaccggggaaggaatgaggtgctctcagggagatcaggtgttgcaagtgccttccagggatctgaggacagcactgctgataggatcccaccgctcgccttgttccgtggagacatgaagcgttgctgtgagagtatgcaggtggcgcttgcaagctaccttgtgccaagtgaacctagggggttggacatatggaggaagctgcagagattaaagaacacttgttatgatgcaggtttcccgagggctgatggttatccatgtccgacattgtttgcaaattggtttccagtgtacctttcgattgtgtcagatgattcaggaatggatgagctagaggttgcattttggaggggaggacaagtcagtgaggagggactggcatggctacttggaaagggattcaaaactattgttgatctccgggaagaagatgttaaagatgatttgtacctttcagcagttcaggaagctgtctcatctgggaagatagaggtggtgaatatgccagttgagattggaactgcaccatcagctgaacaggttcagcaatttgcagctcttgtgtcagatggcgcaaagaagcccatttatctctacagcaaagaaggtgtttctaggacgtctgcaatggtctcaagatggaaacagtatgttactcgttcagagagattggctgtccaaaatcactctctaaatgggaatggtaacatcctgacaaatcacaagaccatgcagcacactggcataccaagttcctctccgaatggagctgaaaatggtatgataacagaatctgataggaccatgaacaatggggaatcaagtgagatagacatagatacagctcgtcataatctggaggtcactaatgccctttgtaatgatcaaagcactcaacaaggtgaaatgcctgacaccgtggcagaactcttgtcaaactttaaactggagagtaacccccttaaagcacaatttcctacttgcgatgttttctctagaaaagagatgaccaagttttttagaagcaaaacagtttatccaaaatctgttctgaactctaggagacgatcaagtagcttggttataaggagaaaacaaaatctctgcacggagcgtagtggaaccaatgactatgaagcagcagagtttgcagttctcagaagttcaaatggaaaatcatttgacagtgattatattctatcagttgcttcaggtatcactgatggaaaaccttcaaacaatgaagcctcattaattgaggaaaaggaaagggaagtttcagttgccactattgacactagagcatctgccaacagttctaatagaaaggttcaggttggatcacaagaatctgctgaaaagaatagtaccccttatcttgagagaaacaaatcagataatgttgatagaaatatgtgtgcatctgcaactggtgttgttagactccagtcaagaagaaaagcagagatgtttctagtacgtactgatggattttcttgtactagagaaaaagtaacagaatcatctctggcttttacgcatcctagtacccagcaacagatgcttatgtggaaatcacctccaaagactgtcttacttttgaagaaattaggagatgagctcatggaagaagctaaagaggttgcttcatttctgcatcatcaagaaaagatgaatgttcttgtggaacctgatgttcatgatacatttgctagaattccaggttatggttttgtgcaaaccttctatactcaagataccagtgaccttcatgagcgaattgattttgttacatgcttgggtggtgatggactcattttgcatgcatcaaacttatttagaacttctgtaccacctgttgtctccttcaatctcggatctcttgggttcttaacttcacataatttcgaaggtttcagacaagatttgagagatttaatccatgggaacaacacacttggaatttatataactcttagaatgcgtctaagatgtgagatctttcgcaaaggaaaatcaatgcctggtaaagtgtttgatgtgctgaatgaagttgttgttgatcgaggttccaatccatacctatcaaaaattgagtgttatgagcataaccaccttatcactaaggtatga

SEQ ID NO: 120766 - DNA, 577 bp, Zea Mays
atatatataggtgcaagctgacggggtgatagttgcaacaccaactggcagcacagcatattctactgcagcagggggatcaatggttcatccaaacgtcccatgcatgctgtttactccaatctgccctcactcactgtcatttagacctgtcatccttccggattctgcccggcttgaattaaagataccagatgaggcaagaagcaatgcatgggtttcgtttgatggcaaaaggaggcagcaactgtcaagaggagattctgttcgtatatccatgagtcagcacccactcccaactgttaataaatctgaccaaacgggtgattggttccgcagcctgatcaggtgtctcaactggaacgagagattggaccagaaggcattataggcactagaaaattttttattgtttctgtacatatgtaaatttatacacatatagttttgtttttctgccaacatgtacaacgtgtaacatcaaagaatcttgcacgtaaggagctccgtagcttactttatccatgtattcacgtgcttcacaaatcaacttatatattatatgcccgtacgttgc

SEQ ID NO: 120767 - DNA, 228 bp, Zea Mays
atggctgtgttgcactgcgatgacgctgaagcgtgcgcaaaggcgagcgcagcgatgctggattgctgggaaggccgagcaagaccagggtgcgacggtgccgcggcatcagctgacggccacgacgaagagcagtgcttgaggaggaacaccagcgagctgcagtgcagggcggcgtccagggagggaggtgaggacgtgcaacatggaggagatggcgtggcctag

SEQ ID NO: 120768 - DNA, 2495 bp, Zea Mays
gtttttgggataaaattcttaacatccttttagagttgctctgagcccttcaatcttcttccaaacaaacccttagctatattttcttatcctcacgatccaccgaacaaaattttccagtaaaaaaaatacagacctcttaaatccattttgtactggtgttggtcaaaccactacaaggcatctttattctagtggagcctacttgcctgctgggccatcatattcatacgccgcctccatacagctcggaaagatatccctccgatccagttccggcatgcttaatcttcgggtcaacggtttcgatggaaacccagtgagacactgcggccttcgcccttccatcttcatccagctggggaagataaccctccgatccggcgcaggcatgcttaatctgtccaggtataaagcacaaaaaagtgatcctctcatctaattgagactgttgagtatctcacatattcttgtgcttgcttgctgggatcggctttggctcaggagcatgagcgaaaagatatgattcttcatttctccttctggctataagttttagtttctttatgatgggaaataaaactggtaagcctgtcttcagtgagctcaaatccacagagtttagtttattggagagcactctagtacaggatcattgtgcaatcccgacttgtgtaccattggattttctgaaggccatcacgagtgatttctctaaggagcaagagctaggaagaggtgggtttggagttgtttataagggccttcttaaaaatgggaaggcgatagctgtgaagaagctttctgaaatgaacctagatgacgatcagttccataatgaagttacttatcttttcgggttgaagcacaaaaatattgtccagctaaaagcttattgtgctgaatcacggtgggaagcaatcgaattgcgcagaaaatatgtcatggctgaatctcggaaaaggctgctgtgctttgagtgtataaataataagagccttgataagcacctttctgctgaatctcatggggttgagtggcatatcagatatgagataatcaaaggaatttgccatggtttgcattaccttcacacagattgccaaattgttcatttggacctaaagcctgagaatatattgctagatgacaacatggagccaaaaattacagattttggtatgtccaggctctttggtctacaacaatccaaaatcatcaccaaaacttgtggaggaacacttggatacatggcaccagaatacttactaaaagggttgatttcagtgaaggccgacatattcagtttgggcgttataatcatagaggtgatgaccggaggccggaattatcccacttgtgaaaaatcttgcgagcaattcgctgttgatgtggttggacgttggaggaagaggttattggaggaggcaggaaggtacacacccttggaaaaatacgttgagcaagtagagacatgcatcttgataggattgatgtgtgtcgatgatgatcctaacaaaaggcccacgacattggacattatcgaaaggcttaccaaagtagatgtcacgaacacggacagagggccacccaaaactctggaggccgcgacagggcttacaggccaccccaacctcgcaactagatcatttcttgacaggttccgccgaaccatcgtgatagggatgctgaagaaggccctgaaaatccaggacgtatcgcagttggagcagctcctggccaaggaggtgctgctggagctccacaaaatcggcacgaatgcaactggaaacagatcgttcctggagaggctccacgcaagcatcaccatggctacgctggttcaggcgctgcattccttggacttggatccatcggcggcgctgcgtatggaggtgctgttcttggcgctggagaatatgcgtggaaaaaacaactcaaggcgaagaagcgaggacgtccttgagctggaggagcggccagagcagatccggtcggtgctggaggctggcaccagggccaggctcagtgatgaggaacacatgccgtcggtgtctgtgcaggctgaagaccaggcctttcccaaaccgaagttggccaaagtacgcgccaccgccccggtgtgcgtgtcagcagtgtggttggcggccggcataggattcctgtgtggattcaccctaggagagatgaggggattaaggcggacgagggtccacgaacgcacgtgatgccaatgtgcccacatgacatggccagaaaatgtcactgcggtggaccatgcatgcacgaattaaggagcaccagttagaatacgtattctagattcattttacaaattctgtatttaaaaggaacttgtgcattgtgacagaggcggcggactggatcaggttgtattgtttctgctggtgtcctgtcgtatgtataagccacggagtgtatcggatgaaattgaacagagaaatgtgcaatatagaaccgtgttgagggcagcc

SEQ ID NO: 120769 - DNA, 2415 bp, Zea Mays
gtttttgggataaaattcttaacatccttttagagttgctctgagcccttcaatcttcttccaaacaaacccttagctatattttcttatcctcacgatccaccgaacaaaattttccagtaaaaaaaatacagacctcttaaatccattttgtactggtgttggtcaaaccactacaaggcatctttattctagtggagcctacttgcctgctgggccatcatattcatacgccgcctccatacagctcggaaagatatccctccgatccagttccggcatgcttaatcttcgggtcaacggtttcgatggaaacccagtgagacactgcggccttcgcccttccatcttcatccagctggggaagataaccctccgatccggcgcaggcatgcttaatctgtccaggagcatgagcgaaaagatatgattcttcatttctccttctggctataagttttagtttctttatgatgggaaataaaactggtaagcctgtcttcagtgagctcaaatccacagagtttagtttattggagagcactctagtacaggatcattgtgcaatcccgacttgtgtaccattggattttctgaaggccatcacgagtgatttctctaaggagcaagagctaggaagaggtgggtttggagttgtttataagggccttcttaaaaatgggaaggcgatagctgtgaagaagctttctgaaatgaacctagatgacgatcagttccataatgaagttacttatcttttcgggttgaagcacaaaaatattgtccagctaaaagcttattgtgctgaatcacggtgggaagcaatcgaattgcgcagaaaatatgtcatggctgaatctcggaaaaggctgctgtgctttgagtgtataaataataagagccttgataagcacctttctgctgaatctcatggggttgagtggcatatcagatatgagataatcaaaggaatttgccatggtttgcattaccttcacacagattgccaaattgttcatttggacctaaagcctgagaatatattgctagatgacaacatggagccaaaaattacagattttggtatgtccaggctctttggtctacaacaatccaaaatcatcaccaaaacttgtggaggaacacttggatacatggcaccagaatacttactaaaagggttgatttcagtgaaggccgacatattcagtttgggcgttataatcatagaggtgatgaccggaggccggaattatcccacttgtgaaaaatcttgcgagcaattcgctgttgatgtggttggacgttggaggaagaggttattggaggaggcaggaaggtacacacccttggaaaaatacgttgagcaagtagagacatgcatcttgataggattgatgtgtgtcgatgatgatcctaacaaaaggcccacgacattggacattatcgaaaggcttaccaaagtagatgtcacgaacacggacagagggccacccaaaactctggaggccgcgacagggcttacaggccaccccaacctcgcaactagatcatttcttgacaggttccgccgaaccatcgtgatagggatgctgaagaaggccctgaaaatccaggacgtatcgcagttggagcagctcctggccaaggaggtgctgctggagctccacaaaatcggcacgaatgcaactggaaacagatcgttcctggagaggctccacgcaagcatcaccatggctacgctggttcaggcgctgcattccttggacttggatccatcggcggcgctgcgtatggaggtgctgttcttggcgctggagaatatgcgtggaaaaaacaactcaaggcgaagaagcgaggacgtccttgagctggaggagcggccagagcagatccggtcggtgctggaggctggcaccagggccaggctcagtgatgaggaacacatgccgtcggtgtctgtgcaggctgaagaccaggcctttcccaaaccgaagttggccaaagtacgcgccaccgccccggtgtgcgtgtcagcagtgtggttggcggccggcataggattcctgtgtggattcaccctaggagagatgaggggattaaggcggacgagggtccacgaacgcacgtgatgccaatgtgcccacatgacatggccagaaaatgtcactgcggtggaccatgcatgcacgaattaaggagcaccagttagaatacgtattctagattcattttacaaattctgtatttaaaaggaacttgtgcattgtgacagaggcggcggactggatcaggttgtattgtttctgctggtgtcctgtcgtatgtataagccacggagtgtatcggatgaaattgaacagagaaatgtgcaatatagaaccgtgttgagggcagcctttcatgcttctgcta

SEQ ID NO: 120770 - DNA, 502 bp, Zea Mays
attctacagccccccgcgtcgtcgtgagggacggcacgggcggttcccgcaacgccgccaccaaccctctcgctcctcatctccctcccctcgccgccgtccgagctcgctggcggaggtccgcctggcggcaatgaaggtggcggcggggcctctttcccacgggctctctccccacgctcgccatcaggcttgtcaccatggtagcgacgtcggtggtggctgacttttgagtggcgggtgctctcgtggttcggcccggtggtggcagatccggtgacgccggatccggtagtcctcgatccgatccttcgttgtggacgccagcgtggattagcacggaaaagtctcctttgctccactgacaatgagctttaaattttgcactataaaatttaaggatagtaagattggactctatttctattaatttttgaactaaaatatttttagggccccaataatttatgaagaaacatttggatcgcgatccattaccacc

SEQ ID NO: 120771 - DNA, 2467 bp, Zea Mays
attctacagccccccgcgtcgtcgtgagggacggcacgggcggttcccgcaacgccgccaccaaccctctcgctcctcatctccctcccctcgccgccgtccgagctcgctggcggaggtccgcctggcggcaatgaaggtggcggcggggcctctttcccacgggctctctccccacgctcgccatcaggcttgtcaccatggtagcgacgtcggtggtggctgacttttgagtggcgggtgctctcgtggttcggcccggtggtggcagatccggtgacgccggatccggtataaagcacaaaaaagtgatcctctcatctaattgagactgttgagtatctcacatattcttgtgcttgcttgctgggatcggctttggctcaggagcatgagcgaaaagatatgattcttcatttctccttctggctataagttttagtttctttatgatgggaaataaaactggtaagcctgtcttcagtgagctcaaatccacagagtttagtttattggagagcactctagtacaggatcattgtgcaatcccgacttgtgtaccattggattttctgaaggccatcacgagtgatttctctaaggagcaagagctaggaagaggtgggtttggagttgtttataagggccttcttaaaaatgggaaggcgatagctgtgaagaagctttctgaaatgaacctagatgacgatcagttccataatgaagttacttatcttttcgggttgaagcacaaaaatattgtccagctaaaagcttattgtgctgaatcacggtgggaagcaatcgaattgcgcagaaaatatgtcatggctgaatctcggaaaaggctgctgtgctttgagtgtataaataataagagccttgataagcacctttctgatatggctgcagcagttccagaaccacaagtgggtgatctcaccaatttgttcatttaaatgttcctatacagctgaatctcatggggttgagtggcatatcagatatgagataatcaaaggaatttgccatggtttgcattaccttcacacagattgccaaattgttcatttggacctaaagcctgagaatatattgctagatgacaacatggagccaaaaattacagattttggtatgtccaggctctttggtctacaacaatccaaaatcatcaccaaaacttgtggaggaacacttggatacatggcaccagaatacttactaaaagggttgatttcagtgaaggccgacatattcagtttgggcgttataatcatagaggtgatgaccggaggccggaattatcccacttgtgaaaaatcttgcgagcaattcgctgttgatgtggttggacgttggaggaagaggttattggaggaggcaggaaggtacacacccttggaaaaatacgttgagcaagtagagacatgcatcttgataggattgatgtgtgtcgatgatgatcctaacaaaaggcccacgacattggacattatcgaaaggcttaccaaagtagatgtcacgaacacggacagagggccacccaaaactctggaggccgcgacagggcttacaggccaccccaacctcgcaactagatcatttcttgacaggttccgccgaaccatcgtgatagggatgctgaagaaggccctgaaaatccaggacgtatcgcagttggagcagctcctggccaaggaggtgctgctggagctccacaaaatcggcacgaatgcaactggaaacagatcgttcctggagaggctccacgcaagcatcaccatggctacgctggttcaggcgctgcattccttggacttggatccatcggcggcgctgcgtatggaggtgctgttcttggcgctggagaatatgcgtggaaaaaacaactcaaggcgaagaagcgaggacgtccttgagctggaggagcggccagagcagatccggtcggtgctggaggctggcaccagggccaggctcagtgatgaggaacacatgccgtcggtgtctgtgcaggctgaagaccaggcctttcccaaaccgaagttggccaaagtacgcgccaccgccccggtgtgcgtgtcagcagtgtggttggcggccggcataggattcctgtgtggattcaccctaggagagatgaggggattaaggcggacgagggtccacgaacgcacgtgatgccaatgtgcccacatgacatggccagaaaatgtcactgcggtggaccatgcatgcacgaattaaggagcaccagttagaatacgtattctagattcattttacaaattctgtatttaaaaggaacttgtgcattgtgacagaggcggcggactggatcaggttgtattgtttctgctggtgtcctgtcgtatgtataagccacggagtgtatcggatgaaattgaacagagaaatgtgcaatatagaaccgtgttgagggcagcctttcatgcttctgcta

SEQ ID NO: 120772 - DNA, 1303 bp, Zea Mays
gtgtggtgcagagaccttccttcctgatataggaaggcagggttcatgagcggcggcacgcctgcagcaagcagtagcctgcgggcagcactctcatactgcgtgaggcaagtccgcgcctatgactaccaccactacctctgccttctccacctggccccggccgtgcgcaaggccgcgttcaccttccgcgccttcaacatccagacagcaagggccatggatgtggtgtccgacccccggaccggcctcatgcgcctcctctggtggaaggaggcggtcgacaaggtctttggcaacaagctggtcgagcacctagttgcccacgcgctctcttcggtcatcgcagaccataaggttagcaagcactggctgaagcggtccgtggaggcgaggatcaacgacaccaaccgtgaggaaggcaccattcctgggacgagcgcggagttggagaggtatgcagaggacacccagtccaccatcctttacatgaccctgcaggctggcggaatacagtctaccgtggctgaccacgccgcctctcacatcggcaaggccagcgggcttctgttactgctcaaggcgctgccgcaccatgtaaataagcaagggacggtacattatatcccagctagtgtggccgaggaatgcggcctgctcatcacacgggagggtggcaggtcggaggtcagggcgggcgtgaggctgccagacgtagttttcaaggtcacatctgttgcagaggctcacctgcacaaggcgcgggagttggcatcgtccgtgcccaaagaggcgatccctgtgctcctcccagccttgccggcctaggtcctcctagataccctgcgaaggtgtgagttcaacgtgtttgatcctcggctgtcgaggggagtccacgaggtctctcctctgtggtaacagctgaagcttaactggaacgcgtggcgaagcaggtactaatgaggaggaggaactttttgccctcaaccatgggagctgctgttgttccttgtagcaaaaagctttttattggggggtttttgacatagcagagattgaataagatgagtagggtctgctacttgcagcagatttgaagctgttgaatatgtgtcgtgctttctgttgtgtttgtgggttgggctcatttacattgcacaattgcaacactgacaatgcctattttatttttgttttggaacatacaatgcctgtttgtattcatacagcagaaagcagacactatttttttgataaactcaattagttactctatagtttataaaattcctgttttcggttc

SEQ ID NO: 120773 - DNA, 100 bp, Zea Mays
aatgtttgttggatgcttagctaagcaattcaaaggtatgttttcaaatagttcaaagcaatgtctacattatttacatagacaaacaatctaacaagtg

SEQ ID NO: 120774 - DNA, 1986 bp, Zea Mays
caccaccacacagacacaccaataatgggagcgaggagtagtagcacttggacgcagcacctcctgctgctgttcttcctcgtcctcggcgtcgctaccaacagcagccattcttccaccatcaacatcaccaaccgatgctcctacacagtgtggccggccgccacaccagtgggcggcggcatgcagctggagcctgggaagacctgggtgcttcaagtgcctggcaacacgcaaagtggccgcgtgtgggcgcgcacgggctgttcgttcgacggccccggaaagaaatcctgccagacgggtgactgcggcggcgtgctggcatgcactaccagcggccaaccgccgatgacgatggcagagttcaccctgagtgactccaacaacatggacgactacttcgacatcaccgtcgtcgacggctttaacttgcccatggactttctgccggtgccgtcgtccaaggggtcgtcggggtgcagcaggggtccacgctgcgccgccgacatcacgtcgcagtgccccgatgagctcaaggtgccagggggttgccgcagcgcgtgcaacggatcttcctgcgacgccagcacggtaaacagcaacacggttttctacgctcggatgtgccccgacgcctatacctacgccactgataatggtcccgttacatattcgtgtccgtcaggaacagattaccagatcattttctgtccccccgtcgatcttgtgtcattgtctccacctccaacttcaccattgtctccgcctccaacttcacctactgcaacaaatggaacaagcagcatcacatcctcatcaaaatccaagaggccaagaatatttggttatgttctaggtggttcaataggtggcttcattttgatcgcatccttggtctttttcttcgtcctgcatagacgacgattgcatcgacgccaagagatgcaggaagaggaggaagcagagtttgggaggctaccagggatgcccagacggttcacatttgagcagctacaggaagcaactgatcagttcagagagaagctgggggaaggaggattcggctccgttttcaaaggacgttttggtgagcaagcaattgcggtgaaacgcttggatagagctggtcagggaaagagggaatttctggcggaggtccagaccatcggtagcattcaccatatcaatctggtgagggtaatcggtttctgcgcagagaaaactcacaggctcttggtttatgagtacatgcccaatggatccctggaccagtggatcttttgccggcaggggcagggcgatgacgacgctcctcgcctgcattggcaaacgcgacacaagattattgctcatgtagcaaagggcctcgcctatcttcacgaggagtgcatgaagagagttgctcacttggacgtgaaaccacagaacatcctcttagatgacaacttcgacgctaagctctctgattttggactctgcaagctcatcgaccgggataagagccaagtggttactagaatgagaggcacgcctggatatctagctccagaatggttgacgtcgcacatcactgaaaaggctgatgtatatagctttggcgtggttgtgatggagatcatcagtggaaggaagaacctggacacttctcggtctgaaaagagctttcaccttattaccttgctagaggagaagttgaggagtgatcgcttggtagatttgattgatatgtgcattactagtgacagtcaggcacaggagcaagaagcaattcagatgatgaagctcgcaatgtggtgtttgcagattgattgcaaacgaaggcccaaaatgtccgaggtcgtaaaagtcttggaaggctctatcagtgtcgaaactgacatagatcataactttgtcgtgacaaatccaccaagctttagcgctcctagaattgtggtcatgtcagctccacctctagcttcagaagtgtcaggcccaaggtga

SEQ ID NO: 120775 - DNA, 2054 bp, Zea Mays
caccaccacacagacacaccaataatgggagcgaggagtagtagcacttggacgcagcacctcctgctgctgttcttcctcgtcctcggcgtcgctaccaacagcagccattcttccaccatcaacatcaccaaccgatgctcctacacagtgtggccggccgccacaccagtgggcggcggcatgcagctggagcctgggaagacctgggtgcttcaagtgcctggcaacacgcaaagtggccgcgtgtgggcgcgcacgggctgttcgttcgacggccccggaaagaaatcctgccagacgggtgactgcggcggcgtgctggcatgcactaccagcggccaaccgccgatgacgatggcagagttcaccctgagtgactccaacaacatggacgactacttcgacatcaccgtcgtcgacggctttaacttgcccatggactttctgccggtgccgtcgtccaaggggtcgtcggggtgcagcaggggtccacgctgcgccgccgacatcacgtcgcagtgccccgatgagctcaaggtgccagggggttgccgcagcgcgtgcaacggatcttcctgcgacgccagcacggaacagattaccagatcattttctgtccccccgtcgatcttgtgtcattgtctccacctccaacttcaccattgtctccgcctccaacttcacctactgcaacaaatggaacaagcagcatcacatcctcatcaaaatccaagaggccaagaatatttggttatgttctaggtggttcaataggtggcttcattttgatcgcatccttggtctttttcttcgtcctgcatagacgacgattgcatcgacgccaagagatgcaggaagaggaggaagcagagtttgggaggctaccagggatgcccagacggttcacatttgagcagctacaggaagcaactgatcagttcagagagaagctgggggaaggaggattcggctccgttttcaaaggacgttttggtgagcaagcaattgcggtgaaacgcttggatagagctggtcagggaaagagggaatttctggcggaggtccagaccatcggtagcattcaccatatcaatctggtgagggtaatcggtttctgcgcagagaaaactcacaggctcttggtttatgagtacatgcccaatggatccctggaccagtggatcttttgccggcaggggcagggcgatgacgacgctcctcgcctgcattggcaaacgcgacacaagattattgctcatgtagcaaagggcctcgcctatcttcacgaggagtgcatgaagagagttgctcacttggacgtgaaaccacagaacatcctcttagatgacaacttcgacgctaagctctctgattttggactctgcaagctcatcgaccgggataagagccaagtggttactagaatgagaggcacgcctggatatctagctccagaatggttgacgtcgcacatcactgaaaaggctgatgtatatagctttggcgtggttgtgatggagatcatcagtggaaggaagaacctggacacttctcggtctgaaaagagctttcaccttattaccttgctagaggagaagttgaggagtgatcgcttggtagatttgattgatatgtgcattactagtgacagtcaggcacaggagcaagaagcaattcagatgatgaagctcgcaatgtggtgtttgcagattgattgcaaacgaaggcccaaaatgtccgaggtcgtaaaagtcttggaaggctctatcagtgtcgaaactgacatagatcataactttgtcgtgacaaatccaccaagctttagcgctcctagaattgtggtcatgtcagctccacctctagcttcagaagtgtcaggcccaaggtgaaattccttgaggcagtttatttgtgtagagaatttagcagtcctctctaaaacaatatgttcagtgattggaattgtggatatcacaccattgtaaattgtctctagtgtacaacagaaattatgttgctcattcttatatagaaaaccaatagcatgtcct

SEQ ID NO: 120776 - DNA, 1539 bp, Zea Mays
gccacaacactgcccacacaccctccccctccgcaccgaaccccctggcgcgcgctgcgctcccttgaccggcacgtcatcccactgccatgcgggccccgcaccccgcgcgcccgggggccgcgccctcctcaaatgcccccacccctcgcctcccctgccctcccctcctccgcacaaacgcgtcgcatccgctccacaggatcctctgcgccaccgcaaccgtgtgaccgcccgtgccgccggcgatcccgatccgccgacccgtcccagccccgctcgcagccatgtcgccgtcggagccgacgcgggaggagagcgtgtacatggccaagcttgcggagcaggcggagcggtacgaggagatggtcgagttcatggagcgcgtcgcgcgctacgccgggggcgccggcggcggggacgagctctcggtggaggagcgcaacctgctgtccgtcgcctacaagaacgtcatcggcgcccgcagggcctcgtggcggatcatctcctccatcgagcagaaggaggaaggccgcgggaacgaggcgcacgccgcatccatccgcgcctaccgctccaagatcgaggccgagcttgcccgcatctgcgacggcatcctcgcgctcctcgactcccacctcgtcccatccgccggcggcgccgagtccaaggtcttctacctcaagatgaagggtgactaccacaggtaccttgctgagttcaagtcaggtgcagagaggaaggatgctgcggagagcaccatgaatgcctacaaagctgctcaggatattgctcttgctgatctggccccaacccaccccatcaggctcgggcttgctctcaacttctcagtgttctactacgagatcctcaactcccctgaccgtgcttgcaaccttgcaaagcaggcctttgatgaggcaatctccgaactagacagcctgggagaggagtcctacaaggacagcactctgatcatgcagctcctgcgtgacaacttgaccctatggacttccgacaccaacgaggacgccggagatgagatcaaggaagcagctgctgcccccaaagaatccgcccccgagggccagtaagacggatccgatctcccgacctgatgcgtgtctgctgatgtcggggagtttaccaggactgtgccgttcttgatttctgatagcttatcttctagtacacctcgtgttgttctcttcgtcacggcgccggtgcgtgtgcgctgaagctgcctgccattgccattgccgctgtttttaattaagcacacactctagatgttatgcccgcatgctatgtttcgattctcaaagttgataaatgatggctggatgctggttttcgtgctccaagcctgctgcttcttccagggaaaaaaagacctgcccttgttgcagcgttgttgtttagaatgacctatatttgactggtattctgttacggtggctttgcaaagctgtttgtttggtttaatgtctcggaataatatgaattggctgcattggacgtgtgtgtttcttttaccat

SEQ ID NO: 120777 - DNA, 692 bp, Zea Mays
attccgccaagaaccgcccaactgctcgtgctcctgtcgacctcccacccctccactccccgacggttggcggctatctcgccgaagcgacctagccagcacagccgagatggcgaagggcgacgggcgtggatgagggccacggggacttcgaccggctgtccaagttcctggtggtctgcctcaacgctatccgggatgcggtggcgcccgagaaaggcggcggcagcatccatggcgccggtgaccggggcatggagctctggaggtgttgctccacccaggcaccgtccgacgtgctcgacgctagcggcgcgtgcgccacggtgacgcagaccgcgtggctcgtctccactgcctgcgacatcgtcgctaggaaagagaggcatgggatggtcgtgtcttgccccttcctgctgtacctcgtctcgtcacaggataaggccgcgcaagtgcgatcgatatgcaaacccctgaagcctcttgggattcattcagtgagcttgcatcctggcgcatccattgaacactagatctctggactgaaaacttgtgagccggagtttcttattgctacccccgagaggcttcttattcttgtttcgttaaaggcgattgacatatcaggtgtatcaatgctggtcattgatggactgaaatgtttaataaaccacaatattaatgacaaaata

SEQ ID NO: 120778 - DNA, 177 bp, Zea Mays
gatctacatggtttaactacaaatacagaagaacacacattgatttttgccaattgtcctgcacaacatgatgacgagattcaaatatgtgatgaaggccaaacagatgccatgacaaataaatggataagggggaaaagtatgggcatgcaattggaaggaataagccaaggctta

SEQ ID NO: 120779 - DNA, 1503 bp, Zea Mays
cgcttcgcacgtccccgccgtcgcgctcgcctccctcctctttgttgcctccgcgtcgacctccaccccgctctccgacgcgcttaccgtcgtctcggatttctggtgcactctcttctctacgacgcgagcaagggcggcgcttgccatggcatcgacgggaaccaggcatcactctccctatctctcgggaggggagctgtttgagcggatgcccaccaggaacaatgtttcctagatcacgatgtttgggccacttttggaagaggtcagggatgacatgttttcaagcttggaggacatcaccaacgcaccatatgcagatctgctctctattaattcaatgaggaaaggaaaggggtcatagaaattagtcttggcagatggaggggaacgtctcaatgactgaggcacattttttcttgttagttagctcatggatttttatggtccaagaggagttgctgctatatgaatatgacaacacccattaatcaacataactatatgaatacaatctgaaaggaaggtcggtttggtcagaaacacatggaggtactgatggaggctatgaaacatataagagacatgccagtgaggagcaggagtagtttagtcggttcttgctttatgaagtggatgcaattagaaagacgtacgagcaggccaacatctcgcggtggctcgccctgggcaaccggacctgcccgaccacgatgcaggagctctgggacgacgccctcacccccaacgccactctctgacagctcatcgtcacctggttctcccgcctggttctgcattttgttttcttatctgtcaatcatgtttttccatattactgcaggcgggtctgattaattatttaaatgtagtttatcttagatactgtttgaacgtatgggatgttggaggacagaagacaatcatgtcttactggagaaaattctttgagcagactaatgggttagtttggtttgctgatagttcacacataaggaggcttgatgattgccgtgctgaactccacaatctcttgaaagaagaggataaaggtttacctatctagggagtgttctattgttgatccttactgtattgattttaacagagactagttggagcttcattgttgatttttgcaaataagcaagacatgcaaggagctctaaaaccaactggaatcgcgaaggtaagcgaacttcagtcatttattatatgcattagagacatgttttcctgtctgtgacatcatttttaacttgtactgtgttttttcggtcctcatggttgccaagattttacttagttcaatgtgggagcaaaaggatatgccaaattgaatgtagtttcatcagttatgctctattatggatgttcagaggcatccaatttcagtgtgtactgcaatacttgggtccacctgtacttggtagatgttctgcattttgttttcttataaattagatttggcttccattatgttgttctcttttggaacag

SEQ ID NO: 120780 - DNA, 2734 bp, Zea Mays
cgcttcgcacgtccccgccgtcgcgctcgcctccctcctctttgttgcctccgcgtcgacctccaccccgctctccgacgcgcttaccgtcgtctcggatttctggtgcactctcttctctacgacgcgagcaagggcggcgcttgccatggcatcgacgggaaccaggaggggagctgtttgagcggatgcccaccaggaacaatgtttcctagatcacgatgtttgggccacttttggaagaggtcagggatgacatgttttcaagcttggaggacatcaccaacgcaccatatgcagatctgctctctattaattcaatgaggaaaggaaaggggtcatagaaattagtcttggcagatggaggggaacgtctcaatgactgaggcacattttttcttgttagttagctcatggatttttatggtccaagaggagttgctgctatatgaatatgacaacacccattaatcaacataactatatgaatacaatctgaaaggaaggtcggtttggtcagaaacacatggaggtactgatggaggctatgaaacatataagagacatgccagtgaggagcaggagtagtttagtcggttcttgctttatgaagtggatgcaattagaaagacgtacgagcaggccaacatctcgcggtggctcgccctgggcaaccggacctgcccgaccacgatgcaggagctctgggacgacgccctcacccccaacgccactctctgacagctcatcgtcacctggttctcccgcctggttctgcattttgttttcttatctgtcaatcatgtttttccatattactgcaggcgggtctgattaattatttaaatgtagtttatcttagatactgtttgaacgtatgggatgttggaggacagaagacaatcatgtcttactggagaaaattctttgagcagactaatgggttagtttggtttgctgatagttcacacataaggaggcttgatgattgccgtgctgaactccacaatctcttgaaagaagagagactagttggagcttcattgttgatttttgcaaataagcaagacatgcaaggagctctaaaaccaactggaatcgcgaagagtcactctccgacagctcatcgccgcttggttctcccgccggtacacaaggtttaagaagcgctccgcggacttccacggccgcgctgccgatctcgtccacagcctccggggcacggcgatgcccaggagacaggccctcgaggaagagcaatgtagagaagagaaaggtatctcgactgttccaaagcacaagtatgcatccaaagcctgttccccaaaaggtgcgtgaactttgttcttgattttgtcagactaaatgtgggtgaactttgtactgcagtttttgtttaaataaactttggactgtttaaattactgatgcatccaaccactgtttttctttactgtttgttgatacacgaccagatgcccagttgagttcacccaaaaggtttattacaccacgaaaaaatctgagatgaaatgatttttatttaaatgaactttgtactgcagtatttacagacatattttggcacccgatcgattactgtttttgttttactaatagctgctgctattactatcttttgggtgaagtgaatcagatttttgtttaaatgaactttgtactgtttaaattattgatgcatagttttgaagacttaaacaatatgctgcatgaaaatctttactttattcacaacacacctgagatggactgggcttgggcagctaaccggttaattgagaaggatgaggcataaactccagacgatgctcctttaaattatttgccgcagaagaggctaattttgacaagccagttgatccagcaacttctccctgctataccagcgaccattttgagaggacaagctgtgtctacttacggaagtgcgacatacactctatcaatgttgacactaagggatgcatgcagcatggtagcatcattatcatcatcatataactcttgctcacctgtggaggatgaaaataacccatctgaacaaacaagtgctaagaaaatggaagacagagtatcaaaggttgtggaagtcttcgctggaagaatccagaagatggaaaatgactttataagtgattccctcacggttgtgtccttcacaaaggaaggatgtgaagccacactattatcaagcaacaaagccaaagttgtgtgacacaattataacaaaggaatcatcacccattagcacactaaaattggcgcatacagataacgcacctgcaaagtgggatcatttgaacatagttcagcaaagggccgacgcacttgagtcactcctcaagctctacgcaaagcttctggaggagaggctcgatgagctcgccgacgtttttcgaccatttggtgagagagctgtgtcatccggagagatgagcatacaatgatgtctgaccataagcctgatgactccaccgaagttttgagagtccccaacaatgcttttgtagcagcgattcgtttcaacatttttttgtttttcaaataccatttcgagagtgtaaataacttcaacggaattcaaaattgatgtacttaggtaggcctgagccctgtttatttttgatgtatatggtttgcatgtcaccaactgttgtgagcgatgattgattatttatcgtcttgttttatctgtctgtactcctttaatgca

SEQ ID NO: 120781 - DNA, 2360 bp, Zea Mays
cgcttcgcacgtccccgccgtcgcgctcgcctccctcctctttgttgcctccgcgtcgacctccaccccgctctccgacgcgcttaccgtcgtctcggatttctggtgcactctcttctctacgacgcgagcaagggcggcgcttgccatggcatcgacgggaaccaggaggggagctgtttgagcggatgcccaccaggaacaatgtttcctagatcacgatgtttgggccacttttggaagaggtcagggatgacatgttttcaagcttggaggacatcaccaacgcaccatatgcagatctgctctctattaattcaatgaggaaaggaaaggggtcatagaaattagtcttggcagatggaggggaacgtctcaatgactgaggcacattttttcttgttagttagctcatggatttttatggtccaagaggagttgctgctatatgaatatgacaacacccattaatcaacataactatatgaatacaatctgaaaggaaggtcggtttggtcagaaacacatggaggtactgatggaggctatgaaacatataagagacatgccagtgaggagcaggagtagtttagtcggttcttgctttatgaagtggatgcaattagaaagacgtacgagcaggccaacatctcgcggtggctcgccctgggcaaccggacctgcccgaccacgatgcaggagctctgggacgacgccctcacccccaacgccactctctgacagctcatcgtcacctggttctcccgcctggttctgcattttgttttcttatctgtcaatcatgtttttccatattactgcaggcgggtctgattaattatttaaatgtagtttatcttagatactgtttgaacgtatgggatgttggaggacagaagacaatcatgtcttactggagaaaattctttgagcagactaatgggttagtttggtttgctgatagttcacacataaggaggcttgatgattgccgtgctgaactccacaatctcttgaaagaagagagactagttggagcttcattgttgatttttgcaaataagcaagacatgcaaggagctctaaaaccaactggaatcgcgaagagtcactctccgacagctcatcgccgcttggttctcccgccggtacacaaggtttaagaagcgctccgcggacttccacggccgcgctgccgatctcgtccacagcctccggggcacggcgatgcccaggagacaggccctcgaggaagagcaatgtagagaagagaaaggtatctcgactgttccaaagcacaagtatgcatccaaagcctgttccccaaaagttttgaagacttaaacaatatgctgcatgaaaatctttactttattcacaacacacctgagatggactgggcttgggcagctaaccggttaattgagaaggatgaggcataaactccagacgatgctcctttaaattatttgccgcagaagaggctaattttgacaagccagttgatccagcaacttctccctgctataccagcgaccattttgagaggacaagctgtgtctacttacggaagtgcgacatacactctatcaatgttgacactaagggatgcatgcagcatggtagcatcattatcatcatcatataactcttgctcacctgtggaggatgaaaataacccatctgaacaaacaagtgctaagaaaatggaagacagagtatcaaaggttgtggaagtcttcgctggaagaatccagaagatggaaaatgactttataagtgattccctcacggttgtgtccttcacaaaggaaggatgtgaagccacactattatcaagcaacaaagccaaagttgtgtgacacaattataacaaaggaatcatcacccattagcacactaaaattggcgcatacagataacgcacctgcaaagtgggatcatttgaacatagttcagcaaagggccgacgcacttgagtcactcctcaagctctacgcaaagcttctggaggagaggctcgatgagctcgccgacgtttttcgaccatttggtgagagagctgtgtcatccggagagatgagcatacaatgatgtctgaccataagcctgatgactccaccgaagttttgagagtccccaacaatgcttttgtagcagcgattcgtttcaacatttttttgtttttcaaataccatttcgagagtgtaaataacttcaacggaattcaaaattgatgtacttaggtaggcctgagccctgtttatttttgatgtatatggtttgcatgtcaccaactgttgtgagcgatgattgattatttatcgtcttgttttatctgtctgtactcctttaatgca

SEQ ID NO: 120782 - DNA, 2575 bp, Zea Mays
cgcttcgcacgtccccgccgtcgcgctcgcctccctcctctttgttgcctccgcgtcgacctccaccccgctctccgacgcgcttaccgtcgtctcggatttctggtgcactctcttctctacgacgcgagcaagggcggcgcttgccatggcatcgacgggaaccaggaggggagctgtttgagcggatgcccaccaggaacaatgtttcctagatcacgatgtttgggccacttttggaagaggtcagggatgacatgttttcaagcttggaggacatcaccaacgcaccatatgcagatctgctctctattaattcaatgaggaaaggaaaggggtcatagaaattagtcttggcagatggaggggaacgtctcaatgactgaggcacattttttcttgttagttagctcatggatttttatggtccaagaggagttgctgctatatgaatatgacaacacccattaatcaacataactatatgaatacaatctgaaaggaaggtcggtttggtcagaaacacatggaggtactgatggaggctatgaaacatataagagacatgccagtgaggagcaggagtagtttagtcggttcttgctttatgaagtggatgcaattagaaagacgtacgagcaggccaacatctcgcggtggctcgccctgggcaaccggacctgcccgaccacgatgcaggagctctgggacgacgccctcacccccaacgccactctctgacagctcatcgtcacctggttctcccgcctggttctgcattttgttttcttatctgtcaatcatgtttttccatattactgcaggcgggtctgattaattatttaaatgtagtttatcttagatactgtttgaacgtatgggatgttggaggacagaagacaatcatgtcttactggagaaaattctttgagcagactaatgggttagtttggtttgctgatagttcacacataaggaggcttgatgattgccgtgctgaactccacaatctcttgaaagaagagagactagttggagcttcattgttgatttttgcaaataagcaagacatgcaaggagctctaaaaccaactggaatcgcgaagagtcactctccgacagctcatcgccgcttggttctcccgccggtacacaaggtttaagaagcgctccgcggacttccacggccgcgctgccgatctcgtccacagcctccggggcacggcgatgcccaggagacaggccctcgaggaagagcaatgtagagaagagaaaggtatctcgactgttccaaagcacaagtatgcatccaaagcctgttccccaaaagttttgaagacttaaacaatatgctgcatgaaaatctttactttattcacaacacacctgagatggactgggcttgggcagctaaccggttaattgagaaggatgaggcataaactccagacgatgctcctttaaattatttgccgcagaagaggctaattttgacaagccagttgatccagcaacttctccctgctataccagcgaccattttgagaggacaagctgtgtctacttacggaagtgcgacatacactctatcaatgttgacactaagggatgcatgcagcatggtagcatcattatcatcatcatataactcttgctcacctgtggaggatgaaaataacccatctgaacaaacaagtgctaagaaaatggaagacagagtatcaaaggttgtggaagtcttcgctggaagaatccagaagatggaaaatgactttataagtttgaacaagagggcctcgactaatcggacgactggacgattagtcgacctaatcgggtcggatgccctggtcgttccactaaaaccgactagaccgactaatcgcgattaatcgcgattagtcggacgacttgaaatcattgatcagtgattccctcacggttgtgtccttcacaaaggaaggatgtgaagccacactattatcaagcaacaaagccaaagttgtgtgacacaattataacaaaggaatcatcacccattagcacactaaaattggcgcatacagataacgcacctgcaaagtgggatcatttgaacatagttcagcaaagggccgacgcacttgagtcactcctcaagctctacgcaaagcttctggaggagaggctcgatgagctcgccgacgtttttcgaccatttggtgagagagctgtgtcatccggagagatgagcatacaatgatgtctgaccataagcctgatgactccaccgaagttttgagagtccccaacaatgcttttgtagcagcgattcgtttcaacatttttttgtttttcaaataccatttcgagagtgtaaataacttcaacggaattcaaaattgatgtacttaggtaggcctgagccctgtttatttttgatgtatatggtttgcatgtcaccaactgttgtgagcgatgattgattatttatcgtcttgttttatctgtctgtactcctttaatgcagcaccttcgtttgtcatgtgtcgtctcccctgtaagatgttgattaatattcattatatcattgttt

SEQ ID NO: 120783 - DNA, 101 bp, Zea Mays
gggaagcgtttgttacctaccgtagtaggccgcctgtatgtatttataggagatggaataccatcatcagattacaaaggggctggcgccaacaatcaatc

SEQ ID NO: 120784 - DNA, 447 bp, Zea Mays
gaccctgatagaaataattagggtgttgcctaaagaatgttcagaagcacaaacatcagatgggcaatgtaaacatttcaagttcggttcacacagcgcagtttcgtattccaaacgtgagcaagggcctctgtaaagaaaatggccattaacataattccagtttatggtgaccaaaaatcaacggtaactaacaatcatctagaagctgaattcacgaacattcaaatggcatacaacaaagtgggggcaagataagttcatgccgttggagcattcccaagtaagtccgaaattttcatggtaaaattcattcaactacagctaacaagtcgactcacggcagaagcagtgcttctcatcatcggtaccaaggtccacctacaacacaatagctaagtcagctaggttgattgaatcgaaaaatgtagggctcacgacaaggcc

SEQ ID NO: 120785 - DNA, 291 bp, Zea Mays
atggcacctatgagcggtaccaccaaggttaggtccttcatggctgtcctaggcttagttcttctcatcgtttgtgcgagctcccagtcctgccaagatgatttgctttcacgcttgcacacatcgctgagcaccgactgcctctacacaacaaccgcactagcagccattaccacgcgggacagcaactaccaccaggatccaagccaagcaatgcaacaagttgagataaaattaaaagaattgagagaacatcaatccaagaagaaaaagaatccctatgtttcctaa

SEQ ID NO: 120786 - DNA, 622 bp, Zea Mays
atggcagtgatgacgagcagtgccgggccgtcgacgacgacgcacttcattgccgctatacctttggtccttctgctcatttctgcagcctccccgtcaagatgccaagcctggaaccaccacacaagttgccacgttttctcttcacgcatgtattaccaagaaatcatgtctatttgtctaacgtctgattacattttacttgcgtgtactcttgttggctctccatgtccaggcgctacacagccgcagccctcgttgctggggacggcgccggcggtggcacgacgaggaccgtcgttgcgagtgcgatgctacaacctctactcggaagaggagtgttcaaataggtactgccactcggtttgcgtggtccgcgatagaaagtatcgccagggagcctactgcgctgaaacaagatgggagtgttgctgcccacattgaatgaagcagcggtatggtgtacctgctcctgtagtgagccagtgtatttttatggaatctgtcagaatatttatttgtcacatttgtaaccatattagatgcacaatctaggggacatctatcttcctcttggccaacttcatttgaacaataatacaatagttttaccgaatataaa

SEQ ID NO: 120787 - DNA, 1086 bp, Zea Mays
ccgtcgcttcctgcggtacgcactctctgtccgctgcgttcctccagctagcaactggccatcggggctgctatagcagagtaagtggcgatggctccagctcatgataggctccgccgcctggtgctgctcctcgtcgttgccaccgcggcggcggctttgcttctggcgccgacgacggcggatgctgcgctgccgcgggtgcagcacacgcccaccaaggccgacgggtcgctcgccatcctcgtcgtcggcgactggggccgccgtggtggggcagaagctggacatcgacttcgtcatctccaccggcgacaacatctacgacgacggcatcgccaacaccagcgaccccctcttcaaggaatcgttctccaatatctacactgccaacagccttcagaagccttggtacctggtccttggtaaccatgactacacgggaaacgcgctcgcgcagctcgaccctgccattcgcaaagtggatagccggtacaccgccattgccaagtccttcattgtcaactcagggattgcggattttttcctcgtcgacacaacgccgttcattgtccactactggaacaacaccaagttcgattggagaggcgtcgctcctcgagacacctacatcgcgaatctcctcaaggacttgaagtgtgcactgacagcgtccaaggctccctggaagatcgtcgtgggtcaccaccccatcagcagcgcctgcgggcatgggaacaacactgagctggaggagttgcttctcccggtcctcagggtatatatatgcatgctgttcgatctaacatgaagttaattgtcttctctcaagtcattaacatgatcgatcgatctatatatgaaactgaatgttcctgctgctttgcaacgcaattaacactactgcgcatgcagacacacgggtagtgctgcaacttggaccgtgccgtgccggcccggcacgagcccatcgtgcttcgggcctcagttagtcgggcctatctagcacgaaatagaatcgggccgtgccttactgggcctcgtgagtagaaataaggcccagcacggccctaaagcacggcgggc

SEQ ID NO: 120788 - DNA, 1709 bp, Zea Mays
atacatatacatagtgcacctcttctcattcccgaagaaagtaaaacaagaaaaacagagacagaaaagagagtaatattgtgctctcatctcatggtagttacaaaatgcaagacaacgaggaatgtacacctgacaagtacatttttcctaatacttgtgatcatttgttcagcctcaccgtcatgcaaaggccaagatcagccccaagcacgtcttccttgtccccctaggccaccgccaccacatagaccaccgccgtgtaatttgttagagatgtcacaccaccatcgtcataggtcgcctccatcttcacccctactggtgccatcatctccaccacgcagtttgttagagcagtcacaccatcatcaccacaagtcaccaccaatgccagcagtgccattgccaccaccatgtagtttgtctaagatgtcacaccattattcccataggtcgccatcattgccgccagtgtcgtcaccaccaccactggaactagtgtcgtcgtcaccaccacgtagcttgtttgagacatcacaccatcatcatcataggtcaccacaatcaccacaagtgttatcttcaccaccacatggtttatcagagatgtcacaacgtcatcactattggtcatcttccctaccattggtgcaatcatcatcactaccatgtagtttgtccgagactgtttccctaaagccaaagcccgagacgtgctacccctacaataacagattttgtctgactcatgattgcgagaacatgtgcaaggaaaatggctttaaacccaaaaaaagctattgtgttgagagagcggatgctaaatgggaatgttgttgcaaacattaagcaatgtaactaaagcatatatttgatgtgaactcaataagataagttttcttgttgcctacatgccactacattttgattggctactatacaaaaatataaggtgtaccaggcgacaagcctaaggcctcatttggccctgtttagcatggctccaactccatagatttctactaaactccataactccatgtggagcagactccgcgtggagttggagccaactaggaggaggtgtttggctagcagggtgtccctaactctagaaaataggattttgaggttgctttgatattcttgccctttgttccattttttagtcaaataatttatgtacaaataattttgccacacatatgaaataaaaagaccatcgaagacgttaaaatcacaaaacatgacatgtccattgtctacaaccaaatagttcatagtacgatatggtattcatttgtatctaattccatgctaaggcgacagaagtagccaaagtatcacgaaatgcatattgattctgatgttgatccatcagaggcatgttgcaacactacatactagttgtacttttctaggatagttggaacaaagtttggatctcaatcgaaattatcaaagttttcatccttgcttacatgcttgcgtatgaaatcatgaagagctatggtagcatcaactatcttattttgtgtcatcatggaaaaacatggcatcttatagataatctagcatttcatctttaataccccaaaccagcactatatgaaattttgaatagatgagtgaactctgttgaacttctcttttgaagtactaggttccatacctcgatgccactatggtaagtgatatcttttgga

SEQ ID NO: 120789 - DNA, 2037 bp, Zea Mays
aactactagttagctactgaagattccaaaaccaaccccccatccacgccgcgatgctccgccgccgccgggcaccgctcctcctggccgccgccgccgcgggcgccgcgctggctgccacctctccctccggcgaaaatggtcgaagcgtcgcctccgcgctccaccaaggcatcgctcgctcctcccgttccgtctacacggttcgccctcccgtatctgttgctattactcctgagtttcggatgctgcttttgctcgattttctagccgttggctgtcgcagattggttttgtgatggcagattacaagtattcgctgaggggtctggatgctggatcggcggattaccgtgttaagctctccaaggttcatctgcggtcagcaaaaaaactacttaaactatgtgaagtgaatggagggttttatgtcaaagctggtcaatatgtatcttcactaagacaagtgccaaaggagtactcatcaactctctcctgcctgcaagaccaggcaactccatccaagtttcaagatattaaagcagtaatagagcagaactttggcaaggaattgtatgacatgttcatcgaggtcgattgcataacaatcaagatgtagctgtcaaggttcaatatcctggattggagcagcgaatgaagatagacattatgacaatgtcattcttgtcaaaaatggtctcttgggtttttcctgattataaatttgacagaatactaattgaatttgagaaatccatgacaatggagcttgattttacgcgggaggctaagaattctgagagaacagccagctgcttcaggaaaaatagtgttgttaaagtgccttatgtgttctggcaacttacaaccagggaggttttgacgatggagttttgttatggacacaaggttaacgacttggacttcctgcggaaaacagatattagccctacaaaggtagctaaggctttgattgaactctttggtgaaatgatatttgtacatggttttgttcacggtgatccacatcctggaaatatattagtttctcctgaaggccatgggaaattttcactagttctgttggatcatggaatttatagagaattggaccaaaagttcagattggactattgtcggctatggaaagcactgatattgttggattcaaacaaaattctggaattaggcgaacagtttggcgttggcaaatatgcgaagtactttcctgtaatattcacagggagaactatagaaagcaagtcagctcttggcacacaaatgtctggtgaagagcagaggcgtctgaaggaggacttaaactctcttgggatggatgatatatcttcatttatggaatccttgccaccggacttctatgtcatactacgaacagacggactattgaggtccattttagggaatcttggggcaccacgccatgttcggcttctcacttatgcaagatgtgctatacacggtcttgagaagcagcacaaaatggagtctgatgttcaattgtgttcaggtgcaatcagacgtatgttcttgaatgtcaaaacaaatgtcagctatctccgtctgagagtgattattgaaatagcggtattattagctaaagcaaatggtgccaagcagaaagtcgtgaacaaactcagacagatgttacaggagaccagtcaaggttttcaccgccgtatgtgatgcccagaagtcagcgacgtggtgaaattaaggctacgagaaaggtgggggaagttggaagtacgtcaggactccggagtagaatcataactgtgattgttctgtttcaacttgtaaattggaggttgtattgtgtcaaggagtccaatcataactgtgagtgctctgttgtaacttgtaaattctacttctacgtcgagtctgcgctcgagagtccaggtgttttttttttgttggaccaagtacgcatcccaaaataagtctacatcccaaaattcgaggagtcaaacaaatcttaatttgaagtttgcctaaatttataaaattggtatt

SEQ ID NO: 120790 - DNA, 2019 bp, Zea Mays
aactactagttagctactgaagattccaaaaccaaccccccatccacgccgcgatgctccgccgccgccgggcaccgctcctcctggccgccgccgccgcgggcgccgcgctggctgccacctctccctccggcgaaaatggtcgaagcgtcgcctccgcgctccaccaaggcatcgctcgctcctcccgttccgtctacacggttcgccctcccgtatctgttgctattactcctgagtttcggatgctgcttttgctcgattttctagccgttggctgtcgcagattggttttgtgatggcagattacaagtattcgctgaggggtctggatgctggatcggcggattaccgtgttaagctctccaaggttcatctgcggtcagcaaaaaaactacttaaactatgtgaagtgaatggagggttttatgtcaaagctggtcaatatgtatcttcactaagacaagtgccaaaggagtactcatcaactctctcctgcctgcaagaccaggcaactccatccaagtttcaagatattaaagcagtaatagagcagaactttggcaaggaattgtatgacatgttcatcgaggtcgattgcataacaatcaagatgtagctgtcaaggttcaatatcctggattggagcagcgaatgaagatagacattatgacaatgtcattcttgtcaaaaatggtctcttgggtttttcctgattataaatttgacagaatactaattgaatttgagaaatccatgacaatggagcttgattttacgcgggaggctaagaattctgagagaacagccagctgcttcaggaaaaatagtgttgttaaagtgccttatgtgttctggcaacttacaaccagggaggttttgacgatggagttttgttatggacacaaggttaacgacttggacttcctgcggaaaacagatattagccctacaaaggtagctaaggctttgattgaactctttggtgaaatgatatttgtacatggttttgttcacggtgatccacatcctggaaatatattagtttctcctgaaggccatgggaaattttcactagttctgttggatcatggaatttatagagaattggaccaaaagttcagattggactattgtcggctatggaaagcactgatattgttggattcaaacaaaattctggaattaggcgaacagtttggcgttggcaaatatgcgaagtactttcctgtaatattcacagggagaactatagaaagcaagtcagctcttggcacacaaatgtctggtgaagagcagaggcgtctgaaggaggacttaaactctcttgggatggatgatatatcttcatttatggaatccttgccaccggacttctatgtcatactacgaacagacggactattgaggtccattttagggaatcttggggcaccacgccatgttcggcttctcacttatgcaagatgtgctatacacggtcttgagaagcagcacaaaatggagtctggtgcaatcagacgtatgttcttgaatgtcaaaacaaatgtcagctatctccgtctgagagtgattattgaaatagcggtattattagctaaagcaaatggtgccaagcagaaagtcgtgaacaaactcagacagatgttacaggagaccagtcaaggttttcaccgccgtatgtgatgcccagaagtcagcgacgtggtgaaattaaggctacgagaaaggtgggggaagttggaagtacgtcaggactccggagtagaatcataactgtgattgttctgtttcaacttgtaaattggaggttgtattgtgtcaaggagtccaatcataactgtgagtgctctgttgtaacttgtaaattctacttctacgtcgagtctgcgctcgagagtccaggtgttttttttttgttggaccaagtacgcatcccaaaataagtctacatcccaaaattcgaggagtcaaacaaatcttaatttgaagtttgcctaaatttataaaattggtatt

SEQ ID NO: 120791 - DNA, 1542 bp, Zea Mays
caaccccccatccacgccgcgatgctccgccgccgccgggcaccgctcctcctggccgccgccgccgcgggcgccgcgctggctgccacctctccctccggcgaaaatggtcgaagcgtcgcctccgcgctccaccaaggcatcgctcgctcctcccgttccgtctacacgattggttttgtgatggcagattacaagtattcgctgaggggtctggatgctggatcggcggattaccgtgttaagctctccaaggttcatctgcggtcagcaaaaaaactacttaaactatgtgaagtgaatggagggttttatgtcaaagctggtcaatatgtatcttcactaagacaagtgccaaaggagtactcatcaactctctcctgcctgcaagaccaggcaactccatccaagtttcaagatattaaagcagtaatagagcagaactttggcaaggaattgtatgacatattcctggaatttgacgaacatccgattgctgctgcatcaattgctcaggttcatcgaggtcgattgcataacaatcaagatgtagctgtcaaggtttttcctgattataaatttgacagaatactaattgaatttgagaaatccatgacaatggagcttgattttacgcgggaggctaagaattctgagagaacagccagctgcttcaggaaaaatagtgttgttaaagtgccttatgtgttctggcaacttacaaccagggaggttttgacgatggagttttgttatggacacaaggttaacgacttggacttcctgcggaaaacagatattagccctacaaaggtagctaaggctttgattgaactctttggtgaaatgatatttgtacatggttttgttcacggtgatccacatcctggaaatatattagtttctcctgaaggccatgggaaattttcactagttctgttggatcatggaatttatagagaattggaccaaaagttcagattggactattgtcggctatggaaagcactgatattgttggattcaaacaaaattctggaattaggcgaacagtttggcgttggcaaatatgcgaagtactttcctgtaatattcacagggagaactatagaaagcaagtcagctcttggcacacaaatgtctggtgaagagcagaggcgtctgaaggaggacttaaactctcttgggatggatgatatatcttcatttatggaatccttgccaccggacttctatgtcatactacgaacagacggactattgaggtccattttagggaatcttggggcaccacgccatgttcggcttctcacttatgcaagatgtgctatacacggtcttgagaagcagcacaaaatggagtctggtgcaatcagacgtatgttcttgaatgtcaaaacaaatgtcagctatctccgtctgagagtgattattgaaatagcggtattattagctaaagcaaatggtgccaagcagaaagtcgtgaacaaactcagacagatgttacaggagaccagtcaaggttttcaccgccgtatgtga

SEQ ID NO: 120792 - DNA, 1631 bp, Zea Mays
caaccccccatccacgccgcgatgctccgccgccgccgggcaccgctcctcctggccgccgccgccgcgggcgccgcgctggctgccacctctccctccggcgaaaatggtcgaagcgtcgcctccgcgctccaccaaggcatcgctcgctcctcccgttccgtctacacgattggttttgtgatggcagattacaagtattcgctgaggggtctggatgctggatcggcggattaccgtgttaagctctccaaggttcatctgcggtcagcaaaaaaactacttaaactatgtgaagtgaatggagggttttatgtcaaagctggtcaatatgtatcttcactaagacaagtgccaaaggagtactcatcaactctctcctgcctgcaagaccaggcaactccatccaagtttcaagatattaaagcagtaatagagcagaactttggcaaggaattgtatgacatattcctggaatttgacgaacatccgattgctgctgcatcaattgctcaggttcatcgaggtcgattgcataacaatcaagatgtagctgtcaaggttcaatatcctggattggagcagcgaatgaagatagacattatgacaatgtcattcttgtcaaaaatggtctcttgggtttttcctgattataaatttgacagaatactaattgaatttgagaaatccatgacaatggagcttgattttacgcgggaggctaagaattctgagagaacagccagctgcttcaggaaaaatagtgttgttaaagtgccttatgtgttctggcaacttacaaccagggaggttttgacgatggagttttgttatggacacaaggttaacgacttggacttcctgcggaaaacagatattagccctacaaaggtagctaaggctttgattgaactctttggtgaaatgatatttgtacatggttttgttcacggtgatccacatcctggaaatatattagtttctcctgaaggccatgggaaattttcactagttctgttggatcatggaatttatagagaattggaccaaaagttcagattggactattgtcggctatggaaagcactgatattgttggattcaaacaaaattctggaattaggcgaacagtttggcgttggcaaatatgcgaagtactttcctgtaatattcacagggagaactatagaaagcaagtcagctcttggcacacaaatgtctggtgaagagcagaggcgtctgaaggaggacttaaactctcttgggatggatgatatatcttcatttatggaatccttgccaccggacttctatgtcatactacgaacagacggactattgaggtccattttagggaatcttggggcaccacgccatgttcggcttctcacttatgcaagatgtgctatacacggtcttgagaagcagcacaaaatggagtctggtgcaatcagacgtatgttcttgaatgtcaaaacaaatgtcagctatctccgtctgagagtgattattgaaatagcggtattattagctaaagcaaatggtgccaagcagaaagtcgtgaacaaactcagacagatgttacaggagaccagtcaaggttttcaccgccgtatgtgatgcccagaagt

SEQ ID NO: 120793 - DNA, 116 bp, Zea Mays
cttatttcaaaccccacttcgcaaacagtgttaaaaggtgtcatctacagtttcacgtcccctattttacactacacgccggagacagtctaaagccgagccttgatgatgtaaaa

SEQ ID NO: 120794 - DNA, 551 bp, Zea Mays
gtcattaagttttttgatataaatgagtggtgactatcacacttgaataaggccacaacgctagtacaatctttataagtagtatccactagttattggcctcttactatacgtagcacactagcactcctccatagggccataaccatgccgtcctacaagaaactagtgatcgttggcttcgccttaaccttgctccttgtgtcattcggaatggatgcgtctgcaaaactgtgcagtacgacaatggatttactcatatgcggcggagcaatcccaggcgccgtgaaccaggcatgcgatgacacatgcagaaacaagggctacacaggtggcggcttttgcaacatgaaaatacaacgctgtgtttgtcgcaagccgtgtgcactggaggaacaaacagaggcgcgcgccggagacgaagcagccggcggcgctggagatatgatgagccggacgatggcagattgagtgatacgcatgacaaatgtttagacaccatatatataaggaataaaatcttcaatactataaagcactagttatgacca

SEQ ID NO: 120795 - DNA, 417 bp, Zea Mays
acaactctagtactcctccataactggccatgtcgttctataagaaactagtgatcgttggtttcgccttaacctttgctccttgtgtcattccgaatggatgcgactgcaaagctttgcagtacgacaatggagagactcatttgcggcggagcaagtcgaggcgacgtgaacagggcatgcgatgaaacgtgcagatccaagggctacacgggtggcggcttttgcaacatgaaaatacaacgctgtgtttgtcgcaagccgtgtgtccaggaggagcaaacagaggcgcgcgccagagacgaagcagccgacgctggagatatgatgagccagacgatggcagattgagtgatgcgcatgacagatgtttagccaccatatatatataaggaataaaatcaaaacatgcatata

SEQ ID NO: 120796 - DNA, 446 bp, Zea Mays
ctcatcgtgtctgaccatgtcgtccagcaagcaggttgtggtggccaccgtcgctctagcgctgctcctccacgcttcacatcttgcagccggagccgaaggagaaacggtgacaccgttgagcacatgcgaaaccccgatctgcgtcccctgctggggcaagaaccaggtctgcatcgccgcttgcgttgcgttgcgctacaccggcggtttctgcaatggtgacacctgcgtatgcaccaagcagtgccttgcggaagcggaagcggtggcggaggctggtgggccgtccccgccgcccgtgcagccgccgccgctcgggaagcgtgggatgggaatgctcaagtgatggacgattacgtagcttgttggccgacagatggctgaggcatatgtcaaataaactctcattgttaaaacataatatattctactaggtatatgtc

SEQ ID NO: 120797 - DNA, 558 bp, Zea Mays
agtagatgcgcgcgtaccactcctcttcatttcaccatgtcgttcagcaagcgagttgctgtggccgccgccctcgccttggccctgcagcttatcctggcttcacatcttgcagcagctggagccaaaaaagacgaaacaatagcaccgttacagacgtgcgagaccatgatcaaggtcccctgctggggcaaaaacgcgatctgcatccccatctgcatcgcgatgcgctacaccggcggtttctgcgacgtcgccacctgcatgtgcaccaagcaatgcctcgccgccgccgaggctgaggcagatggggcatcgcagcaggccgtggcgacaccgcggctgaactgatggattgtttggtgggcgggcggctggggcatgcatgccgagaataaactcgatgttataacaatgcgaccgagagtagacccaggttgcttgtcatatgtagcagattattgatgaagttatttgatgattgatcgtctcgatctttaacacatatgtaatttttactttcatcttcagcagtcttatccatctcacctcctattt

SEQ ID NO: 120798 - DNA, 1898 bp, Zea Mays
gacacagaacaaatcatatctcatctggtatgtcgaggatttatgaaggattacacaatttggacaaagcatggagagggtagctcttcgccttataccactggaaaccctgagaacatcgacgacagatttcagttcgttcacgagacacaccaacctcttccacagagcgaacatgtagtgcaaaatgttactgatcatggttacgctcgaggaaatgaacatgatagacctcatgttctgccaagtgttatggatgaggaagatgcagagttgctagaggcaatgttgtgtcgtcatacagatcaatcgatgttcttaatgaaaggtatggagtccctgaagaagacagcagaagagcctttgtacgacgagtctaagggttgtaccaaagagttcacgacgctccggtctgtgctaaagctgttgatgttaaaagctaaatatggtgtgtctgatgctggcttcgatgcgttcttgagtattatcgcagacatgcttccaaaggagaacaatgtgcctgctaacacgtactatgcaaagaaactaatcagtccgctcactatgggtgtggagaagatccacgcgtgtagaaatcactgtatcctttatcgaggtgatgattataaagacttggagagctgcccaaagtgcggtgcaagtaggtacaagacgaataaagactatcgagaggacgaagagtgtgttgcatccatgtctaaagggaagaagcgaaagaaagcccaaaaaaagacttcaaaatccacgagcaaagaaaaagaagtagactattatgcgctcaaaaagattcctgctttggtgatgtggtacctccccgtcgtttgctttataaaaccgccagtggaaatgcattttcactggcggttttctttattcagtcgccagtggaaatgcacttttcactggcggttccttaagaaaaccgccagtgaaaatgcacttttcactggcggttccaaaataaccaccagtggaaatgctgatttccactgacccctagcactggcggtactgaaaaacgccagtgtaaatatgtttagaaccgccactatagagcttctgtgtactagtgtttataactacctaaaacccaatggtctatttccattatttgtagacttctcggggttctattcgtaaagaacatgacccatttgtggtgaaactagagttgtaggggtcggtgggttgatttcaagatagctcatgggttcctaatgaaaaaggccatggagggggttgattatatatcggtcgttagatccccaatcgagggccacaattaggtttggctcgttttaaaaccggcacatatcgttgtcccttataaccgcaatccatagcacggacgccttccacgctcccattgactcacacccctcagatccgaacctagcgcccctgacttaatcatgaaacggtaccccaacttctaatctagcacgccagcacaagatccaacggttagaagtttgtcgtcctcctcctagcaccggactgcagcgcccacacgcacagaacggcggcgacatcgccggtgcacctagttccatgctccggtccactaactgctaaatcgatgggtcctatgagaagaggaggaaaccatgatttatcagaagaggttctcacctccggtgatgatgtgaaggcctctaaccacgttgatggcaaccccgtggcagcatagtgaccacggcgagcaatcccgaggaccccagcttcaaatcacccccagcgaggtcatgggcgccctccgcgcgccctgggcaatctccctagcctaactctaaggccccaacgagggtgcacatgagtcctaccatggcggcactcctacctcctcccctgctccaagcgcatgttctgttcgccag

SEQ ID NO: 120799 - DNA, 2368 bp, Zea Mays
gcaggcaagccaacgccgcaggctgcttgtgcgatggcctcgttccacgatctcaccgccaccgccgtgctcctcttgctcttttccatcctctccggcgggttggcgccgctgcaagtccaggcgcagcagccgtacggcagccagatcgccgactgcaccaaccagcacaactcctccagtctgcttggctacttctgcggcgccgccggcagcgcgccgtcgtgcccgaccttcctcaccttcacagcccgggcgcagtactcgagcctcgccaccatcggggcgctcctcggcgccgaccccgccagcgttctggcgcccaacgaggccaccggggcggacgcgccactcccggcgggcaccagggtgctcgtcccagcgacgtgtgcctgcacggccacgccgggcggccggttctaccagaggaacgccacgtacgtcgccgtggccggtgacacgctgctcatcatcgccaacaacacgttccagggcctcacctcgtgccaggcgctcgaggcgcaggccctccgcggcgcgccgccgcagagcctggacgtcggtcagtccctccccgtgccgctgcgctgcgcgtgtccgagcgcggcgcaggccgcagcgggggcgaggtacctcgtcagctacctcgtggacgtgttcgacgacctcaccaccgtggccgctcggttcggggtcgacatggggaccgtcgcggcgtccaaccagttgcagccgccttttaccatagacccctacaccacactgctcatccccgtcagcgcgcagcctaacgtgtcgcgcatccagacgccgccgtcgcctccgccgcctccgccggtggtagcgcgcgcgcctgctccgggcaagaagagcagtaaccatgtcggggtctacattggcgttgctgtggcagtggttgttgtcgccgcgattgtctcagccggagctttcctcgcagtgagggcgaggaggaggcgagccggcgccgttctagccaccggcgaagtggccaagaaggaaagtaaggcaggcaacgacagggcggcgacgtcgtcgggcttcaccggcggcgagttctccctttccaccagcgaggcgttctcgagcatttccgtgacggacatcaagtcctcgctgaaggtgtacacctacgcggagctcaaggcggccaccgacgacttcagccctgagcaccgcatcggcgggtcggtgtaccgcgcggcgttcaacggcgacgccgcggccgtcgaggtggtggaccggaatgtgtcgacggaggtggagatcatgcggaagatcaaccacctcaatctgatccgcctcatcggcctctgccaccaccgcggccggtggtacctcgtcaccgagtacgccgagcacggcgcgctccgggaccgcctcctcgcgtccgccacgggcacggcggcgccactgacgtgggcgcagcgggtgcatatcgcgctggacgtcgccgaggggcttaggtacctgcacgagtacgcgcgcccggcgtgggtgcacatggacgtcagcagcggcagcgtcctccttgccggtgacgggccccgcgccaagctccggggcttcggcgccgcgagggccatcacgggcgccaccgccggcgtcgacggcgaagagggcgccgaggaggcgctgttcacgatgacgagccgcatcgcggggacgcgcgggtacatcgcgccggagtacctggagcacggcgtggtgtcgccaaaggccgacgtctactcgctcggcgtcgtgctcctggagctcgtaacgggcagggacgccgaggagctggtgggcgacggcgtgggcgatccgttcgtcgccctgcgcgagctcgcggaggagctcgatggcggcggcgacgccgtgctgcagcggctggaggaactcgtggacccggcgctgccggcggggagctgtccgcaggacgccgtggtcatggtggtcaggctcatcgagaggtgcgtcaggcaagacccagcgcgccgtcccacaaccggggaggtggcgcagcgcctcctcaagctgtctggggtctcggtggtcagctggcggaactcgccggagtcgccccgcagctccggcagtggaaaaggcctcatgtactagcagagtaatagtaatagcaaaccataggtgccattggacgcgaaatgtgaaggtaccagagagaaatcttactgttttgagttgaattgaattttgttcatcgaaggacacgaacactgtaaacatgtatgtactatattgaggggcgccatgatccgaagacagggggcagaatcgcaaagatgacaactagcgaagaccccgccgggtttcccctcatcctagactaaaaattctccgtttcaat

SEQ ID NO: 120800 - DNA, 607 bp, Zea Mays
cccgccgtagggttcaacggacccatccaagtgcccgaaccccatcagcgcatcccttttcgcctgcctgcacacgccgccgccggcaatggccgcctgcgacgacgacgtcgccccgtcaaccgcctccgcctaccttgacccctcttactgggacgcgcggttcgggaaggaggagcactacgagtggttcaaggacttctcgcacttccgccacctcctcgcgccgctcctctccccgtccctctcggtcctcgaggtcgggtgtggcaactcgcggcttggcgaggatctcctgcgggagggcgtcgccggcggaatcacctgcgttgacctgtcccccgtcgccgtccagcggatgcgcgaccgcctcgccgctcttggcaccaaaggcgtggatgctgtggttgcggacatgcttgatctgccgtttgagcatgagagctttgatctcgtcattgaaaagggcaccatggctttagtgttctaaccatagtgctgcatcctggaagataacaagacagttacttttagcaccgttgttcacgtgttaacaagaacaagaggggctggcatctagtgagctcgtgtgcaacaggtcaacatg

SEQ ID NO: 120801 - DNA, 1401 bp, Zea Mays
cccgccgtagggttcaacggacccatccaagtgcccgaaccccatcagcgcatcccttttcgcctgcctgcacacgccgccgccggcaatggccgcctgcgacgacgacgtcgccccgtcaaccgcctccgcctaccttgacccctcttactgggacgcgcggttcgggaaggaggagcactacgagtggttcaaggacttctcgcacttccgccacctcctcgcgccgctcctctccccgtccctctcggtcctcgaggtcgggtgtggcaactcgcggcttggcgaggatctcctgcgggagggcgtcgccggcggaatcacctgcgttgacctgtcccccgtcgccgtccagcggatgcgcgaccgcctcgccgctcttggcaccaaaggcgtggatgctgtggttgcggacatgcttgatctgccgtttgagcatgagagctttgatctcgtcattgaaaagggcaccatggatgtgttgtttgtggacagtggcgatccatgggaccccaatcctacaacagtggaaaacgtgatgaaaatgcttaatggtatccacagggttttgaagccagaaggcatctttgtatcaattgcctttggacagccacactttcgacgccgattttttgaagctcctgagttaacatggtctattgagtacagtacctttggcgacagcttccattatttcttctacactcttaagaagggcaagaggtcactggagtccagcagttaccaaaacacattaccatcacctgttgctccaagaataaatatggtccacgaagagctcgagagcgaggattttatattcctcacaaaccttgatgggttgtgagtggctgcttaaacaagcatctggctaacagcctaacacatcaaaagggtgaccaggccagcgttggtgaccctgcagtgatgtttttttcctgggcggcaaatgagaatgatgcctgtaaaatgtgtaatttaggatagatttaaattttgagctttgttgtctagtaatactataatactctatattactgcaggctagaggtctgtgtatgatcttgtaaaaattagtattactttccttttgaaatctaatgcttcgacttaacttatgcattgtttaggctgttatatgaaatccatagatgaaagtacttgttggtcattccttttctttttcaaagttcatcttgttttatttttcaagaattaaggagttgtttgattgggattataatctactcagattatataatctaacttattaaataagttatctaactttgagttgtttgtttgacaaattataatctcaaacaagcagaccttaatttatgatgtattagcgtgaaactttcacctcacgacttattgttatacaaaactaaaaaaaga

SEQ ID NO: 120802 - DNA, 2246 bp, Zea Mays
ggcccatgccaaaacgggccatagggaccatatagcctcacccacgtagccacgtcagagcagagcacccagcaggccagggccagccggccaaaacacagaaaagctaaacccgacctccgctcgccggcgcccggcaggatggcttcgtcggcggcgtaccctgatgcggacgagaacctggaggccatcatcacccgcatagagcagaagtcccgaaagatcgagacccttctcaagcagtcgaagccggtggaggccctaaagacggcgctcgaggggtcaccgctcaagacccgcgacgagcgatgcaagtcggcgaactggatcgtggtgcaccgcgcgttgatggcgattagggacgtagacggcatgttcaactccctggatcccgagtactacgacatcctcatgaagtaagagatacacctcgctttccatcacttgcttcttcccagatccatgtttactggtcagggaaggtgagttgtttccaattcgagtcctggcaatcaacgcttcctagttgagatcccataactagatatctatcactgcattttaagcttattggattgatccatggtgattgtgtaacggtattgctacaaaactttagttttttatgacatcagttttgtgcggtgggatgacagttgattattgagaacagttatgctgtacctaacattagtcattttcactctgccatgcttggtattatttgttgtgctgctgcggtgcctggttgggatcttgtgaattttgtcttgcccttggagtctagatgttgtttttaattgctcttttgggtgggcgccgttgtccagaagaatcagctaaagttgatgatgttttggttggcgtcagactatgtgctgtccggatagttggctgttaaggatgtgaaaacgttcttgttagtttgcatatcgccttatatgagatgatgttagtatgtttcttagctggttatggtaaaagtcagtcagttttttttccttttcagagctttctcgatctggaaggattggctgctgaaatcgccatttcttgctgcgtgcttgcctggtctggttgtaacagtgatcgtgtacgctatttcctatttcctaatgaaataggggcggagacaaaaaaaattacttttgtggtgaataggctagaacatttcaattatttttatgtgactgtacaacttccagtaaaaaataagtgcattctagaatgcatgcagtcagtctattttatccctggtaatagtacctttatgtttgttttgatcgatcatacgattagtagttcagtgtaaaaaaatattataattccattggcctacaagtaattataataggaattgctgatcaaagtaatgcttaggactggatgatacactgtattgtgaaatctgtactgttgacaaaatgaaaacgagttgtatgactcaatacctgaacaaactctgttctgtaaactgcagttactattgacaaaatgacaatgagttgtatgactcaatacctcaacaagcaaattggtgaattggatgggtgtatctcttgtttaatattgttcatgacatgatcaaatgaacatgtatgtatgttgatcagcattcctacgcttgttcacttcatcacatcatccttatttcgatttcacattattgaaggttgctgtgccactgaccttagaactgtggtcaaattaagttagctgtacaccaatttactcacatgtatctctttatttctgccttctatgatttctttaccttctacgattttctgattccttttatgctaatatgaagatcatttgtctgtaaataccgatgtggtgcaggtacctttatagaggtttatctacaggggataggccaacatgtgaccagtgcctcaaaattcatgaaaaactgactgagaaggcaggcctaggctgtatattgcgatcccttgctgatactgtaaacactgtatgaactttgtctctgctgctgatggtggatattgcaaagttctctcctgctctttacaatcacatcaggcaaactacctgtagttgttaactagttttgcattgtgtctttctttgccattaggcaattttagttagcgtatcattgtaccttactagaatggccgaacaaaatgtgtattatgttgattttcaagtctttgtattaggggtgacaccggactctaaattgtactctataaaatttaaggatgggattatgggctcta

SEQ ID NO: 120803 - DNA, 976 bp, Zea Mays
ggcccatgccaaaacgggccatagggaccatatagcctcacccacgtagccacgtcagagcagagcacccagcaggccagggccagccggccaaaacacagaaaagctaaacccgacctccgctcgccggcgcccggcaggatggcttcgtcggcggcgtaccctgatgcggacgagaacctggaggccatcatcacccgcatagagcagaagtcccgaaagatcgagacccttctcaagcagtcgaagccggtggaggccctaaagacggcgctcgaggggtcaccgctcaagacccgcgacgagcgatgcaagtcggcgaactggatcgtggtgcaccgcgcgttgatggcgattagggacgtagacggcatgttcaactccctggatcccgagtactacgacatcctcatgaagtacctttatagaggtttatctacaggggataggccaacatgtgaccagtgcctcaaaattcatgaaaaactgactgagaaggcaggcctaggctgtatattgcgatcccttgctgatactgtaaacactgtatgaactttgtctctgctgctgatggtggatattgcaaagttctctcctgctctttacaatcacatcaggcaaactacctgtagttgttaactagttttgcattgtgtctttctttgccattaggcaattttagttagcgtatcattgtaccttactagaatggccgaacaaaatgtgtattatgttgattttcaagtctttgtattaggggtgacaccggactctaaattgtactctataaaatttaaggatgggattatgggctctatttctattcatttttgagctaaaatttatttaggacccaaaaaattgcgaagaaatatttggatcacgattcattaccacccctatttgtactagattttttacttccatagttagaatccaaagtgatttctatacgattagatctgaatgaatgtca

SEQ ID NO: 120804 - DNA, 2451 bp, Zea Mays
aactgccctgccctctctcccatcaccaccgcctgcgactgcgagctcaaagatccatccacactgagctgcccaaatccacattcccatcggcgcagacggccgggaggaggatgtccatgccggagacgttcaccctgaaggtgggggaggcgacgccggccgccgccggcaggccgtcggccgggcccgtgtaccggagcatctacgccaaggacggcctcatggacctcccacaggacatccagtccccttgggacttgttcagtggggcagtcaagaagtaccccacgaacaggatggtcgggcagcgtcaggttacagatggcaaggccggtgagtatgtgtggcaaacgtacgaggaagtgtgccagaaggtcatgaggattggatcagcgatcagaagcctgggcgtagagccgggagctcactgtggcatatatggatccaactgcccggaatgggttatggccatgcaggcatgtaacagtcaagggatatgttatgtgccactgtatgacaccctcggagctaaagctgttgaattcatcatgtaccatgctgagatatccattgcctttgtccaggagagcaagatcaaatcaatactagcagttctccctaagtgcacagcgcaccttagagccattgttagtttcggagattttgcaagcgagatgaaagcggaagctgagagattgggcgtctcctgcttttcttgggaagagttttcttcaatgggaaaacaagactaccaacttcccaataaacgtaaggaagatatctgtacaatcatgtataccagcggaacaactggagatcccaaaggtgtgataatcacaaacaaagctatcgttgctggtgttatgaccacagaacacctcctcaaagagaccgataaagtgatcacagaagaggattcctacttttcctaccttccattagcacatatatttgatcaagtaattgagaactactgtatttctaaaggagcctccatcggattctggcaaggggacattaggtacctgatggaggatgtgcaagtgatgaaaccgacaatattctgtggtgttcctcgtgtttatgatcgtatatatacaggtataaacatgaaaattcagtctggagggatgatagccagacacctttttcagtatgcctacaactacaaacttgccaatatgaggaaagggctgaaacagcatgaagcatcaccgtttttcgacaagatagttttcagcaaaataaaggaagggcttggagggcgtatacgtctcatgatagctggagcagcacctttgccagggcaaatcgaagaattcatgcgggtaaccacctgcagcgttgtagtacaaggatatgggctcactgagagttgtgcaggatgcttcacgtcaatcgccaacattttctcaatgattggaacagtcggccctcctgtcacaacaatagaagcacggctggagtcggtccctgaaatgggctacgacgcactgtcagacacgccccggggcgagatctgcttgaggggccacaccatgttctccgggtactacaagcgccctagcctcactgaagaagtgttctcagatggctggttccatacaggtgatatcggggagtggcaatccaatggcacgatgaagatcatcgacagaaagaagaacatcttcaagctgtcccagggggagtatgtggcagttgaggtcctggaaagagcatacctgcagtcaccccttgtggcatcggtctgggtctacgggaacagcttcgagtcgttcctcgttgccgtggctgtccctgagaggcaggctctcgaggaatgggcagcagccaacagcaaggccggcgactttgcagagctgtgcgctgatcccaaggcgaggacctacgttcgggatcagctgaaccaaactgggaagaaacttgggttgagaggcttcgagatgctgaaagcagtctacctggagccggtgcctttcagcatcgagaaggacctcgtcactccaacctttaagctcaagagaccccagctgctcaagtattacaaggatcgggtcgaccaaatgtacaaggatgccaaggaggggagagctgcgccatgagcccatgacggcattgccaatttgccacgagtggctatgatcctgagcattgtgattcctcgaaagcgtgtacatattgattatcacaatttgtaagtttaaggcatgtgtgttctatgccaaaatgtcagcagaaaatgaattggctaagaagctcgtgaatcgtgatagcttacattaataaatttattaagctagtccattaccttcacacactccttacttttttgtttttgtttggtttgtggaatagaagatgagtttatccatcactaccctttttctcatagataccactatttcttatagatagttagttagtactaatatgagaaatgagatc

SEQ ID NO: 120805 - DNA, 900 bp, Zea Mays
ggatcagtcagtgaagcagctggtcgattcgtggaacttgtcatcaccctatgtgtgcaggtgatatcggggagtggcaatccaatggcacgatgaagatcatcgacagaaagaagaacatcttcaagctgtcccagggggagtatgtggcagttgaggtcctggaaagagcatacctgcagtcaccccttgtggcatcggtctgggtctacgggaacagcttcgagtcgttcctcgttgccgtggctgtccctgagaggcaggctctcgaggaatgggcagcagccaacagcaaggccggcgactttgcagagctgtgcgctgatcccaaggcgaggacctacgttcgggatcagctgaaccaaactgggaagaaacttgggttgagaggcttcgagatgctgaaagcagtctacctggagccggtgcctttcagcatcgagaaggacctcgtcactccaacctttaagctcaagagaccccagctgctcaagtattacaaggatcgggtcgaccaaatgtacaaggatgccaaggaggggagagctgcgccatgagcccatgacggcattgccaatttgccacgagtggctatgatcctgagcattgtgattcctcgaaagcgtgtacatattgattatcacaatttgtaagtttaaggcatgtgtgttctatgccaaaatgtcagcagaaaatgaattggctaagaagctcgtgaatcgtgatagcttacattaataaatttattaagctagtccattaccttcacacactccttacttttttgtttttgtttggtttgtggaatagaagatgagtttatccatcactaccctttttctcatagataccactatttcttatagatagttagttagtactaatatgagaaatgagatc

SEQ ID NO: 120806 - DNA, 312 bp, Zea Mays
atgccgcacagccgccagccggccaggggcacgccgcacagccgccagccgtccagggccaagccgcacgcgccgcacgccgctaggagtctgtccgcggctccgcgcgccgtccaggggctctccgcagcgaccagcgaggcagcgagccaccaggggtacgggcactccggcgactctgctctgcactccagtgactccgctctgcacaccaatggccagccgcccgcctatggccaaccgcccagcgccctgccgcccgccagcggccagcccgccaacgcagagctgcagagcctcgattgctcctga

SEQ ID NO: 120807 - DNA, 2245 bp, Zea Mays
ctctcaactccaagtcttctctctctttctctctattctttccatccccgcttctcggaagctcatcagccatggacgacgccgcgggagaggaagaagcttcgatgttcgagaccagccatgtccttggcgccctgctggcctcctcgccgctgctggcgtccgcctgggaccgctgtacgaccgccacagccgcggcgcccgggttcgtgcacggagaggacggcggcaaggtgtacgtggggttctccggggtgcaggccgcgctgtctgcggcaggcgcggcggtggccggtggtggcgccgacgtcttcgcgccggtggggctcggcggggacgcggcggggcggatgttcgcgccgctgctcgcggccgagcccgactcgtccgctgctggggagccggttgccgtgcaggcgctggcgctgcagtgcttcttgaaactctgcggtaaccctgatttccagatgcttctgaatgagatcaggggtaaggcagtcatgttcacgggccactccctcggtggcgccattgccaccctcgcggcgctacactacctctgcatctcatcttcaagctcaccatggtcacctgctgctcctgtcctgtgcgtcacctttggaagcccgctactaggcaatgaggcactgtccagggcaatcctgcgtgagcgctggggtggtaacttctgccacgttgtctcacagcacgacgtcgtcccaaggctcctcttctgccccccggacgccgtccctgcgcatatcattgtcggaatgcaactggatcaatggccggcccggactcgccacacaggtgcggtgaacacggtcaccacacgcatggcggacactgacaagaacgcgctccagcagctgatacagacacacatggccgctgtggccatggagcagaagcttgctactcctgagacgacaggtgggagtccttaccggccgtttgggacgtacgtgctgtgctccccagaaggtgcggcgtgcgtggacaacgcgaccgcggcggcacagatgctgtacgccaccttcgcatctcggagttcgcccggtgcagagtccccggaggccgcgcactcctgctacggcgagctcgtgctgaaaatgccacagcacctgctcctcaagagatgcctgcgtgtggacgacacgcgtgccacgcccaactacgacgacggcgtctccctcgcactggaggcctccggcatcgacgccacggccatggaggcatcgacagcgcggcagtggctgaagacatcgaagcgggcagggcggcggccgagcctgaactgcgcttgcctagcgacgcagcttggccggatcacgcctctccgtgcgcagatcgaatggtacaaggcggtgttcgacgcggagatggggtactacgacgcgtttaagcagcgcaggtcgcccaggaagtactccaaggtgaacttaaaccgcatgaagctgggccagttctgggacggcgtgctcactaagctcgacgccggtcagctcccccacgatttccaccgccgcgccaagtgggtcaatgctgcccgtttctaccagctcctggtcgagcctctcgacattgccgactaccaccaccaaggcctccatcggacgagcgggagctacatgacccacggccgggagaggaggtatgagctgttcgacaggtggtggcaggagaaggcatgtacgggcgctggcggcgacatcacgtcctccatgttggcagcgtcggcgagcagccggagacgcagcaaatacgccgggctcacgcaggacccgtgcttctgggcgagagtggaggaagcgagggaggagacggagagcgctcggggcgagcgcgacgtggcggagctggcgatgaagctggaggagctgcaagagttcgagcgctactcccgtgagctggtggcgaacaaggaggtgtctgttgacgtgctcgcgccgcagtcgagctacacgctctgggtggaggagtggaaccagctcaagctcagggatgaggtgaggacactgttgctccagttttgagctgagttgcaaacagctgatgaatttgtagatagctggtgggcattctccaaatggttcagaagtacatgaatcatttgatcattgtccatggatgctactatatagctgattgtaaatatatctaaacctagaaacattgcagtggattacaatatatttattctttcatgggtaccttgatggcccgatactgattcgaaaaa

SEQ ID NO: 120808 - DNA, 1943 bp, Zea Mays
gttctagcatgagtgctttgtgccactttatgcagctaatgatcccattctctccaatctttacttttcgacctgtctcactgaaactgtgctactaaaatttcacatttgtgtttcaccacactgaaactgtgacttactcatcagaattggttgacattgcagatgcttctgaatgagatcaggggtaaggcagtcatgttcacgggccactccctcggtggcgccattgccaccctcgcggcgctacactacctctgcatctcatcttcaagctcaccatggtcacctgctgctcctgtcctgtgcgtcacctttggaagcccgctactaggcaatgaggcactgtccagggcaatcctgcgtgagcgctggggtggtaacttctgccacgttgtctcacagcacgacgtcgtcccaaggctcctcttctgccccccggacgccgtccctgcgcatatcattgtcggaatgcaactggatcaatggccggcccggactcgccacacaggtgcggtgaacacggtcaccacacgcatggcggacactgacaagaacgcgctccagcagctgatacagacacacatggccgctgtggccatggagcagaagcttgctactcctgagacgacaggtgggagtccttaccggccgtttgggacgtacgtgctgtgctccccagaaggtgcggcgtgcgtggacaacgcgaccgcggcggcacagatgctgtacgccaccttcgcatctcggagttcgcccggtgcagagtccccggaggccgcgcactcctgctacggcgagctcgtgctgaaaatgccacagcacctgctcctcaagagatgcctgcgtgtggacgacacgcgtgccacgcccaactacgacgacggcgtctccctcgcactggaggcctccggcatcgacgccacggccatggaggcatcgacagcgcggcagtggctgaagacatcgaagcgggcagggcggcggccgagcctgaactgcgcttgcctagcgacgcagcttggccggatcacgcctctccgtgcgcagatcgaatggtacaaggcggtgttcgacgcggagatggggtactacgacgcgtttaagcagcgcaggtcgcccaggaagtactccaaggtgaacttaaaccgcatgaagctgggccagttctgggacggcgtgctcactaagctcgacgccggtcagctcccccacgatttccaccgccgcgccaagtgggtcaatgctgcccgtttctaccagctcctggtcgagcctctcgacattgccgactaccaccaccaaggcctccatcggacgagcgggagctacatgacccacggccgggagaggaggtatgagctgttcgacaggtggtggcaggagaaggcatgtacgggcgctggcggcgacatcacgtcctccatgttggcagcgtcggcgagcagccggagacgcagcaaatacgccgggctcacgcaggacccgtgcttctgggcgagagtggaggaagcgagggaggagacggagagcgctcggggcgagcgcgacgtggcggagctggcgatgaagctggaggagctgcaagagttcgagcgctactcccgtgagctggtggcgaacaaggaggtgtctgttgacgtgctcgcgccgcagtcgagctacacgctctgggtggaggagtggaaccagctcaagctcagggatgaggtgaggacactgttgctccagttttgagctgagttgcaaacagctgatgaatttgtagatagctggtgggcattctccaaatggttcagaagtacatgaatcatttgatcattgtccatggatgctactatatagctgattgtaaatatatctaaacctagaaacattgcagtggattacaatatatttattctttcatgggtaccttgatggcccgatactgattcgaaaaa

SEQ ID NO: 120809 - DNA, 1149 bp, Zea Mays
cttacaagcttgagatgttttgagtccggatgaactgatccttgtttcaaagttgtagtctgcccgctccggcgccatggctgcggcctccgaccgtggtgaggtcgacactgcacggcccttccggtccgtcaaggaggccgtagccgtgttcggacaccgcatacttgtcggcaacaaccattccagtcacagcagcactgcggccgccgccattgccagcccaagcgctagtgccaatgccactggcgttgctgccaccccgagtgccaagcatgaagcaagcagtagcagcagcaccatgaccttctctcccacaccaatggccgagagcgaggcggagattatacctgccactgtgcccttgtactcggcgccatcctcgccgccatctctcgcgtcgtcaccttcgccggtcaagccgtgcagcggtcaccgcggcgacgagtcagccggtggtctggtgatcgtgcgctcaatccagaagctggaggccgacgtggccgcgacgaggaaggagctggcgcagctcgggaagcgggggaacgagatggagaaggcgctcgtcagcctcagcgcgcagctccaccggggcctctcgaagctcgcggagatggaggccgacagggcggcgggacgcggccgcagcatcgcgtgcgacaccgacgtggcgtcgttctcgctccggagcgagcagtggggcgacaggctcgccgcgagcgagtacctgccgtccttctcccacgcgctgagcctcggcgagatggacgacgtggagctcatgggcggccagaggaggaaggcgcagaaggtcaagcccatcgtgccgcttatcggcgacatcctcttctccaggaggaagagcaccaaggagaagggtgatgacggctcctacagtggtgatctctacggcgtgctaggctaggctgatggtcagcgctaaattctgtgtgcagtgtgctcatctgtgtatcaagcatggcagcttgcattgttttttttttcttgttttgcttggctgttttctctattcttctgctgttattgcttgcgtggcttgtgcaggggagttgcatttgtgtaaatgtacaaacatgttgatataacctcaggtcatgaatggaacagagtgcgtgtgatggcagcaaa

SEQ ID NO: 120810 - DNA, 854 bp, Zea Mays
actttttggcacgtttttgtttgtttcattacatccacgaacaagggcagaagggggcgaccggccggttggtgccattgtcatgcatgtctcctcgccgcttctgacgcgtgcgtagccagcgttcaggtgccgtgctgatccgccgacgatgccgggcaaccaccaggagggccaagggccgccgggcgccagcgtgtgcttgtggctggtgacggtgctgctcctcctctccctgctcggcggcggcgcgtgcctcgcggcctacatcctgctgccgccgcacgaggcgccggcctggctcgccgccgtcggcctggcgctcgtcgcgcttccgtgggcgttttggatcgtcacgtgcgcgtaccggtgcgccaaggtgcgggccaacgagagcagaacgatggccgtggcgccggcctctggcagcatgtgctcccgctccggctcatgagcaatcactgcaagacgccttggcgtgcagaccaaatttcagtattttaggattgctgaagacgcagaacgacatgaggaactgaaggaattaaatctgttcgtagctcaatctacatattgatgtcgagtggaggatgccaaaactctggtgctacaatgccctgttttccaaagtagcgaatgtatatattttcctgatgagatcctagccaacatttctttccctgtacagttcttgtcaatgttttaagagtttgaagttgagccgaacgtcttgactcttgagtgggaaggagattgtgttcagaaaactgtacaaataccttttagcttgctgggttgcaaactgttgcagttggaaggccttgatctttaaactatccgaagcagtatcattt

SEQ ID NO: 120811 - DNA, 84 bp, Zea Mays
cagcactagtaatttactatgttatattttatttcaatgttctgcagatggatagatcttggatgaaagacagactatttagcg

SEQ ID NO: 120812 - DNA, 640 bp, Zea Mays
cttcaaattaaatactaccaacaaggattatgaaatgtttagcactgattccttgatacaacactattgtaaaattacatggtcctgttgattaaactggttatgagtgacgcgtggacttaccagcttatcaagccaggttttcctttaactgcaatgaacacttgctctttgggcaggctcatgcaagaggcgttcagataaaaagaaacttggggtgaactgaagaagttacaacggcgtataataattacctgaaagcaagtgtccacacacaagagctgtgtcctagcagtggtgaaacacaacggccagtcgagagatcccatatcatgatcgttccatcttcatctccagaggccatgtatcgtccatcaggtgacattgccagtgacaaaaccatactcctatgaccaataaacatccgtatacattcacccgtctgaacatcccatagtcttacagttttgtcgctagagccggtagcaatgtagttacagtttacgtgccactggacgcactgttatgcaaaacattttcaggcagaaggaaaaaagatcagccaaatcatgctggcatcaatacagggcattgataaaaacaagtagatatccaaacataaaagaattaaaaacaccaa

SEQ ID NO: 120813 - DNA, 499 bp, Zea Mays
gagctccacgcagttgcccaccaattgaaccatcacacagcaccaatgggtcaccaccaacctccagctggcccgattggtgcccgaactctcctgccggcggtgaatcgcgacggcggcggctcctatttctattcttcctctcagatgcgcctatgcttgagggagctcgcagtagggaaggctgaaggttcgtccacggcgctgctgcgactagaggagaggagcgaggggcagggcgcgacggaggaacttggccacccggatggagctcgccaggaagggttgtccgagcagacctggcaaggagtcacccgctgaatgggagaacggcgtctgcatagccctagtagatgtggctggggagggcgcggccttagtacttaatcactggagcgcggatttcgcagagtttggcggcgagggacccggccgatctccacaatcccgacgacccagccgcgacgacattctgttagcggggaggacggggaaacac

SEQ ID NO: 120814 - DNA, 120 bp, Zea Mays
tagtaaacctcagatcctgcatgaagaggtatcgtatctaccaaattaggattcgaaacaggaactccacaacactttcacaaggagtattttacttccccaccaagcaccgaaaaaata

SEQ ID NO: 120815 - DNA, 585 bp, Zea Mays
atgcggttgcaggggcgctacgctgcgttcctccgccgggcatcagccctgccgtccctgccgctggtggcttccctccacgccgccgtgctccgccgcggagtccccgccctcctcgcgtcgtccctcatccaaggctactccgcctgcggggacctcgactccgcgcgcgccctgttcgacgaaacgcccccaacgctctcgtcccgcaccgcgctcgccggcgcgctctcggcgcacggccggtgcgcggaggctctggatctgctaaatgtcccggaggcaggggtggacgacagggcggtgacggtgctcctggcggcgtgcgcgcgcgcagggatggtggccgaggggaggcgcgtgttcgcgagggtaccccgccccgcgctgcagcactacacgtgcatggtggagatgctggggcgcgtcggggaggtggaggaggccgagagactcgtggccgggatggaggcgcgcccggacagggtcatcttggcggcgctcctcaccgcgtgccgcgtgcacggccgggttgacgttgccgagcgggtggccgggctcatgcgccggtatgccgttgcgtga

SEQ ID NO: 120816 - DNA, 2531 bp, Zea Mays
ccggcgccggggcccgcgaaatctcctcgaccgctgctttctcttcctcttcctcttcctcttcctttcccatcctttccacccatccacaccgccaccaccgcctacctccaccaccagtccatctcctccgcagcgtctaaagccctatccggatatccccactcgccgacgcccggacatatggccagcttcggcgtcgacacccgcccggccgccgcggcctccggcggcggcgtgggcgtggcggggacgagggagggcgcgctctcgttcctctcccgcgggctgcgggaggacctccgtctcatccgcgcgcgggccggggagctcgagaccttcctcagcgcgccggtgccggaacccgagctgttcgcgcgcctccgtcgcgcctactcctgctcggcgtcctcttcgcggacgcggctcgacctgtccgccatcgggaaggcgttcgaggccgacgcgtggaggggcgccaggactgccaggtggaggtgggaggcggagacggaggcggaggagtgggagccagtcaggatggtcaaggcgcacctcagggagctcgagcggaggaggctggcccagtcgcccagcgacatgctgcacaagctcaagctcagcttgaaatcactgacctttgcgcctgaagcgtctgaggatgttctgccactggatttaggggaacttcttgcttattttgtaaagcaatctgtaccactattcgaccaacttggtataaaaagagatgtatgtgacaagttggtggagtctctgtgcagcaagcgcaaggaccaccctgcatatagttttttgtcagcaactgaatcatcttcattgaaaaatgacaatgttgggaatgaactcgacctaagaatagctagcgccctacagagtacaggacaccattatgaaggtggattttggagtgatggccataagtctgacatatctggcaagagacatgttgccatagtcaccactgccagtcttccctggatgactggaacggctgtgaatcctttgtttcgagctgcatacttggctaaatcttgcaagcaagatgtaactttggtagtgccctggctttgtaagtcggatcaggaacttgtgtaccccaacagcatgacttttagttcaccagaagagcaagaaaaatatatgaggaattggctggaagaaagagttggtttcaagacagacttcaaaatatcattttatcctggaaagtttcaaaaggaaaggagaagcataattcctgctggggacacttcacagttcataccatcaaaggaagctgatattgcaatcttggaagagcccgagcacctcaactggtatcatcacgggaaacgatggacagataaattcaatcatgtgatcggtgtagtgcatacaaattatttggagtacatcaagagggagaagaatggtgctattcaggcctttttcgttaagcacattaataacctggtcgccagagcttattgccataagatcttgcggctgtcaggtgccactcaagatcttcccaagtcgacgatctgcaatgtgcacggtgtgaaccccaagtttctggaggttggagagaggatagcagcagagcgggagtctggccagcaatccttctctaaaggagcttattttctggggaagatggtgtgggccaagggttacagagagttaatagatttgttcgcgaagcacaacagtgatttggaaggcttcaagctggacatctatggaaacggtgaggattcacacgaggtgcaatcggctgccaggaagctgaatctgaacctcaactttcataagggccgggaccatgcggatgattctcttcatgggtacaaggttttcataaacccaagcatcagcgacgtcctctgcaccgcgaccgcggaggcgctagcgatgggcaagttcgtggtgtgcgccgaccacccgtccaacgacttcttccggtcgttccccaactgcctgacatacaagacctccgaggacttcgtcgccagagtgaaggaagccatggcgcgcgacccgcagcccctgaccccggagcagcggtacaacctgtcgtgggatgccgccacccagcggttcatggagcactccgagctcgacaaggtcctgaatggcgacagcaacagcgaatgcggtggctctgttggcaccgaaaccggcaagagcgcgggcacaatgatgaggagatccgcctcggcgccgaacatgtcagacgtcgtggacggcggcctggcgttcgtgcactattgcttcaccggcagtgagctcttgaggctgtccacgggtgccgtccctggaacccgggactacaacaagcaacatagcctggacctccgtctcccgccgccccaggtacagaacccggtctacggctggtaattactagatatataggtatagctctgcagtctgtagcactagctttttcatctccgcgtgtgtttgtttgccaaaggcgagccttgttcattattacctacaaacaacaactacgactgtaaggatga

SEQ ID NO: 120817 - DNA, 2398 bp, Zea Mays
tccaccaccagtccatctcctccgcagcgtctaaagccctatccggatatccccactcgccgacgcccggacatatggccagcttcggcgtcgacacccgcccggccgccgcggcctccggcggcggcgtgggcgtggcggggacgagggagggcgcgctctcgttcctctcccgcgggctgcgggaggacctccgtctcatccgcgcgcgggccggggagctcgagaccttcctcagcgcgccggtgccggaacccgagcggaggagtgggagccagtcaggatggtcaaggcgcacctcagggagctcgagcggaggaggctggcccagtcgcccagcgacatgctgcacaagctcaagctcagcttgaaatcactgacctttgcgcctgaagcgtctgaggatgttctgccactggatttaggggaacttcttgcttattttgtaaagcaatctgtaccactattcgaccaacttggtataaaaagagatgtatgtgacaagttggtggagtctctgtgcagcaagcgcaaggaccaccctgcatatagttttttgtcagcaactgaatcatcttcattgaaaaatgacaatgttgggaatgaactcgacctaagaatagctagcgccctacagagtacaggacaccattatgaaggtggattttggagtgatggccataagtctgacatatctggcaagagacatgttgccatagtcaccactgccagtcttccctggatgactggaacggctgtgaatcctttgtttcgagctgcatacttggctaaatcttgcaagcaagatgtaactttggtagtgccctggctttgtaagtcggatcaggaacttgtgtaccccaacagcatgacttttagttcaccagaagagcaagaaaaatatatgaggaattggctggaagaaagagttggtttcaagacagacttcaaaatatcattttatcctggaaagtttcaaaaggaaaggagaagcataattcctgctggggacacttcacagttcataccatcaaaggaagctgatattgcaatcttggaagagcccgagcacctcaactggtatcatcacgggaaacgatggacagataaattcaatcatgtgatcggtgtagtgcatacaaattatttggagtacatcaagagggagaagaatggtgctattcaggcctttttcgttaagcacattaataacctggtcgccagagcttattgccataagatcttgcggctgtcaggtgccactcaagatcttcccaagtcgacgatctgcaatgtgcacggtgtgaaccccaagtttctggaggttggagagaggatagcagcagagcgggagtctggccagcaatccttctctaaaggagcttattttctggggaagatggtgtgggccaagggttacagagagttaatagatttgttcgcgaagcacaacagtgatttggaaggcttcaagctggacatctatggaaacggtgaggattcacacgaggtgcaatcggctgccaggaagctgaatctgaacctcaactttcataagggccgggaccatgcggatgattctcttcatgggtacaaggttttcataaacccaagcatcagcgacgtcctctgcaccgcgaccgcggaggcgctagcgatgggcaagttcgtggtgtgcgccgaccacccgtccaacgacttcttccggtcgttccccaactgcctgacatacaagacctccgaggacttcgtcgccagagtgaaggaagccatggcgcgcgacccgcagcccctgaccccggagcagcggtacaacctgtcgtgggatgccgccacccagcggttcatggagcactccgagctcgacaaggtcctgaatggcgacagcaacagcgaatgcggtggctctgttggcaccgaaaccggcaagagcgcgggcacaatgatgaggagatccgcctcggcgccgaacatgtcagacgtcgtggacggcggcctggcgttcgtgcactattgcttcaccggcagtgagctcttgaggctgtccacgggtgccgtccctggaacccgggactacaacaagcaacatagcctggacctccgtctcccgccgccccaggtacagaacccggtctacggctggtaattactagatatataggtatagctctgcagtctgtagcactagctttttcatctccgcgtgtgtttgtttgccaaaggcgagccttgttcattattacctacaaacaacaactacgactgtaaggatgacaacgctgcgtcgtgattttgtaagactagtgctagatagagaggcgagcatttcttcaatcaaaaaatttaaaaaaaaggaaaggaaagaaagactgaggcggggcaggccctctgtttccaa

SEQ ID NO: 120818 - DNA, 665 bp, Zea Mays
aagaaaaatggtaaaaaataaatagtttttttatttattgcaacatgctcgtcgattcctaccacttaatcttaatttattgtatcttcccagagttccctctccaggaattcgattttaattattcatgtatattactttttatcgtttaattgatggtccttattttattagaaaacgtgtaaagattatttggatttgatacatcattggcttatcaaattctctatcgagccatgaaaaagattcaacaaaagacagaaacaaatccactattggttttacgtcaagcaatacgtagagtaactcccaatataggagtaaaaacaagacgtaataaaaaaggatcgacacggaaagttccgattgaaatagaatctaaacaaggaagagcacttgccatttgttggttattagaagcatcccaaaagcgttcgggtcgaaatatggctttcaaattaagttctgaattagtagatgctgccaaaggggttgggggtgccatatgcaaaaaggaagcgactcatagaatggcagaggcaaatagagctcttgcacattttcgttaatccatgaacataatctaggtatgtagacacgtggatccatacatctcactaaaaattaaaggtagagctctaccaaataactattacttagaacca

SEQ ID NO: 120819 - DNA, 3551 bp, Zea Mays
caacagtgacgctagctctcaagcaaatagaggcagcagagcagaccatagagagtggagatcagccagcagcagcagcagcaaggctgagccgccgcccccacgagtggagtggaggcagcagccagcgacaaggctgaatccgggaggtccgcgcgccgcagccgtggctgccatcgcaggcgccgccgccgccgccgcttgtgagaggcgctcgtcttgtattcacgaggagggcgacgacaccccctcggcaaaggagctggccactggccccgccctgtgatggctgctgcccgtgccccggcggcgaggggacgcgtaggtgctccggaggcggcagctgcgtggaggggcggcggtctccgcgcgaagcaggccgggcgcgccagctgccgcggcgcgtagaccgagcgactggacgccgtctctctctctctctctctcgcaatccgagtcgggggctcggggctagggttttggcgctgagggcgccggggttctagcggagcggctggaggaagaggggagggggcggggggcacggagatggcggtcggggacgcgctgcgacggctgtgcgaggagatcgggtggtcctacgccgtcttctggaaggccatcggtgctgcagaccccgtgcatttggtgcaggaggacggctactgtggccacacgtcatgtcctgtcggatctgagccttccgaatctctgcccagcgacgccgggtgctctgttcctgctgctaacaccatctgctcgcttgttcacagcgttatggcgtcgcaggtccatgtcgtcggacaagggaccgtaggccgtgctgcgttcagtggcaaccaccaatggatcgtccgcggtaccgccaatggtcacgggctctcctccgaggttgctgcggagatgaacaatcagttcagagttggcattcagacaattgcgatcattcctgtgctgccacggggtgtcctgcagttaggctctgctggtttggttatggaaaacataaattttgtgatgtttgcaaagaagttgtgttctcagctaaacaaccgttcaagcatggctgcatctgcttcggctaaaaacgctttaagtcagcatggccagtcacgtcctgatactgcaactgtgtcaactaggacaccaccaaatgcattgctgaatgcatctttgcttaaggttgcacaacagagtggtcaccctgttagagagcacgttgtctatgctgagcctgaccttaggtttagacaacaagcatccttctgcgagaaccaatttggaagtaatttacagagtgttgttatgaactcaagtttgacctccccaagcttggcatcagttaaaaagcagccactcttgatgaacagcattgggcagttacagttcagtaattatgtgcattcatcggcagatttggcaagagatgtcatattaaaatcccttgtgcgccaggactcttctgtctgcgaaactacaaacatgaatatgcatcgtggaagatatatggtatccaatgatataaatggttctggggattttgattttctccctgtaggtgccaaagcaagcagagccaacttatcaaccagtgtgtcgagtcaaatattggaccacacaacaagaacactgcagcaaaaacagtctcttgtcccattcaaagtcacccaatcttctgaattcaataagaaaatggagaaccctgaaaatggatcatttcaaaccccttcagttccaacttctgaatctggtggtcaggtttctaacagtttcaacatggaccaagagaatcaattgattatgtcaaacaatgtacggcaagttcaaaagattaatagatttagtgatccaagtgctaatgtaagcactcagagaatgaagaacagggatgtatgcgagtcgggaatgcccattgagagaggttcctcgttgctagtggagcctggtgcagataatgacttgtttgatatgcttggttctgaatttcatcagttctcccacaacgttgggtctgatttggtcacctggagtggtacagagtctcagaattcagatagagatggccctgaatcatcaatatatctcaatagctcaccccttttcagttcgttagacaacgagcttcactattctggtatcttatcactaactgatactgatcaactattggatgctgtcatctcaaatgtcaatccaagtagtaaacagtgtcctgatgatagtgcttcttgcaagactgcattgacggatgttcctagcacatctcatcttggttcaatagacttgaagagatgtgagtcctccggcgttccttcagtgctaattaagcacgaattggcacagcttgttaagcaaccatgtatttttgacaaatctgagaactgtctttcccaaaataatggaatgcacaagtctcagatacgcctttggattgagagtggtcagaacatgaaatgtgaaagtacttcagcttctaacagcaaaggtcttgatacgccaagcaaggcgaatcgcaagagatctcgacccggtgaaagtgctaagccacgacctaaggaccggcagctgatacaggaccgtattaaagagcttcgtgagcttgtaccgaatggggcaaagtgtagcattgatggtttgttggagaagacggttaagcacatgcttttcttacaaagtgtgacgaagaatgcagacaagctcaaggactctaccgagtctaagatacttggtagtgaaaatggccccctttggaaagactacttcgaaggtggggctacctgggcttttgatgtcggctctcagtctatgacatgtccaatcattgttgaggatcttgaccgacctcgtcagatgcttgtggagatgctttgcgaggatagaggaatcttcttggagatagctgatttcatcaaaggactaggactgactatcttgaggggtgtgatggaaatgcgcaaaagtaaaatctgggcacggttcactgttgaggcgaaccgggacgtaaccagaatggagatctttctatcgcttgtgcgcttattggagccaaactgtgacggcagtgcagcggcggagaacgctagcaacatgaacatgcctcttggcttggtgcaccaacctgtcatcccagcaacaggcagcatccaatgagactagaggaaaccctgaagcatcttcccaagtgctaagagcaggagctcaactaacttctgcagtgactagcatcgccaatatgccagtgcatcgcctgcttttcctgagacatcttaatccgtgcaaatgtgacatccttcatgagaccaggtcgcagaaatggaagaaggaaaacaacgccaagagtgattgttaggcagtgttttgtttgtatgatcttagtttgtttgttagttagcgctgtttggtcgtatattagcggatttttttggtactgttattcagaatggaaattcttgggttggtttatttcacaccaaaaaagagagatggaataccacctttgttataaatcttctcacatcagaaccagttagcatgactagtggaaaaacacc

SEQ ID NO: 120820 - DNA, 3609 bp, Zea Mays
gtgacgctagctctcaagcaaatagaggcagcagagcagaccatagagagtggagatcagccagcagcagcagcagcaaggctgagccgccgcccccacgagtggagtggaggcagcagccagcgacaaggctgaatccgggaggtccgcgcgccgcagccgtggctgccatcgcaggcgccgccgccgccgccgcttgtgagaggcgctcgtcttgtattcacgaggagggcgacgacaccccctcggcaaaggagctggccactggccccgccctgtgatggctgctgcccgtgccccggcggcgaggggacgcgtaggtgctccggaggcggcagctgcgtggaggggcggcggtctccgcgcgaagcaggccgggcgcgccagctgccgcggcgcgtagaccgagcgactggacgccgtctctctctctctctctctcgcaatccgagtcgggggctcggggctagggttttggcgctgagggcgccggggttctagcggagcggctggaggaagaggggagggggcggggggcacggagatggcggtcggggacgcgctgcgacggctgtgcgaggagatcgggtggtcctacgccgtcttctggaaggccatcggtgctgcagaccccgtgcatttggtgcaggaggacggctactgtggccacacgtcatgtcctgtcggatctgagccttccgaatctctgcccagcgacgccgggtgctctgttcctgctgctaacaccatctgctcgcttgttcacagcgttatggcgtcgcaggtccatgtcgtcggacaagggaccgtaggccgtgctgcgttcagtggcaaccaccaatggatcgtccgcggtaccgccaatggtcacgggctctcctccgaggttgctgcggagatgaacaatcagttcagagttggcattcagacaattgcgatcattcctgtgctgccacggggtgtcctgcagttaggctctgctggtttggttatggaaaacataaattttgtgatgtttgcaaagaagttgtgttctcagctaaacaaccgttcaagcatggctgcatctgcttcggctaaaaacgctttaagtcagcatggccagtcacgtcctgatactgcaactgtgtcaactaggacaccaccaaatgcattgctgaatgcatctttgcttaaggttgcacaacagagtggtcaccctgttagagagcacgttgtctatgctgagcctgaccttaggtttagacaacaagcatccttctgcgagaaccaatttggaagtaatttacagagtgttgttatgaactcaagtttgacctccccaagcttggcatcagttaaaaagcagccactcttgatgaacagcattgggcagttacagttcagtaattatgtgcattcatcggcagatttggcaagagatgtcatattaaaatcccttgtgcgccaggactcttctgtctgcgaaactacaaacatgaatatgcatcgtggaagatatatggtatccaatgatataaatggttctggggattttgattttctccctgtaggtgccaaagcaagcagagccaacttatcaaccagtgtgtcgagtcaaatattggaccacacaacaagaacactgcagcaaaaacagtctcttgtcccattcaaagtcacccaatcttctgaattcaataagaaaatggagaaccctgaaaatggatcatttcaaaccccttcagttccaacttctgaatctggtggtcaggtttctaacagtttcaacatggaccaagagaatcaattgattatgtcaaacaatgtacggcaagttcaaaagattaatagatttagtgatccaagtgctaatgtaagcactcagagaatgaagaacagggatgtatgcgagtcgggaatgcccattgagagaggttcctcgttgctagtggagcctggtgcagataatgacttgtttgatatgcttggttctgaatttcatcagttctcccacaacgttgggtctgatttggtcacctggagtggtacagagtctcagaattcagatagagatggccctgaatcatcaatatatctcaatagctcaccccttttcagttcgttagacaacgagcttcactattctggtatcttatcactaactgatactgatcaactattggatgctgtcatctcaaatgtcaatccaagtagtaaacagtgtcctgatgatagtgcttcttgcaagactgcattgacggatgttcctagcacatctcatcttggttcaatagacttgaagagatgtgagtcctccggcgttccttcagtgctaattaagcacgaattggcacagcttgttaagcaaccatgtatttttgacaaatctgagaactgtctttcccaaaataatggaatgcacaagtctcagatacgcctttggattgagagtggtcagaacatgaaatgtgaaagtacttcagcttctaacagcaaaggtcttgatacgccaagcaaggcgaatcgcaagagatctcgacccggtgaaagtgctaagccacgacctaaggaccggcagctgatacaggaccgtattaaagagcttcgtgagcttgtaccgaatggggcaaagtgtagcattgatggtttgttggagaagacggttaagcacatgcttttcttacaaagtgtgacgaagaatgcagacaagctcaaggactctaccgagtctaagatacttggtagtgaaaatggccccctttggaaagactacttcgaaggtggggctacctgggcttttgatgtcggctctcagtctatgacatgtccaatcattgttgaggatcttgaccgacctcgtcagatgcttgtggagatgctttgcgaggatagaggaatcttcttggagatagctgatttcatcaaaggactaggactgactatcttgaggggtgtgatggaaatgcgcaaaagtaaaatctgggcacggttcactgttgaggtaatgcagctaaatttaataatcaggattctttcagatcaaaatctgaagtaaaaaacagtaactagaagttcaaaatctgaagtaataaacagtaaccagaatggaaatccaaaggaatgagatgacgctgttccatgcaggcgaaccgggacgtaaccagaatggagatctttctatcgcttgtgcgcttattggagccaaactgtgacggcagtgcagcggcggagaacgctagcaacatgaacatgcctcttggcttggtgcaccaacctgtcatcccagcaacaggcagcatccaatgagactagaggaaaccctgaagcatcttcccaagtgctaagagcaggagctcaactaacttctgcagtgactagcatcgccaatatgccagtgcatcgcctgcttttcctgagacatcttaatccgtgcaaatgtgacatccttcatgagaccaggtcgcagaaatggaagaaggaaaacaacgccaagagtgattgttaggcagtgttttgtttgtatgatcttagtttgtttgttagttagcgctgtttggtcgtatattagcggatttttttggtactgttattcagaatggaaattcttgggttggtttatttcacacc

SEQ ID NO: 120821 - DNA, 825 bp, Zea Mays
atggatgcccttgttggtggacgcgctctccgcccccgccccgccgcctcccacgcgcaccgcggacttggacatcacgtccgccctcggcatgacgccgtcgacggtgtcgctgctcttgctgccgccgccaccggacttgccctcgtcgttgccgccgcctccagcgtcctggtcctttgtctcctccaggtacatctcctccaccataggcttccacagccgcaccctcgcattgatgaaccaattggacacctgactcctggtgagcccggtttgcttggcgagcatgatcttgtccgaatccttggggtatgggtgcaggaagtgctcgaagagccaggcgcggaggatggagacggagcgctcggggaggccgcgctggggccgccaggcgccgccctgcatcatgccgagctgctgcagcgcgcgctgctgccggagctggtggtcgatgtagcggaggcgggaccccacggtgcggcccccggcgacggcggcgtccgcgtcctcgcccagcgcccggctcgccgcgcgcacctgcgacgcgatcgcgtcccgcagacaccggaactgccgcgagatggtgcgcagcgccagcgccgtgtacgtccgcgccgacccggcccccgccgccgcctcgaacgacgacgacaccgcctgcatctgcccgtggtactgccggtaccgctgctccacctcgtcaagcatgttgagaagcttgctcttcttcatctgcatctcctgccgctccgccgtggacatctctggcgcggcaccaccgccgctctttgcgccggcaccgtcgtcggtgccgccacctga

SEQ ID NO: 120822 - DNA, 480 bp, Zea Mays
atgagatgcatgcatgatgagactggaacgggagaactcacgggtgcaggaagtgctcgaagagccaggcgcggaggatggagacggagcgctcggggaggccgcgctggggccgccaggcgccgccctgcatcatgccgagctgctgcagcgcgcgctgctgccggagctggtggtcgatgtagcggaggcgggaccccacggtgcggcccccggcgacggcggcgtccgcgtcctcgcccagcgcccggctcgccgcgcgcacctgcgacgcgatcgcgtcccgcagacaccggaactgccgcgagatggtgcgcagcgccagcgccgtgtacgtccgcgccgacccggcccccgccgccgcctcgaacgacgacgacaccgcctgcatctgcccgtggtactgccggtaccgctgctccacctgccagtgccgttgttgtcgacatcgccatgcgcacacatgacacaacagtgtga

SEQ ID NO: 120823 - DNA, 189 bp, Zea Mays
atgtcgcacgaaaagggatcgtgggttatgggccacaacacgctaccactggtgataccaacaccggtaggagcttctggagggaagggagctactacaaaagagactccaaaccagacagacaacttcgtaaacaacttcttcgcttttagaggtagtggttacaactcaaacgaccccgatatatga

SEQ ID NO: 120824 - DNA, 1599 bp, Zea Mays
aatttgcttaccctgactaattcgacgagatagtcggaagcacgatgacggttttcggttgatatcttcgatcacacatgtctggcgaacgatgcacacaacttctacttttgaccagatactcatggaattcctttttgtcgagctagtgatgcgtggccagcacaagagcgtcttcacggcttgggacttggcgtagacgaggatggtgatcgacgatatcgacgtgccagcgtgacaatttccatttgacgatgatgatagcagtacgactcgtttgagttgaggtgagcatgatccaagtaccacagcagtacgccgataaagcctcgacaacacaacgaggtgaacgcggcaacacacggctcaacgggtaaagagggcgcgacgactggtgagctggactagctctgataggaacagccgatgtgataaccatggcgaataggaaatcgacaaccggcgaaaccgatggccgaacaggatctgcacaaatcgacgacgcgagactcgatctgacaagcgcgacgcaagggatcgcagctactgcttcgacatgaattacatgatgtcgagcacgacggaggccggggagcaggaacgctgcgtagagaaatccacggctgcgcgcaggggacttcgactgggcagcgaggctcgacgacgttggggttttgcgacaagacaaagtcgagcacacagggcgtgacgggaatcatggccagaatttgggcgagctgagcgacggtgcgggttctggaattcggcgacgaggcgagccagcgcgagggctggggacaagtatggtacagggacgcgcgagggagacggaatctgagagtgcgcgcaaggagacagaatcagagcgtggcaagaaaggcaggaccgagcgcgacgcagagagttccatggtcggacctgcgcagaccttaaatggaggagcagattcggcggtcagacgagcgcaaggagcagctctagcagacagccatgggaaggacgcgcgcgggcagagagacgagctgagggaggagaagctgatggggctacgcagcggccaggctagctggggcaaacagggagcggggcgctggaatccgagccaggggcgagttccatggccgggcggagagggagcgcgtaaggactttaggtgacggcgctctgaacagagggaagacgggtggagggggctcggtggctgtccacgccatggtcgagcagagaacgccggcacggaggagcgagcggcatgggcgagctccagggagcaggcgcgccgaggaccgggaccagggtgagggaggagctcggagctttggggagggagggaggaagccaagcgccatgggagatggctgggcgagcggcgctcagcaaggagaagcagagcgcacaggctgggagctcgactgcggctggggaaaaactcaaccggacgcacagcgcggggaggaagaagagcgcgcgctagagagagatggagggagagagaagccagggcgcggcactggagaggagaaaacaccagggagctcagcgcacaagagaggcaagccaggcgtgcgctgcgtagaggagggagaggaaggagatggg

SEQ ID NO: 120825 - DNA, 189 bp, Zea Mays
ttagaatttaggcagcaagttggtgatctctgttcctttaagaacttgctctgcttatgcatcctacgcgactctggatttcagaagaatctgattggtattttatcttatatcaggaggctcctatatccaaaataccacaattcaccaagcttgtttatatcagatggctatatagaagtcatcagt

SEQ ID NO: 120826 - DNA, 1314 bp, Zea Mays
actctcttctatcagtcttctcactcctatctctcatgtctccttttcctcccaccattcctgtcacccacgcagcacgccagagcagcagtagctgtagagctcggcatcagctctcttgctgctcactttgcagcacctccccggctccctagtaacactctgcacctaccatcgaactctctcaggttcggtcatccctgctcccttgcaaatcagcgcccctccactcggctctgctactgtgccgtgcgcgcgattcctccggcttccatcgctgcgtgcgtgctcatcttccgtcgcatgccacctgctcgatagaacgagtagtttgatcgtccccatctccccgtggttcgtcatcgccaagttttcaggtgtgtttgtgcagagatgccattcaaagtcgatgatctaatcgtcgccaccagccacaagcaccagttccgttgaacgtgagaacgtcttaatcagttgttgagttgaaaattgatgtgtcgatctatggtttgacatagtgttttcaacatgtctatgttctggtcgaggccctagatatgtgattgaagatcctttctggtgatgaaagtgaaatcagcgtggcactcgccaagcgctcgaaagaaggtctagactagagaaccatgtcgtttcacgtttgttgactcggtttggattatggtgagctgattcattgctctggctattgggtctaattaataggattggattttagaaataaaagtacagtgacaaaaattatggtaatttttgaataaccttgttttggtcatttaagcatttggtaaaatttggaggctatttggaagtcctttgctcagaaagccttgtgaagtcacatataggatgaataaatccttttggaaaagatgaagtaagtttatggatgaaatctaatgtgttctagtcccctggtagtcaaagtttataggtgtagcctttagagttcctcatgttagaagtcccatgttgtttggttaattttgtctacacctttagaaaggtgtagtctggtaatgctttttaatatttttgttgcaaactgcataaacataagcatccatgatcatatcatttaatgtagagctcccaacagaaggagtgaagattctagatgaagtggtagctgaagaggtgtttgctccagtgcctgttcatcaagtggatggagccatctaactggttattttgatagaagaatctagaacctcttctctgcaacaaaaggcaagcccggtgcatttgctccttccttgtgttttaaatgctttatcacattatatgatgcattag

SEQ ID NO: 120827 - DNA, 243 bp, Zea Mays
atgaggtcatcgggggaggccggtgaggttcttgatggcgatcggcttggcaccgtggtagtaattgcggccttcgaattgggcgacatcagagcatgtccaggaagccactcatgctcggttggcggtgatggcatgggagcggttgtaggactggcaggaggtaggccagtaccagttctacgacaccgtctaggcgcgaccagaggcctaatgggacaaggcgcggctggaggcagatga

SEQ ID NO: 120828 - DNA, 258 bp, Zea Mays
atggctgctcggcagccaggaacggaaggccaggggctgctcgccattcattggctggccagtaggcaccagctagactgcgcgacggcagcgggtcgccatggcggccggacggggctgatcgggcatcgcggccaggcggggaacggggatggccgggacagcagcgcgtcgagcagcatggcgcgtggcctggctcgacgagggccggcgcctggcgcttgcgtgaggagggcctgggtggttttgggaagatga

SEQ ID NO: 120829 - DNA, 1584 bp, Zea Mays
gcttacctactcgtaacccgccccggcacccctcccgccccgccccgagcaacgcccgctaggctgctgtgctaccccgcagtcccaattccacagtccccaccccaccaggtgcaccacgccgccaccgcagcctccgccccggctgcgttgacccccgttgacctccgcccgcccggccgccatggacccgcgcttcccgccgccggcgccgtcgtcctgcttcggcgggggcggggagctcccagcacgggggcaccaccggcgggcgcactcggagacgttcatccggctgcccgacgcagacctgctgctggacccggacgccgacttcggcttctccgacatcgacttcccctctctctccgacgactcgcccgcggcgtccgacccgacgccgcagccccaggccccgccgctccagccgccgctgcagcaggcggcttccccggcgtccgcggcgccgccgaggccgccgagcggggcgcacatgcggagcctctccctcgacgccgccttcttcgacggcctctcgctgcagggaggcggcggcggcgggggggtaagagggggcatggcggggcacaagaggagcggctccatggacggggacacctcgccgttcgagggcgagtcggcgccgccgtccgtgctgccggactacgccaagaaggccgtgcccgacgacaagctcgccgagctcgcgctcctcgatcccaagcgcgccaagaggatcctggcgaaccggcagtccgcggcgaggtccaaggagaggaagatcaagtacaccagtgagctggagaggaaggtgcagacgctgcagacagaggccaccacgctttcggcacagctcacgcttcttcagagggacacctctggtttaaccactgagaacagggagctgaaactccggttgcaggccatggaagaacaagctaaacttcgagatgctctaaatgatgccttgagggaagaagtccagcggcttaagatagccgcagggcaggtccccaacatgaacgggaatcccttcaatggaggactatcacagcagcagcagatgccaagctatttctcacaaccacagcagatgcaatacttcagcggccaccagggccagcatcaccatccgaagcatgacccccagaattcttcaaacggcggtggccagcccttgagtgactccatggatttcatgtgaggattcaggggagacagctcaggagtgttgcctgagatcacataccaacttcaactaaagtactgtaaatgtagctgatgtataccatattcagtgttatgatatgaaccattgtagtttagctagctgttccttgtaccattaatcaaaagttcattcatggtgacaaacctatcatcgcttttgttctggcgttaaagtaaattggcttgactggttgacgagctgtcgttgtaaagttgttcctgtaacagtgaaggaatggtttgcggttggaacgtggttttcacgctgctgaaagccgttgcatttcgtgattggcgttcatgactatctcatcagcagcttacatatattaatattcaaactacagtgcaatgtac

SEQ ID NO: 120830 - DNA, 1463 bp, Zea Mays
aaagccgatggagaccatttcatatccttgttctcctctcatcttctttcctacacatgaagagagtagccattcactatggtcccctcaactcaacctccatgagaatgccaccatacctgctgatccttctcctgatgcaagagaagatcgtgagttcttcgacaccattgctattggttctagtgattcccacgaccaatatgcctttgaggctgatgtgttcacccattgtgatgagaggtttctgtgccaagagagtgctaacctggcggctctccaagatgagctcatggaggagaacagcttgagtgatctccttctcactgttgcagatgcggttgaggctggagattcaagccttgccttggcagtgctttcaaaactcaatgggctcctggctagcacctgtgataatgctccatccagctctttcggccgcctggcctgccactttgccctaggcctccaatcccggatacctggtgcatgctctccgtgctatctgccggatccggtgccggccggtatcatgtcggcgcaccagatgatccaggagctgtcgccatacgtcaagttcgcacacttcacagccaatcaagccatactagatgccaccacaggcgacatggatattcatgtcatcgacttcaacctcggtgagggcgtacagtggccatccctcatgtcagaccttgctcgccttggaggcaaggcactacaccttacagcaatcataacagatgctgtttacaacgatgacgacgacgacgacaacactcatcagacagctgcacggcggctttcggagtttgccgagtccttgaaccttcccttccggtacaactctctccgtgtacgccatgcggaggacctcgacgacttctccaggaactgtgaagggccagtggtcgtctcatgtgacacaacgaacctgtgttacaggtcgggtagcaggctacagatgctgctacttgtctgtgcgaggaagctacaacccaagtcagtggtggtcatagaagatgagctggtcaggattgggaaagaggcctgtctgtcccaggcctcctttgtggagttcttcttcgaggcattgcaccatttcaccacggtgttcgagtccctgtcgagctgtttcagcagtagtagcagcagggcgtgcctgaggcttgtggagaagggtatggtagggccaaggatacaggacttcgtggggatgtacgggtctgtgacgctggaggccgctgctgctccgaaggctttggaagggtttgtgtcttgtgagctgagtgcttgcaatatcgctcaggctacgatgctggttgggttgttcagcaggagctttggggtcgcgcatgagaaaggcaggcttcagttgtgctggaagtccagacctttgatctctgtgtctgcttggactcctgtatgaaagcaaatgagtttgtgattgtttcgttaggggc

SEQ ID NO: 120831 - DNA, 123 bp, Zea Mays
atttcttttgtcttctttcaaataaaattcaaatatgttttggttttagaacctaaatttaaatgcaaaattcaaagagccagtatgaaatgcaacaattttatatgaattactttattgacc

SEQ ID NO: 120832 - DNA, 306 bp, Zea Mays
gtagtggagaagcgttgtgccgacatcgtcgatgtcgtccacggtgccttccaaccagttagcggaccagtcctcaatgaaatgaatcatgctttagttcagatcgaggacctcgccaaggaccttgatcaccttgcactggaaaaagactgggagatggagcacatggccccttcaccaattgctgaatcatcagaaacagaggatgagcttctgattgactatgattcagagttgaacactgatgatatcgtcagctatgacgacggacgtgactactccaccgacgacacctatccctactag

SEQ ID NO: 120833 - DNA, 2003 bp, Zea Mays
aaaacagaattccacgacgtctcacctgcacacgcgctcgtcgtcgtctcatcggcgcttgctgcgacaactcacgccggtggcttgagcgcgccatcgaccagggttgttacaccaagcgatggcggcggtggccggggatggtggtggtgggcccgaggagggcgtcggcgagagctcgtccccgcctcgcaaccccgtgctcgcgcccgcacccgctgcctctggcgggagcgggagcggtggcggcggccgcggaggtggcctccgggacatctgccgcgaggtgttcgagcgcctcgtcaacgatggccacagggcgggctccgagctccttgcccagctcgaggcccacttcaatcgactccccatcagctacaagctggatgtgaatattgacaaagcagaagatgtgttaatccatcagaaagttttggcagaagcacaggatcctgataggcgcccagcattcactgtccgtttcctcaggcttgaagaggtaaatgtggacgagacaactaactctgatgcacatgaagaaggggctgatattggtgaagctctttctaccaggtcaaagacatcatatgcacacattcatgagatactattctccaccaaggataaacccaagctcctgagtcagttgtctgctttgctttctgacattggactgaacatcaaggaggcacatgtgttctcaacaacagatggttattctcttgatgtttttgttgttgacggttggcccgttgaggaaactgatggtttgcataaggcactagaagtatcaattttgagaaatgagggttcctggtctggctctgaatcctcagcttccaaaagatcactgccattcctagcacaggattttgaatcagatattgacacaagacttctgaagcttgtaaataagattgcttctggatcttgtggggacatgtttcttgggacctacagtggtgaggaggttgctgttaaagttcttaatcctcagaatttgaacaaaaatgtatggagtgaatttaagcaagaaatcaacatgttaagggaagttgatcatccgaatattgtccgattcattggttcatgcacaaagccacctcagttttacataattacagagtgcatgtctagaggaagtctgtttgatttcttgcacaatgagcataatgtgttggacctcccaacgcttctgaagtttgcactagatgtatgccaagggatgtcctacttgcatcagaaaggcattatccacagagatttaaagtctggcaaccttttattggataaaaatgatgttgttaaagtagccgattttggtctagctcgttttcaggatggagggggtgatatgactgctgaaactgggacctatagatggatggcacctgaggttataaatcatcagccctatgacagcaaagcagatgtatacagttttgctcttgtactttgggagctcatgacatccaagattccatataataccatgacccccctccaagcagctgttggtgtgaggcagggattgcgaccacaaattccagaaaatacgcatccgaggctcataaacttgatgcagagatgttgggaagctactccgactgatcgcccttcatttgaggagatcattcctgaactagaggatatccaggcacaagcacagagaacatcaggggaaacgagccagacagaggaggaccactcatgcagtaaagattgattgaccccctctgtacatacatgttgacaattctctcatctgatcactaaaatgctgagaaagtagcatatcatcagttttgatgccatagaaaaaaagtagcgaatcattttgtcaagttttgtcagaaccttttggggccgacggccaaagctcttggtattatccttgcttcactcttaggtcccatttttcttgatatgatgatatctttgagttgcggcttgatatatgtgaatatttgaatgagaaatttactgctgcttgtcacgcaaaa

SEQ ID NO: 120834 - DNA, 1003 bp, Zea Mays
acccaccaagtctctcctgtcctgtccaagtaataaagcaccgaaaccggccgccgacgaccaagacctgcaaccgatggaaggcattcagcagctgccagcggacgtcctcgtgtcggtgatctcccgcgccgccgcggggccgagggatgcctgcatcgccgccacggtgtcgccggcgttccgcgccgcggccgactccgacaccgtgtggtcacgcttcctcccggctgacctcgccccgctcgtctacccgacgcctccgccaagatccaagaaggagctcttccttcgcctctctgaaacccatgccctcgttgaagatggcctcatgagcgcgtggctggacagggagaccggcgccaagtcctatatgattgcggccagggctatggctattatctgggtcgacacgccggactactggcgctggatagtgcgcgaagactcaaggttctcgacatgcgctgaactgttagcggtttgttggctggacatctccggttgcatgccatgcaggatgctgtcaggtgacacgcgctatgcagcctacctggtattcaagatggccgatgactgctttggcctggattctcctcttcaggaggcatcggtcagcgtcggagaggggggcacatcaacggcccactggatcagactacagagctaccacgtcggcgacgaagagaacggcgtaaccgaggaaggagctccacctaggctcccacatgagaggcctgatggctggatggaggtggagctaggagactggtacaaccatggaggcgacgacgacctagtggttcgtgccagtgtgaaggaggccaggtttggaggcaactggaagaaagggcttattgttcagggccttgagattagacctaagaactgattgagggctggttgatcataaaattatatgtatatgtctcagtttggagtgcattcatgttggagctattatgtaataatacgcctgcaggctgcagccgttcctgatgca

SEQ ID NO: 120835 - DNA, 1090 bp, Zea Mays
cccaccaagtctctcctgtcctgtccaagtaataaagcaccgaaaccggccgccgacgaccaagacctgcaaccgatggaaggcattcagcagctgccagcggacgtcctcgtgtcggtgatctcccgcgccgccgcggggccgagggatgcctgcatcgccgccacggtgtcgccggcgttccgcgccgcggccgactccgacaccgtgtggtcacgcttcctcccggctgacctcgccccgctcgtctacccgacgcctccgccaagatccaagaaggagctcttccttcgcctctctgaaacccatgccctcgttgaagatggcctcatggtaggttgtgctgactcatatatcagaaacaaacaaacataaaagaggagaaagagagagaggctgagcaagtgagtctgattcgcagagcgcgtggctggacagggagaccggcgccaagtcctatatgattgcggccagggctatggctattatctgggtcgacacgccggactactggcgctggatagtgcgcgaagactcaaggttctcgacatgcgctgaactgttagcggtttgttggctggacatctccggttgcatgccatgcaggatgctgtcaggtgacacgcgctatgcagcctacctggtattcaagatggccgatgactgctttggcctggattctcctcttcaggaggcatcggtcagcgtcggagaggggggcacatcaacggcccactggatcagactacagagctaccacgtcggcgacgaagagaacggcgtaaccgaggaaggagctccacctaggctcccacatgagaggcctgatggctggatggaggtggagctaggagactggtacaaccatggaggcgacgacgacctagtggttcgtgccagtgtgaaggaggccaggtttggaggcaactggaagaaagggcttattgttcagggccttgagattagacctaagaactgattgagggctggttgatcataaaattatatgtatatgtctcagtttggagtgcattcatgttggagctattatgtaataatacgcctgcaggctgcagccgttcctgatgca

SEQ ID NO: 120836 - DNA, 575 bp, Zea Mays
tttctgagctgatttgattgcgtgtcacattttcactgcatgaacttcagttaaacatctcgactttacacaacccagcaagtgggtcatcatctcagggcacctggatggatggatgcattggcgatatatgtcttccataccttatatatatagtatcatgtaaatatataagagttattggtcactcctaacagctacctagtttccaaaatcatctcagcagacaccagcaacttaaggacggtcagctagcttctactacttatgtacagcaggctttcgtatattgctaccgatctccatccgcgggtttctcctccagcagcttggtgctgcaggaatgccctttgtcgcggttcagtattgattctctaatctccttgtacttgttcagctcctccagcgtgtccgccgctgtccttgacctcagaagagaagaaggcacccctgcagagcttgatgcgccgctgccatgttcctcggtcattaccctctggagtgaagaaggttcttgaggaaccggggcgctagggcctgtcagtagcctttccctgaggcctggagcgttcttt

SEQ ID NO: 120837 - DNA, 1816 bp, Zea Mays
ggatttggttaggatgggtggacgtttgaagtgatgagtttttcaagcgtatagattttctatttgtcctttttaattaactttctcccagccgggatgcgcgtataaaaaccggcgaaacccttggctctcctcattcggcctatcacaaccacttactctcgtgcgctctccgtgggagcgaggactcgcggccggcggcagcggcaggttctcctagatctccggcatcatcagtaacaaatggctgacggtgaggacattcagccccttgtttgtgacaatggaactggcatggtcaaggctggttttgctggtgacgatgcgccaagggctgttttcccaagcattgtcggacgcccccgtcacactggtgtgatggttggcatggggcagaaggatgcgtatgttggtgacgaggcccagtccaagaggggtatcctgactttgaagtaccccatcgaacatggtattgttagcaattgggatgacatggagaagatctggcaccacaccttctataatgaactccgtgtggcgcctgaagagcaccctgtgctgctgacggaagccccactcaaccccaaagctaacagggagaagatgacccaaatcatgtttgagaccttcaatgttcctgccatgtatgtcgccatccaggctgtgctttccctgtacgccagtgggcgtacaactggtattgtgttggactctggtgatggtgtcagccacaccgtgccaatctacgaaggttatgcccttcctcatgccatcctgcgtcttgaccttgctgggcgtgacctgactgacagcctgatgaagatcctcaccgagagaggttactccttcaccaccacggccgaacgggaaatcgtacgggacatcaaggaaaagcttgcatacgtggctcttgactatgatcaggagctggagaacgccaagagcagctcatctgtggagaagagctacgagctgcctgatggccaggtgatcaccattggggcggagaggttccgatgccccgaggtcctcttccagccttccttcattggtatggaagctcctggcatccatgagaccacctacaactccatcatgaaatgcgacgtggatatcaggaaggacttgtatggtaacattgttctcagtggtggcacaaccatgttccctggcatcgctgaccgtatgagcaaggagatcaccgcccttgccccgagcagcatgaaaatcaaggtggtggctccacccgagaggaaatacagtgtctggataggagggtccatccttgcctccctgagcaccttccaacagatgtggatctcaaaggctgagtacgatgagtcaggaccagcgattgttcaccggaagtgcttctaagctcaagggcccccttcgtccccattctatgtattcctttccttgagtgcttttcttataagctactatgtttgagattgccggcctttgagcaggcaatgttgttggatctgtatcttgtggatcactacaatgcatgcgttgctccatcttcttttcatgccaagtttgctgtcatacttgctagtggggaaaacaacaatgacaacagtggtgagaacagcaaccacaaaaaaagagaggatggaaattattgaagttcctaggatcgtattgtaactgtacttgtgcgagtaacattattggttctctttgtatatccatctctgagacatgcaattctttttgattggtttgctacttctgtgaatgatttctgggcactagtggagcttttgaatggcaacttcccagggactacctttgtgagtccccactg

SEQ ID NO: 120838 - DNA, 1680 bp, Zea Mays
tcattcggcctatcacaaccacttactctcgtgcgctctccgtgggagcgaggactcgcggccggcggcagcggcaggttctcctagatctccgggtaagcggtgaaagaagaggaggtgttggaggaattagttccgaatctttctccattacgattttcgtggcgtcgagcatcatcagtaacaaatggctgacggtgaggacattcagccccttgtttgtgacaatggaactggcatggtcaaggctggttttgctggtgacgatgcgccaagggctgttttcccaagcattgtcggacgcccccgtcacactggtgtgatggttggcatggggcagaaggatgcgtatgttggtgacgaggcccagtccaagaggggtatcctgactttgaagtaccccatcgaacatggtattgttagcaattgggatgacatggagaagatctggcaccacaccttctataatgaactccgtgtggcgcctgaagagcaccctgtgctgctgacggaagccccactcaaccccaaagctaacagggagaagatgacccaaatcatgtttgagaccttcaatgttcctgccatgtatgtcgccatccaggctgtgctttccctgtacgccagtgggcgtacaactggtattgtgttggactctggtgatggtgtcagccacaccgtgccaatctacgaaggttatgcccttcctcatgccatcctgcgtcttgaccttgctgggcgtgacctgactgacagcctgatgaagatcctcaccgagagaggttactccttcaccaccacggccgaacgggaaatcgtacgggacatcaaggaaaagcttgcatacgtggctcttgactatgatcaggagctggagaacgccaagagcagctcatctgtggagaagagctacgagctgcctgatggccaggtgatcaccattggggcggagaggttccgatgccccgaggtcctcttccagccttccttcattggtatggaagctcctggcatccatgagaccacctacaactccatcatgaaatgcgacgtggatatcaggaaggacttgtatggtaacattgttctcagtggtggcacaaccatgttccctggcatcgctgaccgtatgagcaaggagatcaccgcccttgccccgagcagcatgaaaatcaaggtggtggctccacccgagaggaaatacagtgtctggataggagggtccatccttgcctccctgagcaccttccaacagatgtggatctcaaaggctgagtacgatgagtcaggaccagcgattgttcaccggaagtgcttctaagctcaagggcccccttcgtccccattctatgtattcctttccttgagtgcttttcttataagctactatgtttgagattgccggcctttgagcaggcaatgttgttggatctgtatcttgtggatcactacaatgcatgcgttgctccatcttcttttcatgccaagtttgctgtcatacttgctagtggggaaaacaacaatgacaacagtggtgagaacagcaaccacaaaaaaagagaggatggaaattattgaagttcctaggatcgtattgtaactgtacttgtgcgagtaacattattggttctctttgtatatccatctctgagacatgcaattctttttgattggtttgct

SEQ ID NO: 120839 - DNA, 1393 bp, Zea Mays
attcggcctatcacaaccacttactctcgtgcgctctccgtgggagcgaggactcgcggccggcggcagcggcaggttctcctagatctccggtaacaaatggctgacggtgaggacattcagccccttgtttgtgacaatggaactggcatggtcaaggctggttttgctggtgacgatgcgccaagggctgttttcccaagcattgtcggacgcccccgtcacactggtgtgatggttggcatggggcagaaggatgcgtatgttggtgacgaggcccagtccaagaggggtatcctgactttgaagtaccccatcgaacatggtattgttagcaattgggatgacatggagaagatctggcaccacaccttctataatgaactccgtgtggcgcctgaagagcaccctgtgctgctgacggaagccccactcaaccccaaagctaacagggagaagatgacccaaatcatgtttgagaccttcaatgttcctgccatgtatgtcgccatccaggctgtgctttccctgtacgccagtgggcgtacaactggtattgtgttggactctggtgatggtgtcagccacaccgtgccaatctacgaaggttatgcccttcctcatgccatcctgcgtcttgaccttgctgggcgtgacctgactgacagcctgatgaagatcctcaccgagagaggttactccttcaccaccacggccgaacgggaaatcgtacgggacatcaaggaaaagcttgcatacgtggctcttgactatgatcaggagctggagaacgccaagagcagctcatctgtggagaagagctacgagctgcctgatggccaggtgatcaccattggggcggagaggttccgatgccccgaggtcctcttccagccttccttcattggtatggaagctcctggcatccatgagaccacctacaactccatcatgaaatgcgacgtggatatcaggaaggacttgtatggtaacattgttctcagtggtggcacaaccatgttccctggcatcgctgaccgtatgagcaaggagatcaccgcccttgccccgagcagcatgaaaatcaaggtggtggctccacccgagaggaaatacagtgtctggataggagggtccatccttgcctccctgagcaccttccaacagatgtggatctcaaaggctgagtacgatgagtcaggaccagcgattgttcaccggaagtgcttctaagctcaagggcccccttcgtccccattctatgtattcctttccttgagtgcttttcttataagctactatgtttgagattgccggcctttgagcaggcaatgttgttggatctgtatcttgtggatcactacaatgcatgcgttgctccatcttcttttca

SEQ ID NO: 120840 - DNA, 107 bp, Zea Mays
catgttcctgtacgtacgtgagatggaggaagaagacccccctctctatgacaagtgggcccctagtggtatgctattttctgctgaaattacaaattctgtgttgg

SEQ ID NO: 120841 - DNA, 1739 bp, Zea Mays
gttcgtgctccagcttttccgtctagtttaatggtttttcctagtcgtcctccgtcctcctcagctctggctgccaaccccaagaagagaacagccttgcctagtcactaggccctagtgtgcccattgcctagggaaggaggaacccaaggagaggtgcgcggctggtggcatgcgagtggcagcggtgccgcgggactcttctcctcgctggccgtgcgcgccgtgccccgacggaatccaggtgacaccctgatattgatgtgaagttttgtggaacctcctgcatccttatatggtattaacaataatttaattgtctgggtgatccatttgagcaaatggaaggcaacgacctaccccctggaaacatgttgcaaggggctccctatgatagtttagacttacatggcgactctatggcaaaacatgccccaaactcaggaaaacagatcttcagcagctcccagatgccggggactttcacaatgtctatgaccagggctacagaacctgatgactttcctgggtttcagttcaaagaacatggaaagagtgatgaccaccaccaccaccaataccatagtcatcaccaaaagaactgcatgagtgatggtgaagaacatgatatggctgaagatgctactgataccccaagtggaaaaggcaagaagggctctgcatggcatcggatgaagtggacagattcaatggtaaaacttttgattacagcagtgtcttacactggagatgatcatggtgctgattctggtggtggcaggaggaacattgcaataacgcagaagaagggcaaatggaaggcgatatcgaaggttatgggagagagaggttgccatgtgtcaccgcaacagtgcgaggacaagttcaatgaccttaacaagagatacaaaaggctgatagacatccttggcatgggcactgcttgcaatgttgtggctaatccagcacttcttgatagcatgaatcatctttctgataagatgaaagacaatgcaaaaaagatacttagctcaaagcacttattttatgaggagatgtgttcctaccacaacaacaaccgtgcaaatttgcctgaagatcatgcacttcagcattcactactgcttgcccttagatgtaaagaggagcatgatcttcggagagcaagtggagatgctgatgaagacgatcgaagtgcggattctgattatggggagaatgatgaagagcaatatcctgtgcatacacgcatgagggagccctcaaccaccaaaaggaagcgccacagagatgtggctttggtcacatcaaactctcatgaaggcagtgagaggtctgatccccatgatgtaacagtggacatcaacaaggctttcacagatgcaaccaacatggttttgttgcaacaggacttggcttcacaagccatagagattcagaaacgtcgcttgcagattgaagcaaaggaactggaactcacaaagcaacgtcacaagtgggagcggttcaggaagaagaaggacagggagatagaaagaatggcactggagaatgaacatatggtgattgagaacaaacgcttggaacttgagctgagacataaggagttagagctagagcttaagctgaaaggcaaggggaaccatccataacttaattcttgatcaacactacaatatttaagatggtaaacaagtaagtgggcttttgaactatctttactaaggaaaggctttcta

SEQ ID NO: 120842 - DNA, 1638 bp, Zea Mays
atggaaggcaacgacctaccccctggaaacatgttgcaaggggctccctatgatagtttagacttacatggcgactctatggcaaaacatgccccaaactcaggaaaacagatcttcagcagctcccagatgccggggactttcacaatgtctatgaccagggctacagaacctgatgactttcctgggtttcagttcaaagaacatggaaagagtgatgaccaccaccaccaccaataccatagtcatcaccaaaagaactgcatgagtgatggtgaagaacatgatatggctgaagatgctactgataccccaagtggaaaaggcaagaagggctctgcatggcatcggatgaagtggacagattcaatggtaaaacttttgattacagcagtgtcttacactggagatgatcatggtgctgattctggtggtggcaggaggaacattgcaataacgcagaagaagggcaaatggaaggcgatatcgaaggttatgggagagagaggttgccatgtgtcaccgcaacagtgcgaggacaagttcaatgaccttaacaagagatacaaaaggctgatagacatccttggcatgggcactgcttgcaatgttgtggctaatccagcacttcttgatagcatgaatcatctttctgataagatgaaagacaatgcaaaaaagatacttagctcaaagcacttattttatgaggagatgtgttcctaccacaacaacaaccgtgcaaatttgcctgaagatcatgcacttcagcattcactactgcttgcccttagatgtaaagaggagcatgatcttcggagagcaagtggagatgctgatgaagacgatcgaagtgcggattctgattatggggagaatgatgaagagcaatatcctgtgcatacacgcatgagggagccctcaaccaccaaaaggaagcgccacagagatgtggctttggtcacatcaaactctcatgaaggcagtgagaggtctgatccccatgatgtaacagtggacatcaacaaggctttcacagatgcaaccaacatggttttgttgcaacaggacttggcttcacaagccatagagattcagaaacgtcgcttgcagattgaagcaaaggaactggaactcacaaagcaacgtcacaagtgggagcggttcaggaagaagaaggacagggagatagaaagaatggcactggagaatgaacatatggtgattgagaacaaacgcttggaacttgagctgagacataaggagttagagctagagcttaagctgaaaggcaaggggaaccatccataacttaattcttgatcaacactacaatatttaagatggtaaacaagtcacggttgagcttctggaagataaaggtggtagattagagcagaacctgacaaccatttctgtgcgtatgacttttgttctgtgtttttctgccctgtgtcatgtactggttgggcctcctgcatgtttaccctttctgcggcagtagtattgggcttgatgtgatctgtaagactgttacttccatcttgcccagtgtttcaatttttttcgtcagcatgtatatcgaggtgatgcgatgatgtgaaggtagtggaaggtctgctgatccacattggcttc

SEQ ID NO: 120843 - DNA, 1206 bp, Zea Mays
cgcatccgctacgcgcacacgagctgtgcggtactgctcgctcatgcagccactgccacgctaccaccgcttcctttcctcttcggctgctccgcctcgcctcccagttcacagcccctcccaggctccgaatcggcggccacttctcattcctcacttccgtcctcgcgcaccaccccctccatccgttccggatggtgccttcgaaatcccgtccggcgccctagcgtagctcgggctcggccaggctccgggcccgccgcgccgttccgcagtccagctccacctccaggtgcgtgccacgcagatccgtgccgcctccgccgattgtagagggtttgcgttgttgcgcgttttcagtttggtttacgcggaaaagagaggtttctttagtgcttttctccagccgattcagccggtttggtggatgctgatggatactagctcgttttaggtaaatttggcgcgatttgtgtgaaaagtaggcgcttttgactgttcacttcgttattatgtttcgtacagatgcggttgctagagaaagattttctactcattttggggcagccttcattcatcgaatgtagtggttagtgaaacgcaatactagatagatgttgttgtacccctgcccggcgtaaataattgtgcctgtgggctgtggtcattttcgtgtgcctcctaagttaaatctgaactgtttctctttaggcaatctctagtagcactgttggtctgatatgaactttatttacatgtgatgcatatgcttctgctattattgtactgtcttgtccttttttttctgtagtggttactagtggaagtttagcacactgattccgtcatagtgggatccttgccaaatgaagtgtccatccaaccaacccaactaactgtactgaaatctcattgctttcagaatggtacggttagtaaattgaggttggtggtgggttggtggccatactaggggaaggtacgtgtttgttctttatagatggtgacttggtttcaacctgagggttttgcccttgatgataggttgtcatagaattagtgggatatatgatggtttaatcacagtgactaaaatctggattctaaattgctaatagtagaaacagtagctatctagtgccggtagtgtttgggggtgtcttttgggctatgctgatgtggtgggttggagttgatattgtggtt

SEQ ID NO: 120844 - DNA, 2327 bp, Zea Mays
cgcatccgctacgcgcacacgagctgtgcggtactgctcgctcatgcagccactgccacgctaccaccgcttcctttcctcttcggctgctccgcctcgcctcccagttcacagcccctcccaggctccgaatcggcggccacttctcattcctcacttccgtcctcgcgcaccaccccctccatccgttccggatggtgccttcgaaatcccgtccggcgccctagcgtagctcgggctcggccaggctccgggcccgccgcgccgttccgcagtccagctccacctccagtggttactagtggaagtttagcacactgattccgtcatagtgggatccttgccaaatgaagtgtccatccaaccaacccaactaactgtactgaaatctcattgctttcagaatggtacggttagtaaattgaggttggtggtgggttggtggccatactaggggaagatcttttcttgagtttaaggaagatgcttgcctttatttagaaggccctttttggtacgtcagcagtgttctttcctataggagtaaatgccattccgtagcatcgtgcgtgatgtaagggatggtttcgggagcttgtctaggaggggatttgaggtcaggtttctgagtcatcgcagagggaaatctcatggtgctgtccatgagctgcacgacccagtgcttgtggtacagagtagctgctgggctagcttgcctcctgaattacttcgagatgtgattgagaggttggagaccagtgaggatacatggccttctaggaaacatgtagttgcttgtgcagctgtctgcagaacatggagagagatgtgtagagagattgtcaagagcccagagttttctggaaaaatcacttttcctgtttccttgaagcagcctgggcctcgagatggaactattcagtgttttattaagagggatacatctacccaaatctacagtctgtaccttagttttagctctgccgtgcctgtcgaaaatggcaaattccttctatccgcaaaaaggaactgccgtgcaacatatacagaatatataatatcaataaattctggtgatacatctaggtgtacaagtaacaacacatacattgggaaattaaggtcaaatttccttggcacaaaatttgtaatatacgatactcatccgccatacaatggaactagtcaaacagtggcagggaaaacaagtcagagattctactccaagaagggatcaaccaaggtttcttgcaggtggtacagtattgcacaaatctcatacgagctgaatgtcttgggaactcgaggcccaaggcggatgaactgtgtaatgcactccatcccagcttcatgccttgaggctggtggcagtgtcccttgccagccggacagcattgcagcccactctgttggcggatcattcagcagtgtgtccttgtcaaagtcatcgactatggaccactctatgcatttcaccagttcccggctctctgatgccataacaggagatggcattgtgaacagaggccaggcattgaatgatgctgacgatgaagagtgcaaggacatgcctttgatcctccgcaacaaggccccaaggtggcacgagcagcttcagtgctggtgcctcaacttccggggccgggtgactgtcgcctcggtcaagaacttccagctagtcgcggcgacacagcctgccgccggagccctgaccccatcacaggcagccccgcagccagctccgcctcctccgccggaccaagagaaggtcatactgcagtttgggaaggtcggcaaggacatcttcaccatggactactgctacccgctgtcagccttccaggccttcgccatctgcctgagcagcttcgacaccaagttggcctgcgaataaatcctacctacaattctggtacctaccaaataatcaaaaacactgattgtcgtggtgttcgtccaagaaccgagtttagctgagacgccattgggcaccatgtgctggtgccttgttaactcagaaacgcgtgggggctgaatctgtttcagcagcttccttgtgataatctgtagctgctgcttcgctgctgttgtatcctatgctttcatttctttccggttccgctgtagcttcttaccccccggtgacattagttcggtacccgtatctggatatttttttagccttcttcgttggattgttcaccggtgatggcatgtattaacagagatagttacatacagatgtaatgaattcaggtctggataattttgctttcggttgctattggaaaaggatgtgatggctgctgtcatcttcagcagggcta

SEQ ID NO: 120845 - DNA, 2248 bp, Zea Mays
cgcatccgctacgcgcacacgagctgtgcggtactgctcgctcatgcagccactgccacgctaccaccgcttcctttcctcttcggctgctccgcctcgcctcccagttcacagcccctcccaggctccgaatcggcggccacttctcattcctcacttccgtcctcgcgcaccaccccctccatccgttccggatggtgccttcgaaatcccgtccggcgccctagcgtagctcgggctcggccaggctccgggcccgccgcgccgttccgcagtccagctccacctccagcctgggcctcgagatggaactattcagtgttttattaagagggatacatctacccaaatctacagtctgtaccttagttttagctctgccgtgcctgtcgaaaatggcaaattccttctatccgcaaaaaggaactgccgtgcaacatatacagaatatataatatcaataaattctggtgatacatctaggtgtacaagtaacaacacatacattgggaaattaaggtcaaatttccttggcacaaaatttgtaatatacgatactcatccgccatacaatggaactagtcaaacagtggcagggaaaacaagtcagagattctactccaagaagggatcaaccaaggtttcttgcaggtggtacagtattgcacaaatctcatacgagctgaatgtcttgggaactcgaggcccaaggcggatgaactgtgtaatgcactccatcccagcttcatgccttgaggctggtggcagtgtcccttgccagccggacagcattgcagcccactctgttggcggatcattcagcagtgtgtccttgtcaaagtcatcgactatggaccactctatgcatttcaccagttcccggctctctgatgccataacaggagatggcattgtgaacagaggccaggcattgaatgatgctgacgatgaagagtgcaaggacatgcctttgatcctccgcaacaaggccccaaggtggcacgagcagcttcagtgctggtgcctcaacttccggggccgggtgactgtcgcctcggtcaagaacttccagctagtcgcggcgacacagcctgccgccggagccctgaccccatcacaggcagccccgcagccagctccgcctcctccgccggaccaagagaaggtcatactgcagtttgggaaggtcggcaaggacatcttcaccatggactactgctacccgctgtcagccttccaggccttcgccatctgcctgagcagcttcgacaccaagttggcctgcgaataaatcctacctacaattctggtacctaccaaataatcaaaaacactgattgtcgtggtgttcgtccaagaaccgagtttagctgagacgccattgggcaccatgtgctggtgccttgttaactcagaaacgcgtgggggctgaatctgtttcagcagcttccttgtgataatctgtagctgctgcttcgctgctgttgtatcctatgctttcatttctttccggttccgctgtagcttcttaccccccggtgacattagttcggtacccgtatctggatatttttttagccttcttcgttggattgttcaccggtgatggcatgtattaacagagatagttacatacagatgtaatgaattcaggtctggataattttgctttcggttgctattggaaaaggatgtgatggctgctgtcatctttggactgctgatgtttcttttgctgtcaccttcagcagggtcatcagggaggtgactgatgaggtgtttatttgtttgttttgcttcaaagcgaggcctttagcacggacttttcgcgacgagtaaataaagctacacagataattgcaggcggagagagtaaccaaaatcttggggcgcaggtcgggagaaagatccgaaaggccaatgcaaatgcgatacagacgcacgctagttgctaatgctagctaccctcctcggtgctccccttgctcctgtggcgtgcgggaaaaaggcaacttaacaccagcatcgtccgaggcagcagcaacggacgactccacaagatcaaggtatctcaccgatagccaacagctgctgacatttttaatggaaccaacctctccacacctccagcatgggacaccaaatacttcactcggagatttatcaactgcgatgaagcaaacatctacaggtcttccaggctgcaagaattcgaaacaacacagcgcatgtactagctaatcaagct

SEQ ID NO: 120846 - DNA, 2555 bp, Zea Mays
agccactgccacgctaccaccgcttcctttcctcttcggctgctccgcctcgcctcccagttcacagcccctcccaggctccgaatcggcggccacttctcattcctcacttccgtcctcgcgcaccaccccctccatccgttccggatggtgccttcgaaatcccgtccggcgccctagcgtagctcgggctcggccaggctccgggcccgccgcgccgttccgcagtccagctccacctccaggagtaaatgccattccgtagcatcgtgcgtgatgtaagggatggtttcgggagcttgtctaggaggggatttgaggtcaggtttctgagtcatcgcagagggaaatctcatggtgctgtccatgagctgcacgacccagtgcttgtggtacagagtagctgctgggctagcttgcctcctgaattacttcgagatgtgattgagaggttggagaccagtgaggatacatggccttctaggaaacatgtagttgcttgtgcagctgtctgcagaacatggagagagatgtgtagagagattgtcaagagcccagagttttctggaaaaatcacttttcctgtttccttgaagcagcctgggcctcgagatggaactattcagtgttttattaagagggatacatctacccaaatctacagtctgtaccttagttttagctctgccgtgcctgtcgaaaatggcaaattccttctatccgcaaaaaggaactgccgtgcaacatatacagaatatataatatcaataaattctggtgatacatctaggtgtacaagtaacaacacatacattgggaaattaaggtcaaatttccttggcacaaaatttgtaatatacgatactcatccgccatacaatggaactagtcaaacagtggcagggaaaacaagtcagagattctactccaagaagggatcaaccaaggtttcttgcaggtggtacagtattgcacaaatctcatacgagctgaatgtcttgggaactcgaggcccaaggcggatgaactgtgtaatgcactccatcccagcttcatgccttgaggctggtggcagtgtcccttgccagccggacagcattgcagcccactctgttggcggatcattcagcagtgtgtccttgtcaaagtcatcgactatggaccactctatgcatttcaccagttcccggctctctgatgccataacaggagatggcattgtgaacagaggccaggcattgaatgatgctgacgatgaagagtgcaaggacatgcctttgatcctccgcaacaaggccccaaggtggcacgagcagcttcagtgctggtgcctcaacttccggggccgggtgactgtcgcctcggtcaagaacttccagctagtcgcggcgacacagcctgccgccggagccctgaccccatcacaggcagccccgcagccagctccgcctcctccgccggaccaagagaaggtcatactgcagtttgggaaggtcggcaaggacatcttcaccatggactactgctacccgctgtcagccttccaggccttcgccatctgcctgagcagcttcgacaccaagttggcctgcgaataaatcctacctacaattctggtacctaccaaataatcaaaaacactgattgtcgtggtgttcgtccaagaaccgagtttagctgagacgccattgggcaccatgtgctggtgccttgttaactcagaaacgcgtgggggctgaatctgtttcagcagcttccttgtgataatctgtagctgctgcttcgctgctgttgtatcctatgctttcatttctttccggttccgctgtagcttcttaccccccggtgacattagttcggtacccgtatctggatatttttttagccttcttcgttggattgttcaccggtgatggcatgtattaacagagatagttacatacagatgtaatgaattcaggtctggataattttgctttcggttgctattggaaaaggatgtgatggctgctgtcatctttggactgctgatgtttcttttgctgtcaccttcagcagggtcatcagggaggtgactgatgaggtgtttatttgtttgttttgcttcaaagcgaggcctttagcacggacttttcgcgacgagtaaataaagctacacagataattgcaggcggagagagtaaccaaaatcttggggcgcaggtcgggagaaagatccgaaaggccaatgcaaatgcgatacagacgcacgctagttgctaatgctagctaccctcctcggtgctccccttgctcctgtggcgtgcgggaaaaaggcaacttaacaccagcatcgtccgaggcagcagcaacggacgactccacaagatcaaggtatctcaccgatagccaacagctgctgacatttttaatggaaccaacctctccacacctccagcatgggacaccaaatacttcactcggagatttatcaactgcgatgaagcaaacatctacaggtcttccaggctgcaagaattcgaaacaacacagcgcatgtactagctaatcaagct

SEQ ID NO: 120847 - DNA, 2286 bp, Zea Mays
cgtacccaccacgccaccctccccatcaccattcactcatccaccaccaccaacggcgccgcaacccccacgcaatctcaccggaaaaacgcctcctccagttgagctgagcctgagctgcagctgagccgccatgtgcccgcggacccactgagccaaaacccctcgaccccgcccccactgcaggccgttccctttccaagatccgcgctttgatccgtccgccgccgcccgagaccatgccggccacggacctccagggctcctccccgttctcctccttcggccgcaccctcctctccctccgccgcgacgccccggcgtccgcgtccgcggcggctgcgatgccgccgcccggcgtcgacccggagctcgaggagttccacgcccacgtcgccgcgcacctcgcggacctgagcggccccggcgctgctggggaggaggagttcatttccatcgcgtggatccggcgcctgctggaggcgttcctgctctgccaggaggagttccgggtggcggtggccgaggcgcgccgccgccgcgccggggccactccccccgccggcgagaggctggtggccgagttcggcgaccgcgccgtcaaggccctcgacgtctgcaacgcggcgcgcgacggcgtcgaccaggcgcgccgctgggagcgcctcgcgggcatcgcggcgtccgcgctgctggcgcccgccgacggccagatccacgagggccagctccgtcgcgcgcggaaggcgctctcggacctctccgtgctcctcatcgacgacgccgcagccgccgccgccacggggcccgccggcgggctcgcctcgatcctcgcgtcccaccgcaaccgctccttcggccgcgcgcgggcgtcgccgtcccgcgcctcctcctcctcgtcgtcgtcctcgtcgccctccgcgcacttccgctcgctctcgtggagcgtgtcccgcacctggtccgcggcgcgccagctacaggccatcggggccggcctggccgcgccgcgcgccagcgaggcctcctggagcctcgccgcgccggcgtacgccatgggctgcctgctccacctcgccgcctgggcgctcgtcgccgccgtcccctgcccggaccgtgccgccgcgctccaggcgcaccacctgccggccgcgccgccgcgcgccgcgttcccctgggcgccgccgctcctcgcgctccaggaacgcctcgccgaggaggggaagcgcaaggaccgccgcaattcgtgcggcctgctcagggaaatccacgcgctggagaagtgcgcgcagaggctcgcggaggccatcgatgccgcgccggtcccactcaccggcgagcgggaggccgaggtgcgggaggctgcagcccaactcgccgccgcctgctccgccatgaaggacgggctggacccgctggagagacaggtccgcgaggtcttccaccgcatcgtgcgcagccgaatggagggtctcgattcaccgatgcccaatgccgattgagctcaatcaacatgatcatcatcatcttgcctttagatttcccaatgtggcggtgctaggtagctatcttttttcgctcgctcttgtgatcagctagtggtaagtataaaatgtgtgtccttgtgtaaaggattacagaaaaagggagagggaaggtgtcatctttaggtaaagatggttcctttattcccatgttttgatgctgcatttggtgtatatcgttgtgtttttttgctagtgtcacgtctgttcgctgctaattctcgagcaacttgtgtcactttgggaatgtgactatcattgacaatgctaacaagcaggaaaaaaaatgtaaatatgtactgtagtttaactttgcacactcccttggtttttcattccatcaatatcattgtgcaaagaaatgggacaacaattgtcgcaaaaatgcgggcggatcgaattgtgacacaataacaccaacaaagccttggtggtcagagtattctaaatggtctcaattgggcaatatgtggcatattttggactgctcatctgcattatgaattgaattgattgacctttgtggtaaatcgattcatgagttgcaaagtgaatagatgaagaacgggagcaactggatgtaactattattatgaaataaactgattacaagcatatttcagaatagatgctgcaaccttctctgtggaggaaaaggaaaaccaagttgcaggatatttttgaaggcattgaaaaccaagttgtacttaacgaaactgcagtattttgtgtgtttatgctt

SEQ ID NO: 120848 - DNA, 2208 bp, Zea Mays
atggagacggcgcatgaggtggccatttacatcgaccgcttccacaacctggacctgttccagcaaggatggtaccgcgtgaagattagtgccctgtgggaggatgacgagaatcgagcacccatctcgccggccagggtcacgcaatacgaagctattgatattggtgtgaagagctcatttggcttttggaaaatagacgatgttgacaatagcttctacacacagccgtttcttgttaaatattctaggcaagatatttatctatcagttatggtgtccttctacatacccaacagcgaagacgagggtccagcaacttcttctgttatattgaagttcgagctcatatatatcccaacactggggaatgcatggactgacgttcaagattcaagtgatgatacagatttgatccctgtccatgaatttaggatcccacatagagcactcctaggcttacactcgtattgccctgtccattttgacgcattacactcggcgctagtggatctgacaatacacattgtctacctgaaagctgctgtgactaaatcatcactgaagccgctggaacaaagttttggctcaaagtcatatggtattgtgaaagcatcactaatatctagggaaatacttcttgaagaagtgaagaagatcagtaatgctgttggtagcactcttgaggatttggatcgcactgacttaacccttggtaaatatgagacagttcaaccatcaaagtcagcttcgcccagttacagttatgggcagggtacgcccacaaagtgtagtccccagatgactggcatcttacgtgattttcttgagagttctggggttgtggttggaagcactgatgatatcttgctgtatactctatctgaggaagaattgtttgaactatttcaaattgtcagcagccaactctcatttatatggaatgagttcttgaaattccataggacacataaagacaaggtaatgggttatttgcatgatatgtgggatattaatcggaaagcagaatggtcaatatggattattcattcaaagattgagattccacatcgctatttgagaagcatgaatgacgactctcctcgccatttgattcggatttccagttcaagaaagcctatacaaaattcgatgtcacaggctgaactgcacaggaaaagtatagcacaaatgaagattaacacgccgtctgttcaagatatgcatatttatgctgatccttcatgtatacctgttgtccgcatagagcagcatgtcatggttattccgcaacattgttctagcaaggattttctaacagatgcttcagaaccagctcccttatcacatatatctgcaacatatctagttgaaacttctgctgatccctaaaataaacaggggcatcatctggatttacgtcttgttaagaaccaatggcttttgcttgatcctggggctgagtgcctattgtctcagataaatgaggatagaacgtctggggattttaaagaaatgggtagaaggctcgctaatgaagtagtggcattcctcaaaaggaaggtggacaagtactccagaaatggaggttgcaaagagattaagctcagttttgtcggtcattctattgggaacattatcctcagaagtgccctcacagaacccaaattgcagccatttttgaagaacctgtatacatacatgtccatatcgggacctcacttgggttactggtacagcccaaattctctgttcaactctggcctctggctcatgaaacggctcaagggcatgcagtgcatgcatcagctcactttcagtgatgaccacgacccacagaacacgttcttttacaagctctgcaagctgaagacactggagaacttcaagaacatcatcctggtatcgtcaccgcaggatggttacgtcccataccattcagcaagaatcgacctctgccacgcctcgtcgtcagataactcgaaacgcgggcaggtgttcactgagatgctgaacaattgcttggaccagatccgggcaccaacgtcggaaactcgggtattcatgcgttgtgacgtgatattcgaccagtccgcccaaggacggaacctgaacaccatgatcggcagagctgcgcacatagagttcctggagaacgacatctatgcaaggttcatcatgtggtccttcccagagttgtttcggtga

SEQ ID NO: 120849 - DNA, 1890 bp, Zea Mays
gacttttatccttcggactgtgctaaggcccccgcaaaccgccgccacggcgaggtcgtgccgccgccatgtacgcctcgcgctcccgccactttctcctcagcgttcgaaccgccaaccatggcatcctcctccgcagcccgacctcctacgtgtcccctaccgggtgcggcgtcagcgcgcagcggcactacaaccaccagcagcgggaggacgagtgggaggagtccaaggcggtgaaggtgacggtctggtgggacttccagaggtgccgcctccctcgccgcgccagcccgcgccacctctccccgcgcgtcacggaagcgctgcggtgcgccggcatccgagggcccgtcgagatcaccgccttcggcgacgtcagccacatcccgctcaccgagcaggaggcgctcgctgacaccggcgtcatcttgtcgcacgtcccttccagtggaaaagatggttgtggccgatcattcatgtctgatcttatctcttggattgctcagaaccctcctccatctcatttcttccttctatcgggggataaagacttcacaaacatcctgcatcgtcttaggatgagcaattataacgtattgctttcttgccctgattctggctccaagatgttacgcagtgcagcaacttatttgtggacatgggaggatctagctacaggggtggatctcaaacccaaatatttaaatcatccacctgatggtttatccaattcttggtatggtcaatacagtgaacctggtcgtgactttctcctgaaaccaaagaaccccatggctttaccaaggaaaaccaaggaacctaaggttcccagattcgctgtcgttggaattaagagagtgctgtggttttatcctcaagggatcagtgtttcggaactaagaaaagagcttaaaaggattaatgtgtatattgatgcaagtgcatttggcttcaaagatttctctgcttttctcctctccatgtctgatgttgtgaaatttatagatcctctaccagatgatggaggtcctgctgtggttggggttttcaagagatctgaggattctgctcaaagtcacattcaagaaaaatgccacaaggaaggtgagagtgaggagccatcaccacgtccaaaaaagagaactcttcaagtggaagtcccatcatccccaccagatgagtcatctagagacaacaggaaagcacctgggtctactcaacgaccggagccaccttccatacatgtggaagctgatgttactcggactgtggaagttccatcaccaccgtctgattcaccatgtatggaccaaaggaatgatgtagctgttgatcctgttatgcaaacagaacgaccagtcaacttgatggaagctgataaggcgaatgctgctggtggtccttcctcgtcaggggggcaaggtaatatcagcaagaaaaggggtttcttggaacgcatatcatctttatggaatggccaaaaggattaggtttcatgtcatctcttctaaagcatcaatgaataagtagaatagataatgtagaatagtcgttcagaggtgtagtgactacagcacaggaacaagatgagtgttcatctgaatatatgcttagcaaagcgagaattggtatggaaagatcattgtgtttcttttcttttttgttttttgggtgaggaagaggagtttattattcatgtatgctaatcaaggtttaacatatgctgtaaaaagaggattgtattcatttactactcagtgtacgtaaaaccttgttttcataaggatagatgctaatgcagcgagatgttctcatctgatcagaaattttgctggtgccagaaaaccaatctatatgttgtgtttctttttacatagattttccgta

SEQ ID NO: 120850 - DNA, 431 bp, Zea Mays
gtcggttgcccgtgcattgtgacggcttataacaatacccacgtaaactatccaccaaaaaatttcaagattttttattgattgtcttcgctctccgtataatattattttgatttggctaactgatgttattgtttactccatccaatatgttttggtacaacacggtcaatgaagtgagcgattataagagagttcacaacgactgactgaacgaacagatattttagaataacataattccaccatacagagaccaaataagagaaattttgtgagctcaagtttctaaaataagtcacatgaactcaaacttataaaaaatatagattaaaatatggagtgattgctaaagtcaggcatcaataaaaactggatgcgctctatataaattatgctactttgtatcaattactaacgtttaaaaccaa

SEQ ID NO: 120851 - DNA, 98 bp, Zea Mays
ctgaaatcgatactaaaacatcgattaaggatcttactatcagttccaacgagaagtttcttgctgtgaataggagcagtggcccatgtattgattgg

SEQ ID NO: 120852 - DNA, 529 bp, Zea Mays
cgtctccttcatccctatcatgttcatctccaagccgcacagctgcgggcgacctactgctcgctcaattcgctggcatgccactctggccgcggcgccgcgtgtcctcatcgcagcgccccttctccaggtccgaccggcgcctcccctcgtccctcccatgggccatggcacgctcgcccagccatctcccatggcccagcaacctcgcttccacacagtgcccccctactcgtgcctggactttgctcgcccaggtcttcctccccatcacgcgcagcacccaatcagtcgccgctctgcctcttcatcctgacgtggccacggcgagcatctgccccgccgtccgcggctgctggacgccgcccactgtagctcgccggcgtcgtgcttcctcaccatgactgcgtccctgccgcagtgccggcaagctcgcctctgtgctcaggttctcctccagccgctcccccctccatggacgctactctttcctctccgtgaaactctgtcgtgctcagtgttgtccaag

SEQ ID NO: 120853 - DNA, 705 bp, Zea Mays
aacaaacatcgaaatctgccatttcaaacaactaaaattagctcaatgccactattaatgaaatagacaaatcctaaattgataatacatgatacgatgatataccatagccttcatataacaattttgcattgtagggtgaaaaaatataaaaaggagatcctaagcctattgaaaaatataaaagcagttgagccagctccgggagctcttcgtccgcttcgacctcgacggcgacgggagcctcaccaagctggagctggcggcgctgctctgctccctaggcctcgccccgcggccggggacgagatccacacgctcatcgccgccatggacgccgacggcaacggcaccgtggagttcgacgagctctcctccctggcgccgctgctcctggggccctgccgccccgccgtggccgtcgaccacgcgcagctcgccgaggccttccgcgccttcgaccgcgacggcaacggcttcatctccgccgccgagctcgcgcgctccatggcgctcatgggccaccccatctgctatgtcgagctcaccgacatgatgaaagaggccgacaccgacggagacggcgtcatcagcttccaggagttcaccgccatcatggccaagtccgctgtcgactttctaggcctcgctgctctgtgacttcctctctctctcttcctacacatcggaggcgatctcctcctc

SEQ ID NO: 120854 - DNA, 2050 bp, Zea Mays
cgtccttctcctcggcatggacacggcgttgccgtcaaagagctcctcgatgatggcctccaggtcctcgccactgagcttgacgtatttctccgcctgcctccccgcagtgaagtgctgcgagaaccttcccaggaaggaccggtacgccggcacgatgacggcggcgatggatacgcggagctccgactgcagctgctcgtcgctcaccacccagctcccctgcgtccgctggatctcgtctatggcggcattgaattgcttgaaccggtccttgagcacctgcttctgcacgtggctcttcacggtgatcacgccatcgtcacgcagcaggttgagcacgcggctccacgtctcccgctggtagttcttgtggtactgccgcaggtccgtcgaccgctttcgcgaccacgcctcgcctaccacggcgttaatctccggcgagccacgaatcttctgcagcatgtaccgcccgttgttcataaggaagatgctgctcaacgacgggtccttgtacagccgcgacttggcctccaggttgccgtgcagcagctccatcacctccatcagctgtgccgcaaacgggtccccgccgacttcgtgctccgcgtcgtcgtcggtgcgccggtactcctggaacacctgctccagtgtcttcttgtactcgcacgcgtacttgaggtagttcatcaggtaccggggtcagcgggtgcaccgcgccgccgggcaccggctgcttcccggcgtccgcgcggatggaaccctccaggtcgcagaagatggccgccgccgactcacccaggcgggtgcgcacggaggacagctcgtgcttgaggtcaaccagggcgctggacgcgctgctaccgccgtcttcgtcagctggggaagggccacgctcgccgccgtcatcgtccgggacgaggaacgcgtccacccggggcacggcgtcgcggatggcctcgtacatgtccagcaccttgaagagcttctccgcggcgcgcttcgtcagcaccacggcctccgtgaaggtgagcatgtgcagtatggcgcagtgcgcgaggtccgcgaagatgtcgcgccctaggcacctttgcccgccggcgaagacgcgggcgcacaggtcgcgctcgccggggaggtccacctcgacggtgtgctggaacgcctttatccacgtggcgatctccgactccagcgcctcccagggcatcttcaccacgtcgtcgatgctcgccttctcgtacccgaggctctgcagcgacgcatccagcgcgttccggcgcgctatcaagaacacctgcgtgcactccgtctcgtaccccgcggcgaacatggcctccaccatggcgcggagccggcccacggtctcgggagggaacggcggcgaggcgtcggcgatgagggtcgggacgacgcagcggtcgagctcggcgccgtgcccgaatgacggcggccgcttcaaggacttgcctgtggcgctgcccgtgtcggtggcctggggcgccactttggcgacacgggggtcctcgagtgtcccatggaactcatcctccacgaacgtcatggcacggtgcagcacgcccgtgatgcggtgcaccccgatggtgtacgtggtggcgccgcccggcgcgttgtccgctgtgagcgtggacgcgagcgcggctagccgcctgatcgcggcgaggagcggcggcgcatccccggcctcgttcggcgcccacttgtcgtccgtgccctccgactgcgcaatctcctgctcgacggcgcttgcgaacttgtccagcgtcacctctgagacggcgggcggtgcgtcaccgtccctgggagccgcaaggaacgcgtcgatctccgccgacagggcggcgaggtccggctccgcggcctcctccggcacggcgtcgggcccgccggcattctccttctgcgcctccttgatatgttcggtgagcttaatagggccgagggagaagttgcgggcgagcttctcttcgcgggaggtggccgtcgagaagctgctggacttgagcggcgcgacggggatcctgtccat

SEQ ID NO: 120855 - DNA, 1188 bp, Zea Mays
acgagacgagggacgcacaggccatacatactacattcatgtgctgcgcgcccaaggtggcgaacgcggagggacgagggccctgtcgttgctgcgccggcggtgaggaggacgacgaggacggccagcagccggcagcggcgtggcgaatgctatcggggtacgagcggagccgggaggcgtccatgatggtcgacgcgctggccacggtcgtcgctggcggggcaacgccgccggcaacggccggtgcccgtcagcagcaggtatcgcctgagggccagtggtggagcgactactacgccggagatgtaacgccgccgccctctcttcctgcaccggccgctcacgcagagcacggagcggcacggattcccgcgacggcggcgtcacccagctctagctcgcagcccccctcgccgtcctccaccggctccggcacgccgcggaggcggtaccgcggtgtgcggcagcggccgtggggtaagtgggcggcggagatccgggatcctcacaaggcggcgcgcgtgtggctaggcaccttcgacaccgcggaggccgccgcccgggcgtacgacgtggcggcgctcaggttccgcggcagccgcgctaagctcaacttcccggagtccgccacgctcgcggcgccaccgtcggcggccgcggttcctcctcctccgtcgccgccgccgcagaggcccgaggcgctgctcgagtcgcaggcgctggcgctggcgggtggccaggagtactcagagtacgccaggttcctgcagtgccccgccgatccaccgcgactctacgaccaggcgcctgcggcgaccgtgccctccgcggcgtccggatcggcgtcttcgtcgttcccggtgctcttcagattcggcggaggaggtgagagcagcggcgtggcgagcagtcagtggtggacgcagggcagccgctccgtgagccaagaaggagccggctccccgccggcgagctgggcggactctgcttggtggccggcgcctccgcgggacccgccacggtgacgtccctgactccctgtcaggcttgtctctgcaagccaatcctgcagtctgcaccgagcgagtccggattgccagttcgttggcacgtgtaccgattctttttttttttgtttcctgcaaaaaacaaaaaaaaagctttctttgagaggatgtatcgaaa

SEQ ID NO: 120856 - DNA, 1185 bp, Zea Mays
acgagacgagggacgcacaggccatacatactacattcatgtgctgcgcgcccaaggtggcgaacgcggagggacgagggccctgtcgttgctgcgccggcggtgaggaggacgacgaggacggccagcagccggcagcggcgtggcgaatgctatcggggtacgagcggagccgggaggcgtccatgatggtcgacgcgctggccacggtcgtcgctggcggggcaacgccgccggcaacggccggtgcccgtcagcagcaggtatcgcctgagggccagtggtggagcgactactacgccggagatgtaacgccgccgccctctcttcctgcaccggccgctcacgagcacggagcggcacggattcccgcgacggcggcgtcacccagctctagctcgcagcccccctcgccgtcctccaccggctccggcacgccgcggaggcggtaccgcggtgtgcggcagcggccgtggggtaagtgggcggcggagatccgggatcctcacaaggcggcgcgcgtgtggctaggcaccttcgacaccgcggaggccgccgcccgggcgtacgacgtggcggcgctcaggttccgcggcagccgcgctaagctcaacttcccggagtccgccacgctcgcggcgccaccgtcggcggccgcggttcctcctcctccgtcgccgccgccgcagaggcccgaggcgctgctcgagtcgcaggcgctggcgctggcgggtggccaggagtactcagagtacgccaggttcctgcagtgccccgccgatccaccgcgactctacgaccaggcgcctgcggcgaccgtgccctccgcggcgtccggatcggcgtcttcgtcgttcccggtgctcttcagattcggcggaggaggtgagagcagcggcgtggcgagcagtcagtggtggacgcagggcagccgctccgtgagccaagaaggagccggctccccgccggcgagctgggcggactctgcttggtggccggcgcctccgcgggacccgccacggtgacgtccctgactccctgtcaggcttgtctctgcaagccaatcctgcagtctgcaccgagcgagtccggattgccagttcgttggcacgtgtaccgattctttttttttttgtttcctgcaaaaaacaaaaaaaaagctttctttgagaggatgtatcgaaa

SEQ ID NO: 120857 - DNA, 1984 bp, Zea Mays
acccacacccttccgcccgccgccactaaaccctagcgggacacccgccttgctcgcgccgcctcatcctctcactcctctcggacccccggtggccggtgcagagctgcgcgaccgagaaccgaatctgtgagccatgtcgaccaacaagggcagcgcggccaagggcggcggagggaagaagaaggaggtgaagaaggagacgaagctcgggatggcctataagaaggacgacaacttcggggagtggtactccgaggttgttgttaacagtgaaatgattgagtactatgacatttctggttgttatatattgaggccatgggcgatggaaatctgggagctactgaaagaattctttgatgcagaaattaaaaagctgaagctcaaaccatattatttccctttgtttgttactgagaatgttctacagaaggaaaaggaccacattgagggctttgcacctgaggtagcttgggttactaaatctgggaaatctgacctggaagcaccgattgcaatccgccccacaagtgagactgtcatgtatccatacttctccaaatggataagaagccaccgagacttacccttgaggtgtaatcaatggtgtaatgttgttagatgggagtttagcaatccaactcctttcataaggagccgtgaatttctgtggcaagaggggcatactgcttttgcgactaaagaagaggcagatgaagaggttctccaaatattggaactgtacagaaggatatacgaagaatttttagcagttccagtttccaaagggagaaaaagtgagatggaaaaatttgcaggtggcctttataccaccagcgttgaggccttcattccaaacactggtcgtggcatacaaggcgcaacctcacactgtcttggtcaaaactttgccaagatgtttgatatcacttttgagaatgagaaaggtgttagggaaatggtttggcaaaactcttgggcctacacaacccgctcgattggagtgatggtgatgacacatggtgatgacaaaggcttagtattaccaccaaaggtggcgccaatccaggtaattgtgattccagtgccttataaggatgctgacacaactgccataaagggagcctgcgaatcaactgtttacacactcgatcaatctggaattagagcggatcaggacacccgtgaaaattactctccaggttggaagtattcccactgggaaatgaaaggtgttccattgagaattgagattggtccaaaagatctggcaaacaaacaggtgcgtgttgtccgccgggacaacggtgcaaaggttgacatccctgtgaccaatttggttgaagaggttaaagtgttactggatgagattcaaaaaaatctgttcaaaacagcccaagaaaagagagatgcctgtgttcatgtcgtgaacacttgggatgaattcacaactgctctgaataacaaaaagttgatcttggctccatggtgtgatgaggaggaaattgagaaaaatgtaaaaactcggacaaaaggggaacttggagctgcaaaaacattgtgtactccatttgagcagccagaacttccagaaggtaccctgtgctttgcatctggaaagccagcgaagaagtggtcgttctggggccgcagctactgattgcctgtgctgggattatttccggattcagttctagtgagttatgtagctttgaagtgtcggatacaaatccaaaaatccatttacattgcgttttacatcgacttgcagttctcatgtcatcactgctgacaaaagccatcgatttcctgtggaccatgctattcgagtttgaatgttgcaaggatgagaatacgtacattcttttactggcgtgcagtgttataattagaaaaaaacgcttcatatttgattgcaacacataattctgactggaatttaactggatctctttatctcttattaaagtagaatttgtta

SEQ ID NO: 120858 - DNA, 512 bp, Zea Mays
acgaccgactccctcaattacctgcccgtcccaattgtttccgcaagtcgcccagaccagatttgccagaacgcaacctcggctccgaaaccctagccgcacgcagttgtccacttctactcccctcgcctcgccacacccgccgcgcggcacgatcagacgccatggccgccgagaactactggaggtacgctgatgcgcggcagcagcagcaggcgatggtggccgccgcggcggccgcagcggggatggctcccgcggcgaccgtcgccgcggcccagacggtcgggagtgcggcggcggctatgaaccagcaggctgccgccgccgccatggcgcagcaggccgccgctgcgccgcctctcaagcgtgcgcgccccgacttcggtgatgtgtctggtgggcaagacatgacaggatattatccacgtgaaactgacaggtcaggataccattccctctgggaaaacgacacacttggggcatcttatgaccgttacttgcgcaatggg

SEQ ID NO: 120859 - DNA, 609 bp, Zea Mays
ttagatatatttcgcccatttgttggttttcgtgaagttcgtcttgtcaacaaggagtccagacatcctggtggagatccacatgtgttgtgtttcgttgattttgacaaccctgctcaggctacaattgctctggaagcattacaaggttataagtttgacgaacacgagcgtgattcagcccatttgcgtctgcaattctcacgctttcccggtccaaggtcagctggtgggcctcgcggtaggcgttaagacgtgcggacctcgtggttgccgaacctatcgtttatacgagcgatccaactacggtgggctaacgcttcgatatgcgctgaatttcggggcggtggctttttagggttcgtcagctcatttcgtgaatgcgtgaaagggacaatgcaataagtgatattctgccatatgttattagatgccgtataatgtgttaggcatggaaagttattcgacatactgtatctgctgccttagctattgtggtctactgtaacttcattaccttgcttcacatccgagacaatttgagtttgttatcatgtggattatctgttttgaaaatgaaaactagatgatgttagcctattttagtaa

SEQ ID NO: 120860 - DNA, 1172 bp, Zea Mays
ctgaactctagttctgtgtatctgttacgacacctagcactgtgacacttgaaattgttacagattaagacgcactgacgataccctgcgctcagttgctcgatactcgaggcttgtaggtgattgtatccagtagtttgaagaactggttatctaattatttatgtactgtggatccaccattttggatacgcttcatcaatataaaagagctccaattatgaaagttaggagaaaatggcgatctctaaactattcttgagttgtcgtccagctcccaagactaatggaattgcagtttaatgtctctgatattatattgtaacgtgtcatctcgctccaagcttatacgttggtctgctgttacatgccagttctgtaaggagaaatggcaccgattactggaaattttacaaattggccctactacttgtttagattggacaagctctctcctcgtctctatttaatctcttcctctgtttttctctatttgccccttcgttcactctttctcctcccttttcttgtctcgttatcgtctgctacgccaaaccctagccccaaatcagtagcttgaagctgcccacagcgctccaaattgggatccacagattctgcattcatgaagtgggtggggtaaacggcttggggaattgtgtgtgctatcgtcatttaggcgcaggacgaaagggaagccaccgttgattactcctagactgaattgtaggcaaattgttgaggttcacgcggccatagtcgctatgacaatttctacatggccccagacacagggtaagttgaactgaagagctctgctccaaagaagctttgttaactacgttgtgttctttgttaacctcctgcccattttggcaccgggaggaaagttgcttgtatgctttgcaggatagctaaggaaaaggacattcttgcactgggacgacaacaaaggaagcgcacggagctgggcaattctcagtttagatgctcaagttgggactttggtgggtttaggttatggtcgttaaaatgcctcgtatttgctaggcagaactgttctttggatgttgttggctgtggtgattgagaaggaataaatgtcatgtaatataaagagtactatgtaacgcacaccaccttttgttagaatgtgaactaccttttgctac

SEQ ID NO: 120861 - DNA, 2309 bp, Zea Mays
cccttcctctccagggaaggaggccagaatcccccgtcgacgcgcacgcgccgtcgcgcagagctccgcgtccgcatcggccaccgcccacccgcgccggccgccggcggcgtggatggggaagctcgccgccctgaagcgggaagcggtcggggtggactaggtgctcggcgaattcctagtttagactttagaagcagtaggtggaggtgatgcggggcggagcgatgaaggctctgcggcgatccagcacctcctcgccgccgtcttccccgcattttcattcgtggatccaccgccggtacctcctcgttacctcgtcggcgacgtcctctttgtctgcatcggcgaattcggccgcggagggttcggattcagcgtcagtggtggcagcttcctcgtcgccctcgttggatccttcgtctccgaacatggaccggggtgtaattaaatctccatggtctcgaagaaaaaggaaacgagcgctcacttgtcaacactggatttgtctattttcagcgaacgggaagtttcgtgatgggggaagaaagtttctaaagaaggttcgcagtgggggaattgagccaggcataagggctgaagtttggccatttctgcttggagtctatgatttgaacagctctgaggaggacaggaataccatcaagataaagaaaaggaaagaatatgaaaaattgaggcgacagtgccaccatgttctgcattgcaatagaggaaatggtctgaatgttataaatgagttcctgaatgaggacttctctgatggggctgaaggttcagagtcaccatattccaatggtgctagtaagagggcttgtgtgatgcccagagaattgaaatctttaggcagtaaggcagaagagtcagagagttctaactgggatgttgtggaatccatagatgaagatacaagtgagttaacttctgttgatccatgcatgatagaatcagaatcttctgaatctgagtcttcatatgaagaggaccctgatagaacacctgtctctaccaatatggaagagagctgtgatcccaaacctagatttgtccggactgcttcagcaaagtcagacatttttctttcagacagaactcctgaggattttaccacatggcagcgcattatacgtgtagatgctattcgagcaaatacagaatgggttctatttgcccgtaaccaggctgaagtctctaaagagaaagcactgcagtctgcaatatctgttggattgaaagattttgaccatttggagccttacatgatttatcatgcggcacgattagttgcactgcttgaggcatatgcagtctatgatccagagatcgggtactgtcaaggaatgagcgatctcttgtcaccaatagttgcagtcatggaggaagatcatgaagcattttggtgctttgtgggtttcatgaggaaagccagacacaacttcagacttgatgaggttggaataagaagacagctgaaaaccgtctcgcagatcatcaagcttaaagattcacagctctacaggcacctgcagcaacttcaggccgaagactgcttctttctgtaccgaatggtggtggttctcttcaggagggagctcacttttgagcagactatgtgtctgtgggaggttatgtgggccgaccaggccgcgattcgagctgggattggaaggtccacttgggcaaggataaggcttcacgcccctccaacagacgacttgctgctctacgctatcgcagcctgtgtcctgcagaggaggaagctgataatcgagaagtacagtagcatggatgagatactgcgggagtgtaatagcatggccgggcagctagatgtctggaagctcctagatgatgcacaccacttggttgtcgaccttcatcacagaatctgatgcgacggcttccctcagttatgtttggtagagtatgcagacatgaaccacttttccgaggtgtatttagtaatctgttgtgtactgttcatcacccggaattatgggcatatatctagagaaccgtgtggcttcaagtgaggacgaagttatctccacttcggttaagctgataaaccattggatagcacaatggtttatgcaagccatccatagtttaacttgatgtaaaatttcgtttttttgcttccagtatctgtcctaggcgaaaacatcattttccatcaagccttttatagcaaaatttaaagttcccagattttggggtgtaatgcggagtaatatatgatggattcaaagtctttgctgcgtcattgcacacaccaagttcttcca

SEQ ID NO: 120862 - DNA, 486 bp, Zea Mays
atgattgcatttattgaagaggccgctatcaagaccgagtcgacttctgagccgatggtctccggtcctttagaagcaatgaagggcatgaagctttgttttaaaggatgtttaaaacaaaaggcaaaagagaaggaagatgatgaggaagtaactaaattgcctattcggggcgaagttcccttggctagcatgcaacccgagtcaaaaccagaaatgactgccaagaggacgccgagaaaaggcaaaagaatgatttcaatcataaatgtgctgtttggtaccgtgactgcccaagagccttccaaggttaagcccacactaggctcctcaggaaaagagagtgcaaaagagactgagggtgcactagttgtggtgccaccgaaggtggccaagatttttgaaaatactccaaaagagagtattgtctgggaggagtcgaaggttgaaataggtgagaaggataaagagcatgttgtaaaatga

SEQ ID NO: 120863 - DNA, 272 bp, Zea Mays
ggttctttctgtatttgttattttcacttgaatatatgcttctatctgtatccatctaaggctcatctgtctcagttgtggatatcatttgtgctgctattggctccaaaacactggctcctatggcctatgcgctatatgttagccttgaacacctgtacatgcttactggagaaatctgtgagatataatggatgttgggctctgtgtatcgagcagtttgacaatcatatgggttactgtactgacccttggccaccggcgcaccccaa

SEQ ID NO: 120864 - DNA, 113 bp, Zea Mays
gctaaataacatggataccatttttgcattcacacttttacatttttctagtgacttgcagttcaaatccgaattatccaaggaaattcaattaaatgaataaaatctaatag

SEQ ID NO: 120865 - DNA, 1353 bp, Zea Mays
caccctataactccaccgcctcgcccatccggccgtcccaggcttccccagctcaggagtcaggtcctcacgccgcgcacgggccagagacgacgagagcgcgcccatccggacccggacagagctcgcctgcgcctgcgcctccaccgatcggcaagcgggaggggagatgaggggttcgtcgcggaggccggtcgccgtggtgatggcctgggtgcggcgccagccgcccaaggtcaaggccttcctcgccgtcgtcgcggggatggctgcgctcgtcttcatccgcttcatcgtccacgaccacgacaacctcttcgtcgccgccgaggccgcgcacgcgctcgggatcgccgtgctcatctacaagctcaccaaggagaagacctgcgccggattgtcactcaagtctcaggatttgactgcattatttctggccgttaggttgtattgtagttttgttatggagtatgacatccatacaattctggatacagctgcacttgcagctactctttttgttatttacatgattcggttcaaactgaggtcaacatatatgctggacaaagacaactttgccttgtactatgtgatattgccttgtgctctgctagcgctacttgttcatccttcaacatcgcacaacatagtgaacagaatctgctgggccttctgtgtttatttggaagcagtttcagtgctgccccagttgcgcctgatgcaaaataccaagattgttgagccgttcacagctcattatgtgtttgcactgggtgttgcaaggtttcttagctgtgcacattgggtccttcaggttttggatacccgaggccgtttgttgactgctctgggctatggtttgtggccttcaatggtgcttctctccgaaattgttcagacattcatccttgcagatttctgctactactatgtgaagagtgtttttggtggccaactggtgctgcggcttccgtccggggtggtgtgaacactgcagcgcgatagaagaagcataccgtccatttcttctgtgttaaatcacacaaagcaacagtcatgctcctagtgcccaaactttttcactctctcaaagtggattagcagagccccgttaatcttttttacttgtaaactgtttacgtgaatactgtaccaacaccgtggaacgtaggccgtccatctgactttttcatccaggctagagttgaagcttgtcgcatttccagaatagagaccagattctcccatttcattgactggtagtctattgtagaaacagacggaacgctatgatagattgttactccatttcaaattaattataaatcattttaattttcttgaagagtt

SEQ ID NO: 120866 - DNA, 1500 bp, Zea Mays
ataactccaccgcctcgcccatccggccgtcccaggcttccccagctcaggagtcaggtcctcacgccgcgcacgggccagagacgacgagagcgcgcccatccggacccggacagagctcgcctgcgcctgcgcctccaccgatcggcaagcgggaggggagatgaggggttcgtcgcggaggccggtcgccgtggtgatggcctgggtgcggcgccagccgcccaaggtcaaggccttcctcgccgtcgtcgcggggatggctgcgctcgtcttcatccgcttcatcgtccacgaccacgacaacctcttcgtcgccgccgaggccgcgcacgcgctcgggatcgccgtgctcatctacaagctcaccaaggagaagacctgcgccggattgtcactcaagtctcaggatttgactgcattatttctggccgttaggttgtattgtagttttgttatggagtatgacatccatacaattctggatacagctgcacttgcagctactctttttgttatttacatgattcggttcaaactgaggtcaacatatatgctggacaaagacaactttgccttgtactatgtgatattgccttgtgctctgctagcgctacttgttcatccttcaacatcgcacaacatagtgaacagaatctgctgggccttctgtgtttatttggaagcagtttcagtgctgccccagttgcgcctgatgcaaaataccaagattgttgagccgttcacagctcattatgtgtttgcactgggtgttgcaaggtttcttagctgtgcacattgggtccttcagtatctccagtttatggctgtctactaggagacttgtgtctcgtggtgttcatgcatggaagcatggagatggaggaaatatcctccttacccgtgggttttagatgaatggaagtctgaattcgtgcttttgcagaattcaaggtttttctaagttcagtcagtctgatatcagttttgattactctcgtttgcaggttttggatacccgaggccgtttgttgactgctctgggctatggtttgtggccttcaatggtgcttctctccgaaattgttcagacattcatccttgcagatttctgctactactatgtgaagagtgtttttggtggccaactggtgctgcggcttccgtccggggtggtgtgaacactgcagcgcgatagaagaagcataccgtccatttcttctgtgttaaatcacacaaagcaacagtcatgctcctagtgcccaaactttttcactctctcaaagtggattagcagagccccgttaatcttttttacttgtaaactgtttacgtgaatactgtaccaacaccgtggaacgtaggccgtccatctgactttttcatccaggctagagttgaagcttgtcgcatttccagaatagagaccagattctcccatttcattgactggtagtctattgtagaaacagacggaacgctatgatagattgttactcc

SEQ ID NO: 120867 - DNA, 628 bp, Zea Mays
gaactaccatgctagttcatactttctggaacaaagtgtcaattggtcatctgtttttgaggccctaatgttagtagagtattaaaaaatgtcttccccgttagttagactatggaccaaatcattgcaaaggtctggactcccaagatatcctagtctgaaaagaacaggatggaaacacaattatacaaaacaaattcagtacatcataaggtatagatgagtaatgattaatgaaacagcaatttttttttaatttaggtgtgatttttttgttattgatatcatcggctgtgtttgtgtccattgcaaaatgtgctgggatgtactttactttgttctacctcatcccgtgctgtatgtatctccagtttatggctgtctactaggagacttgtgtctcgtggtgttcatgcatggaagcatggagatggaggaaatatcctccttacccgttttggatacccgaggccgtttgttgactgctctgggctatggtttgtggccttcaatggtgcttctctccgaaattgttcagacattcatccttgcagatttctgctactactatgtgaagagtgtttttggtggccaactggtgctgcggcttccgtccggggtggtgtga

SEQ ID NO: 120868 - DNA, 2616 bp, Zea Mays
aaccggactcctgttttatttcggatcgcgacgccacaatcccaccggccacagcacagaccaggccgccgccgccgccgccgctctgccttgttcgcagctctgttggccgctcgctttcgcaacattattatacccacctaatcgaccgacgcaatcgaaaccgcctcccatctcatccgtctctctcgaatcccaccgtgcgctcactgcgatggacggctcatccaagcggatcggcggtggcggcgacgacatgcccagccccgaccacgaccagaacgccagccccaacgtcccgccgtccgccgctggtgacggcggcgcatcagccactgcggcggcagcgcccgccgccgggaggcggccgttcaccagcctcagccaggaggaggccgacctcgcccttgcccgcgtcctccaggagcaggagcgggcgtacatgatgctgaccggcggcgagtacgcgatctcggacgccgagagctacgactacgacgaggaagacggcgatgggagcgactacgaggaggaaggcgaggcgctcgacgaggacgagcaggttggggacgcggaagcggagggggctgagggggacctggacctggacccttctcagtacgaggacgacggggagggcgacgtctccgacaggctcatggcgctcgtcgggatcggtgattggcgagcaatggagcaggatgatgctggggacgaggaggacgacgaagatgctgaggttcatacacagggtgcatgggaagatgttgacccagacgaatactcttacgaggagctaattgcgctgggtgaagttgtcggtacggaaagcaaaggccttgctgctgacactattgcctcattaccttgggtgacttaccaggcacaagacaagcaagatggcaacatggaacagtgtgttatttgtcgtgtggagtttgacgagggcgagtcattagttgcactcccttgcaaacatccataccattctgagtgcataaaccagtggctgcagctaaacaaggtatgcccgatgtgcagtgctgaagttcccacttctgtgaacaagcaggcatgacttactcaaacggaagaagatagcggtggcttggtatttatctgccattgatggaatgaaagaagcgccaactgttaaattgttcagggaagcaagggaattggctgggttctgattccctgttttcttcagttcgacaggcttagtcccccccggcctgtacgcatgctaatttgtatggccataccgctggttatttatgcattccatcagacgccgatgattcattgcttgtagatgtaaatcaacaatcataccaccatagtcaatagcagttgttttaatgccaatagcaacgttcatgtttaaaatggtagcatttttgttccttgttttctagaccggacattttatgttcctgaagatggtgattgtgttacaaacgagttgagttgacatgagctgtgtactgatgcgttaaggtagccgtcgaaacgggcaggaatgcgcgagtcgaaagaacagtggtatgtatggtggggtcagcgggaactttgtttctgccgcacaagagtcagaaccgaccactgccagggaaataccgcgggcaccggacagcgacgcggcttcctagtccgggactccgtgtgcgccgcccaccgtggcgccgcagcgccctggccccggcgtgtcccccaagcagagggccgcagcccacaggacgagacgacgttgacgcgcaaccacctcctgtattcttatcgccaacaaatcgaaaaagcccatccgcgctagaaaatcagctataagacgcgcgggcggccagccggacacggacgccaacgcctcatccacctgtgctgtgacctcatatttgtcctccgttccttcgtctcatgatctctgcgcctctgcggctgtcggcgccgagggctgccgtcgggggatcgttcctgctcggcgcgtccaagtccaagcccagcaggatccgctgcgccgcgggggtggggaggggcgccgccgccgccacgctgtacgaggtcctgggcctgcgcgccggcgcgacgggccgggagatcaaggccgcgtaccggcgcctggcgcgggagcggcacccggacgtggcgaccgcgcccggggccgctgccgagttcgtccgcctgcacgacgcctatgccacgctctccgacccggacagccgcgcgcgctacgaccgcagcgccgtagccgcggtggccgtggcgcagcgcccctggaggagcggcgtcggcgtctatggccggcccctccgcacatgggagacggaccagtgctggtagcagttgttgtttatatagactagttagacggacctcctgcggtcctgccgctagccatacggccatggcggctcaccttggttttttttttctgtaccggtggccatccatgttacatgtaccctgatttcgttctcctcctacttgcacttgtacgcgtgcgatcttgagaagccattgcgaacaaatcgaccagcttataggtgattaatgattaagttgtctctgatcctttctatatatccgctcaaattttttctattacaaaaaaaatctaaa

SEQ ID NO: 120869 - DNA, 1317 bp, Zea Mays
accggactcctgttttatttcggatcgcgacgccacaatcccaccggccacagcacagaccaggccgccgccgccgccgccgctctgccttgttcgcagctctgttggccgctcgctttcgcaacattattatacccacctaatcgaccgacgcaatcgaaaccgcctcccatctcatccgtctctctcgaatcccaccgtgcgctcactgcgatggacggctcatccaagcggatcggcggtggcggcgacgacatgcccagccccgaccacgaccagaacgccagccccaacgtcccgccgtccgccgctggtgacggcggcgcatcagccactgcggcggcagcgcccgccgccgggaggcggccgttcaccagcctcagccaggaggaggccgacctcgcccttgcccgcgtcctccaggagcaggagcgggcgtacatgatgctgaccggcggcgagtacgcgatctcggacgccgagagctacgactacgacgaggaagacggcgatgggagcgactacgaggaggaaggcgaggcgctcgacgaggacgagcaggttggggacgcggaagcggagggggctgagggggacctggacctggacccttctcagtacgaggacgacggggagggcgacgtctccgacaggctcatggcgctcgtcgggatcggtgattggcgagcaatggagcaggatgatgctggggacgaggaggacgacgaagatgctgaggttcatacacagggtgcatgggaagatgttgacccagacgaatactcttacgaggagctaattgcgctgggtgaagttgtcggtacggaaagcaaaggccttgctgctgacactattgcctcattaccttgggtgacttaccaggcacaagacaagcaagatggcaacatggaacagtgtgttatttgtcgtgtggagtttgacgagggcgagtcattagttgcactcccttgcaaacatccataccattctgagtgcataaaccagtggctgcagctaaacaaggcatgacttactcaaacggaagaagatagcggtggcttggtatttatctgccattgatggaatgaaagaagcgccaactgttaaattgttcagggaagcaagggaattggctgggttctgattccctgttttcttcagttcgacaggcttagtcccccccggcctgtacgcatgctaatttgtatggccataccgctggttatttatgcattccatcagacgccgatgattcattgcttgtagatgtaaatcaacaatcataccaccatagtcaatagcagttgttttaatgcc

SEQ ID NO: 120870 - DNA, 1928 bp, Zea Mays
ggactcctgttttatttcggatcgcgacgccacaatcccaccggccacagcacagaccaggcacaagacaagcaagatggcaacatggaacagtgtgttatttgtcgtgtggagtttgacgagggcgagtcattagttgcactcccttgcaaacatccataccattctgagtgcataaaccagtggctgcagctaaacaaggtatgcccgatgtgcagtgctgaagttcccacttctgtgaacaagcaggcatgacttactcaaacggaagaagatagcggtggcttggtatttatctgccattgatggaatgaaagaagcgccaactgttaaattgttcagggaagcaagggaattggctgggttctgattccctgttttcttcagttcgacaggcttagtcccccccggcctgtacgcatgctaatttgtatggccataccgctggttatttatgcattccatcagacgccgatgattcattgcttgtagatgtaaatcaacaatcataccaccatagtcaatagcagttgttttaatgccaatagcaacgttcatgtttaaaatggtagcatttttgttccttgttttctagaccggacattttatgttcctgaagatggtgattgtgttacaaacgagttgagttgacatgagctgtgtactgatgcgttaaggtagccgtcgaaacgggcaggaatgcgcgagtcgaaagaacagtggtatgtatggtggggtcagcgggaactttgtttctgccgcacaagagtcagaaccgaccactgccagggaaataccgcgggcaccggacagcgacgcggcttcctagtccgggactccgtgtgcgccgcccaccgtggcgccgcagcgccctggccccggcgtgtcccccaagcagagggccgcagcccacaggacgagacgacgttgacgcgcaaccacctcctgtattcttatcgccaacaaatcgaaaaagcccatccgcgctagaaaatcagctataagacgcgcgggcggccagccggacacggacgccaacgcctcatccacctgtgctgtgacctcatatttgtcctccgttccttcgtctcatgatctctgcgcctctgcggctgtcggcgccgagggctgccgtcgggggatcgttcctgctcggcgcgtccaagtccaagcccagcaggatccgctgcgccgcgggggtggggaggggcgccgccgccgccacgctgtacgaggtcctgggcctgcgcgccggcgcgacgggccgggagatcaaggccgcgtaccggcgcctggcgcgggagcggcacccggacgtggcgaccgcgcccggggccgctgccgagttcgtccgcctgcacgacgcctatgccacgctctccgacccggacagccgcgcgcgctacgaccgcagcgccgtagccgcggtggccgtggcgcagcgcccctggaggagcggcgtcggcgtctatggccggcccctccgcacatgggagacggaccagtgctggtagcagttgttgtttatatagactagttagacggacctcctgcggtcctgccgctagccatacggccatggcggctcaccttggttttttttttctgtaccggtggccatccatgttacatgtaccctgatttcgttctcctcctacttgcacttgtacgcgtgcgatcttgagaagccattgcgaacaaatcgaccagcttataggtgattaatgattaagttgtctctgatcctttctatatatccgctcaaattttttctattacaaaaaaaatctaaatttctatgcaatttataatatttaaaatttgtatttgtgatttttttattttcgaaatatgtactaacgagaaatataacttaaaaataaagaaaaagaaacaagagcagtgaaggcatttagcttagaacaatc

SEQ ID NO: 120871 - DNA, 2118 bp, Zea Mays
gctcgcttccacccttcctcctctcccattccaaatttagctcgtcaccttcggcatcgccgttctcgtgttccccgccttcccgccgctgctggacgacagccggccgtcgggccggccgcgacgccgagggctcctcctcgttcttccttgcacgcggcattgatcaaccgacgaatcccttccactgagcgagaacggcaggggcacgcgcggatggacgacctgaaggcgagcctggcgcggccaatccagctcgcagagcaggtgatcaagtgggcggacgaggcgcagacgtgccggcaggagtgccaggatctcaaggccaggctggagcgcctctccaccctgctccggcaggcggcgcgcgccgacctctacgaacgccccgcgcgccgcatcctcgaggacacggacaaggcgctcgacaaggccgccgcgctgctcgagcgctgctgcggccacggtttcgtccgccgcgtgttcaccatcatccccgcggggtcgttcaagagagcgtcctacctgctcgacaactccctcggggatctctcctggatcctccgcgtctccaactacgccgcctccgacgaggacgacgaggacgaccacatcggcctgccccccatcgcgcagaacgagcccatcctctttctcatctgggagcagatcgccgtgctgcagtacggcgggctcgaggcccgcgcggacgccgccgccagcgtcgtctccctcgcgcgcgacaacgaccgatacggcaggctcatcatcgaggaggacggcgtcccgccgcttctgcggctcatcaaggagggccgcgccgacgcgcaggagagcgccgcgctcgccatcggcctcctcggccgcgaccccgagtgcgtcgacctcatgatccttgccggggtctgcacctccttcgtcaacatcctcaaggacgcgcccatgaaggtgcagggaatggtggcgtgggcggtctccgagctcgccgccaaccatcccaaatgccaggacgccttcctccagcacaacgtcatccgcctcctcgtctcccacctcgccttcgagacggtgcaggagcactccaagtacgccgtcgcctccaagatgtccatccactccgtggtcatggataggaagagcaacgacagctcacaggacccctcgggcagcggggagcgagacgccaccgccgtggcggcggggaaaccaacctttggcggtggcgggatagacgccagtagttcgagcgcggcggctcccggtcccagcgccagacccgttggcatggccgggacgaggctacacagcgcgtccatttccgccacgagcatgcgggggagggagtacgaggacccggagaccaaagcctacctgaaagcccacgccgcccgggcgctgggcacgctggccacgggcaaccccgccatctgcaagaacatcacggagtcgagggcgctgctctgcttctcgatcctcctcgagaaggccacgggcgacgtgcagtacaactccgcgatggcgctcgtggagatatgccgcgtcgcggagcagaacgccgagctccggcggtcggcgttcaagccgacctccccctcggcgcgcgccgtggtggaccagctcctccgcgtcgtggagaaggccgactacgacgacctcctcatcccctgcatcacgtgcctggggtgcctgtcgaggacgttccgggcgacggagaccagggtcatcgggccgctcgtcaggctcctcgacgagcgggaggccgacgtgagcctggaggccgcggccgcgctggccaagttcgcgtgcatggacaactacctgcacgtggaccactgcaattcgatcatcgaccacggcggcgccaagcacctggtgcagctcgtctacttcggcgagcaggtggtccagaccgcggcggtcctcctcatctgccacctcgcgcacaacgtcccccacagcgaggaactcgctcaggccgaggttttgacggtgctcgactgggcgtggaagcagggctacatgtcacaggatccggtgatcgagagcttgctgcccgaggcaaagattaggatggagctctaccagtccagagcttactactattgatctgtatcgaac

SEQ ID NO: 120872 - DNA, 1687 bp, Zea Mays
cccggctcccgcagccagccctacatcccccgctccgctccgctccgcaagcgaggcgaggtagggataccgtcgatacgggcccacttcctcctccacctccatgttccgtctcgccccaactgccgaccgccgccctcgccccggctcctccctttccctctagctagcaccaatcgttcatccagtctcacaaccgagctccccgaccaccagcacgcctcgcgctcgcgcgtccctcccaacagcgtgctccagttccttcaatggcatctcgggcgcgcctgccgggcacgccggcctcgatcgccgtcctcatcctctccttcttccaaggtacgtatgtggtggctctgatccacttgcccgccgtggactgacgggctgcttgggtttgtgggtgggtgggggtggtggtggaacccggtgcggcgcgcagggtcggtgtgcggcaccacgttcaccttcagcaaccgctgcggcgacacggtgtggccgggcctgctcgccggctcggggacgccgccgctggagaccacgggcttcgcgctggcgccggggcagtcgcgcgcgctgtacgcgccgcaggggtggtcgggccgcttctggggccgctccggctgcgacttcgacgccgcctccgccaagggctcctgcgccacgggcgactgcggctccggcgaggtcgagtgccgcggcgcgggggcgtccccgcccgccacgctcgccgagttcacgctcgacggcgccggcggcaaggacttctacgacgtcagcctcgtcgacggctacaacctgcccatgctcgtgcgggccaccgcgcccgaatgccccgacacggggtgcctcgtcgacctcaacgggctctgccccgacgagctccgcgccgcccacggccgcgcctgccgcagcgcctgcgaggcgttcggcagccccgagtactgctgcaacggcgcctacggcaaccccaacacctgccacccgtcacagtactcccagctcttcaagtcggcgtgccccaactcctacagctacgcctacgacgacgccacctccaccttcacctgcaaccacaccgattacaccatcaccttctgccccaaatccactccaaccagcgacaaatccgaacattcgtctcggaggccaagccacgagcaactggaagattcggtgtggcttgcatccttgaaggcaagtgacgccagtgctctggcaacaacgtcatggtcggcgtccattgtgctccgatctgccttggcaattgcagtggcgaccttgcttgctgcacaacttgcaccagatcatcctatggtcagcttgctatgattcatcatggttgcggttcttgatcggtaggagtcatctaagttattttctgacaagaagaggattagagcagtagcagtgatcagcaatgggaagagaatattgtgtaggctttttgtttgtggataggtgctagagaaggaatgatgtgttacaagttggcaactggaatttcatgaacgcattgcaaggcgattcaggttgctctgttgtcatcggcccctttttctatttttgcagtaaagcgcataaaaaacatctcgaatggatactgtaaccatttgatgtgcagaggttcacagagtaatgtgattttggttagaactctacaccgccatgcttgtgttgtcactttgtt

SEQ ID NO: 120873 - DNA, 1575 bp, Zea Mays
cgcagccagccctacatcccccgctccgctccgctccgcaagcgaggcgaggtagggataccgtcgatacgggcccacttcctcctccacctccatgttccgtctcgccccaactgccgaccgccgccctcgccccggctcctccctttccctctagctagcaccaatcgttcatccagtctcacaaccgagctccccgaccaccagcacgcctcgcgctcgcgcgtccctcccaacagcgtgctccagttccttcaatggcatctcgggcgcgcctgccgggcacgccggcctcgatcgccgtcctcatcctctccttcttccaagggtcggtgtgcggcaccacgttcaccttcagcaaccgctgcggcgacacggtgtggccgggcctgctcgccggctcggggacgccgccgctggagaccacgggcttcgcgctggcgccggggcagtcgcgcgcgctgtacgcgccgcaggggtggtcgggccgcttctggggccgctccggctgcgacttcgacgccgcctccgccaagggctcctgcgccacgggcgactgcggctccggcgaggtcgagtgccgcggcgcgggggcgtccccgcccgccacgctcgccgagttcacgctcgacggcgccggcggcaaggacttctacgacgtcagcctcgtcgacggctacaacctgcccatgctcgtgcgggccaccgcgcccgaatgccccgacacggggtgcctcgtcgacctcaacgggctctgccccgacgagctccgcgccgcccacggccgcgcctgccgcagcgcctgcgaggcgttcggcagccccgagtactgctgcaacggcgcctacggcaaccccaacacctgccacccgtcacagtactcccagctcttcaagtcggcgtgccccaactcctacagctacgcctacgacgacgccacctccaccttcacctgcaaccacaccgattacaccatcaccttctgccccaaatccactccaaccagcgacaaatccgaacattcgtctcggaggccaagccacgagcaactggaagattcggtgtggcttgcatccttgaaggcaagtgacgccagtgctctggcaacaacgtcatggtcggcgtccattgtgctccgatctgccttggcaattgcagtggcgaccttgcttgctgcacaacttgcaccagatcatcctatggtcagcttgctatgattcatcatggttgcggttcttgatcggtaggagtcatctaagttattttctgacaagaagaggattagagcagtagcagtgatcagcaatgggaagagaatattgtgtaggctttttgtttgtggataggtgctagagaaggaatgatgtgttacaagttggcaactggaatttcatgaacgcattgcaaggcgattcaggttgctctgttgtcatcggcccctttttctatttttgcagtaaagcgcataaaaaacatctcgaatggatactgtaaccatttgatgtgcagaggttcacagagtaatgtgattttggttagaactctacaccgccatgcttgtgttgtcactttgtt

SEQ ID NO: 120874 - DNA, 2026 bp, Zea Mays
cgcagccagccctacatcccccgctccgctccgctccgcaagcgaggcgaggtagggataccgtcgatacgggcccacttcctcctccacctccatgttccgtctcgccccaactgccgaccgccgccctcgccccggctcctccctttccctctagctagcaccaatcgttcatccagtctcacaaccgagctccccgaccaccagcacgcctcgcgctcgcgcgtccctcccaacagcgtgctccagttccttcaatggcatctcgggcgcgcctgccgggcacgccggcctcgatcgccgtcctcatcctctccttcttccaagggtcggtgtgcggcaccacgttcaccttcagcaaccgctgcggcgacacggtgtggccgggcctgctcgccggctcggggacgccgccgctggagaccacgggcttcgcgctggcgccggggcagtcgcgcgcgctgtacgcgccgcaggggtggtcgggccgcttctggggccgctccggctgcgacttcgacgccgcctccgccaagggctcctgcgccacgggcgactgcggctccggcgaggtcgagtgccgcggcgcgggggcgtccccgcccgccacgctcgccgagttcacgctcgacggcgccggcggcaaggacttctacgacgtcagcctcgtcgacggctacaacctgcccatgctcgtgcgggccaccgcgcccgaatgccccgacacggggtgcctcgtcgacctcaacgggctctgccccgacgagctccgcgccgcccacggccgcgcctgccgcagcgcctgcgaggcgttcggcagccccgagtactgctgcaacggcgcctacggcaaccccaacacctgccacccgtcacagtactcccagctcttcaagtcggcgtgccccaactcctacagctacgcctacgacgacgccacctccaccttcacctgcaaccacaccgattacaccatcaccttctgccccaaatccactccaaccaggtccttgcccaaatcagatcattccttcacttccagtttcaacttcagttgcaatttcgagctgtaaggtattgtttgatatagacttcgtgagaatgccgaggtcttgattcggaattcttaggcttggagaaaagcaaagaagctttgatttgcactcttctctttcccatctttttccttgtgtccccactcggcaccttgccaccttgtgtgctgtgtgactagaaaaccacaactgccgagttgggactgcaaggaacacatcagactgatagagggttccacatccgatgcttagattaactttacaagttcatgctttacaagattaagcaaacctggtcttacgcgagcaatatttcttttgacatttttgcagcgacaaatccgaacattcgtctcggaggccaagccacgagcaactggaagattcggtgtggcttgcatccttgaaggcaagtgacgccagtgctctggcaacaacgtcatggtcggcgtccattgtgctccgatctgccttggcaattgcagtggcgaccttgcttgctgcacaacttgcaccagatcatcctatggtcagcttgctatgattcatcatggttgcggttcttgatcggtaggagtcatctaagttattttctgacaagaagaggattagagcagtagcagtgatcagcaatgggaagagaatattgtgtaggctttttgtttgtggataggtgctagagaaggaatgatgtgttacaagttggcaactggaatttcatgaacgcattgcaaggcgattcaggttgctctgttgtcatcggcccctttttctatttttgcagtaaagcgcataaaaaacatctcgaatggatactgtaaccatttgatgtgcagaggttcacagagtaatgtgattttggttagaactctacaccgccatgcttgtgttgtcactttgttatctcctcgaatgttacatgactagttttgcatgttgtgaatgaatgataagcggtaacgatttacatg

SEQ ID NO: 120875 - DNA, 1386 bp, Zea Mays
atggcatctcgggcgcgcctgccgggcacgccggcctcgatcgccgtcctcatcctctccttcttccaagggtcggtgtgcggcaccacgttcaccttcagcaaccgctgcggcgacacggtgtggccgggcctgctcgccggctcggggacgccgccgctggagaccacgggcttcgcgctggcgccggggcagtcgcgcgcgctgtacgcgccgcaggggtggtcgggccgcttctggggccgctccggctgcgacttcgacgccgcctccgccaagggctcctgcgccacgggcgactgcggctccggcgaggtcgagtgccgcggcgcgggggcgtccccgcccgccacgctcgccgagttcacgctcgacggcgccggcggcaaggacttctacgacgtcagcctcgtcgacggctacaacctgcccatgctcgtgcgggccaccgcgcccgaatgccccgacacggggtgcctcgtcgacctcaacgggctctgccccgacgagctccgcgccgcccacggccgcgcctgccgcagcgcctgcgaggcgttcggcagccccgagtactgctgcaacggcgcctacggcaaccccaacacctgccacccgtcacagtactcccagctcttcaagtcggcgtgccccaactcctacagctacgcctacgacgacgccacctccaccttcacctgcaaccacaccgattacaccatcaccttctgccccaaatccactccaaccaggtccttgcccaaatcagatcattccttcacttccagtttcaacttcagttgcaatttcgagctgtaagcgacaaatccgaacattcgtctcggaggccaagccacgagcaactggaagattcggtgtggcttgcatccttgaaggcaagtgacgccagtgctctggcaacaacgtcatggtcggcgtccattgtgctccgatctgccttggcaattgcagtggcgaccttgcttgctgcacaacttgcaccagatcatcctatggtcagcttgctatgattcatcatggttgcggttcttgatcggtaggagtcatctaagttattttctgacaagaagaggattagagcagtagcagtgatcagcaatgggaagagaatattgtgtaggctttttgtttgtggataggtgctagagaaggaatgatgtgttacaagttggcaactggaatttcatgaacgcattgcaaggcgattcaggttgctctgttgtcatcggcccctttttctatttttgcagtaaagcgcataaaaaacatctcgaatggatactgtaaccatttgatgtgcagaggttcacagagtaatgtgattttggttagaactctacaccgccatgcttgtgttgtcactttgtt

SEQ ID NO: 120876 - DNA, 2550 bp, Zea Mays
ccgcgcgcatgccaacagacccctcatccgccgtgcgcctgacgcccaccccgacactacccacctccatcgtgctccgctccccgtccttcgtcccctcgcctgtcgcctcagcctccacgcgacgcgaccacggctcgccttcaaaattcaaatcctcgccgctagacgcgcccactgccatccagcctctggggtctggctcactgcccggccgtcaggccacctggcactggccacgcccagtcggtgcggaagaggaggccgcggacctggccgagctcccttgtgaggtggtcccggggcgcgcgggcctcacggtggcccatggacgccgggcggaagtcacgccgagcggaagtcacgctgagccatccatgcctaccctggcttcttccctgcctacgcggaagttggagctgagtcttgagtgcccatgaagctcatatcgacatgttggccttgttgggtagcaggttggagcaggttactccgttactgccgatgtgcattcacagtatgaaaatgagatccaggaattgatggatgtgatttctgttgaataagaggagaaaaatgacattcacaggaagcttcagaatgtggaaaatgagtgtaaatgcaagctggattgatgagttgaaaaggaagacgagtttcttcaaacagaaaacgtcatgaaccaattctaataggaaaacagaaacaagatttgtatcctcaacatgcttattaagtagcgttccatgggcttgtctttcagttctgaaaagggagcagaagatatgaaccatgacccccttatctaatcttcagaaactgcaactgtttcccttacggcgtagctttatctcatactgccggatttagaaaaatccactgctccaaattccaaaaatgacatatcactgccagttgcattagaaccaactgtgctctaaatatgtaatatagtcatttcagtttgtttctgatcgcaatcttcctgcatacttgagacaaaagaagcttgtttctgaacctttttgagtcatgcaatgttgtcaggataacctgtccaaaaatcattcctggtcatgaacttccactaattagtagtaagtagtttattctataattatattggagcctaaaaatgcattagcttgtccaaaaaccatcactttatctactcttgatcagttttgataatttgttctttggatctagaacacagtagaggtatgcctgaaaatgcattagcttgtagtcaactgtgctaacgaaagcatagcagatcatagatagtgtttaaaatttaaataatgtacttcgcttatttttgctgcttttatagccttgaagactttgaataaaaaaacatagttcaggtacataataaaaaagagcttcctgcatacttgacacaaaaagattccatcccgcccaccctttaattcggtcttcagagagtttgaataaaaaaatggaaaacaagagcttcaggtaactcctttgtacaaaggagcttctcttcaatagcatcaagttaattgttagttaagaaaacatatcaagtatcttttgtggagggcagttatggactgagacatctcatctcacttgtagagttaagtaaactaaaatagcatcaagttaattgttagtttacacaatattttgaaatgcgcccagcaacatgcattttagtacgtgtttatgccatgtgatgcatgttcaactgcattatcttcattttcatcccttctacaaagtttccaacatctgaaccatctgttacttctcagcaggttgcagatgtaggccattcctgaagaatgatggtcagttgctgctacgtctaatcattgggttccgtattactacatacacggagaaaacagattttccacatatattctttgttttgttctacaaacaaagttaagtgcttcgacaacatattcctaccttctagctctctctgaagcaaatttatttcctttcttttggggggagaagatctcttcaaacatgtgaggatgtttctgctgggcaagaaaatgctttagatgtttctattgggtagagagaaaaatggtgctggatcgatttaaatacagtacatgttctatgctgccatagctaaaacagcgttcgttgtttagaatcctaggtatcttaaactgtcttgtcattgctattagtattttccaatgcccatattgatgtatttatcctaattttcgtctcatgatgatctccagggccggtcctggaggggggcaagtggagcggccgcaccgggcccccgattttagaagggcccccaagtagtgtacatgtatataggttttatatgttgggtccggcctgttaaagttacaatagacctattttttaattgtctaactaactaaaattgcatctgtaactccagacattcaagagtatatttgggtttttattgagctcgacaacattgaagacgttaaatgatactgaactagaagcatgttgcagtgaattcgcaaaaacattctcttcacaagccagttctgacattgaggt

SEQ ID NO: 120877 - DNA, 1461 bp, Zea Mays
agacgacgacgactacgactacgaagacgattattgcaaatctggtgggtgcgcgacagaagatggacagcgggttggttagacagaagtgttataaaaacggcgatcgtggaaactagaaaaacgggttataattataatagtagagaaaagacttgtattaggttgacaatgttcaaaggctaacaagtccagctcgatatttgccaaaagtttacggttttgtatttcatcgtgtcgcccaagaaaatcgaaggaacgcgccgccaccggccgcaacaaagcaacgcaggcctccggcctccctgaactgacttcagaagtcaccaacgcacccagcacagacagaagaccctcgccggacgctcgctctcgccggggacaactcaatcacgaggccaggatggcccgctacgatcgcgcgatcaccgtgttctcacccgacggccacctcttccaggtcgagtacgccctcgaggccgtccgcaagggcaacgccgctgtcggcgtccgcggtgtcgacaccgtcgtcctcggcgtcgagaagaagtccacccccaagctccaggactccaggtccgtgcgcaagatcgcgagcctggacacccacatcgcgctggcgtgcgcggggctcaaggccgacgcgcgcgtgctcatcaaccgcgctcgcgtggagtgccagagccaccgcctcacagtcgaggaccccgtcaccgtcgagtacatcacgcgctacatcgccggcctgcagcagaagtacacgcagagcggaggggtgcgccccttcggcctctccacgctcatcgtcggcttcgatccctacacccagaagcccgcgctgtaccagactgacccctcggggaccttctccgcttggaaggccaacgcaaccggccgcaactccaactccatgcgcgagtttctcgagaagaattacaaggagacgtccggtaaggagaccatcaagctcgccatcagagcactccttgaggttgttgagagtggtggcaagaacatagagattgcagtgatgacacacgaggacggccttcatgaactcgaagaggctgagattgatgagtatgttgccgaaattgaagcagagaaagccgctgccgaggctgcaaagaagggtgcaccaaaggggaactgattccgcacaagcttagattgcgcctcttgttccagagcatgtcttatgattcacctcttagatgattgcccggatgtttggatacaggaatatttataaaaaaaattaagatgaagccgcttggatgaaaacatgctatgtgatgcatagtattgcaataccatggtggtttgttgtgtgacttgtcgcagtggtctcttgatctgtcagtattattttctggaacctgtcagtattattttctggaacctggatgctactcgattaagagccttgtgttgttggtattgttgatagatttgcagtcg

SEQ ID NO: 120878 - DNA, 719 bp, Zea Mays
gatgctagaatccccgatggtctggttcttctgggtgagaaacaattcatacaacaatgcaccttaccagtaacagattacaccaccgtgtgttcagccgcttaaaacatctcgtattattacgacacgggaatagcaacagcagtgcggagaaaatcacaagtcttcagaccatagaaacctagagtggtaagacaatgatagaagagatgcggcctatgccttcacagcaacaagcttgtcaatgaggtcagcggcgtcttcaacggtggcaattgtctgcgcgctggactcctccacgctaatgtcgaagtgctcctcaaggcccatcacaatctcaaccgtgtccagcgaatccgcaccaagttcagagaatttcgattcaccacaaacttcagtgtggtcaggaagagcaagctgcttcttcacaatttcacaaaccttgtccaccgtatccttcttggcctcgcaggaaacagatctcataggcactggttgcaggcggaggaatgtgttacccttcctcaccggggagaaggctagagaatttgatataattaccttgacaggcatggcgaaggagagagcggaagatccggcgatggatgccatgtgcgtcagacgggaggagtgaggtggaggggaagaggggaggcggcgggcacgaagagcgtgagagcgacggggaggtggctggccgaggctgggtaggttggagt

SEQ ID NO: 120879 - DNA, 1044 bp, Zea Mays
gatattttggtgtagagcttgaccaggttcatcgttttttggatagtgcatgtgagccagcaaagtatatgtgcttgggagccacgttgagttgctcctgcagtgctgacatgccctagaattcatgttcaccaagttgtggttgagttccacatccctgcctacataatcagtgatgcctgcccatatatatagccctttggttgggtttaatgaaggtttcctccctgctcacgaattctgtccaaagataactacaagggtgttgtggcgcatgtgttcctgctagtattaatcttctccccagtccctagatcgatttgcttgagctggtatgtgccacccctgtgctggtaaccacactttcaattctcccacctcgccatggctcggacgtcctaaggagttgctgacccgtatgaagcttgttctgtgatcatctcagagctcccaaaataaagagtgaagattcaagatgaagtggttgctgaagaggagtctactccagtgtcttctcatcaagaggatggagctatctaattgatggttgggtagagggatctagaacctcttcactacaacaaaggcaagccccggtgcatttgccccttccttgtattaaaaaaagacttttatacgctttaagtctagtgaaatgtgcattaagtttataggagttgcttggaaactatttgatgcattgcctaccttgatatccacgcctttatagatacttctgttgaaatatcaaaataagatttacaaaaatgcttagccctgcttagatcttgtggatagaggttgccttttgcaataacgcctagctcaggggttatcctgaggaaggatggcttatacctgcatgaatattctcatctggagcatggtgggatcttactgcaaagttccctataatgctcttttcatccttaggaacacaaaacaatcctaagggtggaagtacttaactcgagacttgggctaggaacaagtgatgctccacccaggttaattaaggattggatgcgtatgtaggcctgaatg

SEQ ID NO: 120880 - DNA, 479 bp, Zea Mays
gtcttccacggcgccattctttttcaaatcaagaaaaatcaagaccaaaagcagtccagccttctcctccccggacaggcagcgagaggcgcttctgctgctgcatggagatggaggtggtggaggcaaccaaggcgccgccggcgtccgtgtcatcgtctatgacgtcgttggcgtcggcctccgggccagcgggcggcggggagttcacggcagacgacctcgcggcggcagaccagctggtgcagctcagcgtcagcggcggcggcggcggggacgaggaggaccagtgctgttcgacgtcgccccgatcagtgaacaacgccgaggacgacgcgtgccgggggctggtggaccggagggctaggaagcgctaccggctggtgtcggagctctacgccgccaccaggaaggtgaaggcggccggcgccggtggtggtggcaggcggcggaagggcagggacggggtgaagaaatga

SEQ ID NO: 120881 - DNA, 904 bp, Zea Mays
gaaaaatcaaccaaggccgaggaaaaaagagaaacgaaaaaaaaacacagcaaattagagagggggaacacgcgaagttagccggaggccaaccctcgcgcctcgcacacaccgtacctccctacctccgccggacgtcgggcgaccgaccgatcgatctgtcaaacgcgcggctatggccgacgcacaggccccgtccccggcgcggttcacggcgcgggagctcgcggcggcggagcagctcatccacctcagcgagagcagctcctcctcctacgccgccctcccgcggggatccgtcgcgtcggcctcctccacctcgtccccgcgctccgtcaacgcgccgccgccgcctgcgacccctcctccagctgggctattagccgccccggcggaggatgacgaagacgacctggaccagcaggaggtgcgcgggaggccacgcaggaacaggcgctaccgcctgatcgccgagatctacgcggcctcggagcccaagccgatcgtgggcggggcgcgccgcaggaaggtggacaggccctcgacggacggcgcgccggaggccaggaagtagagggagagagagaggaggtggacttgcttgtaattatggataattatcagggactagctagctctagctttgctataggaaggtttgtgtgagagcttggtttagattggcatatctacccaccatccattctctctaccttagctacctttttgttactcatatcatgcatgatgttcttctttctcatggatcatctgatccatttctcttctgggagagaagatcgatgacacagatcggtgatcatcactaggagttggtgggttattaactgtaaattaaactattgtatatatcctttcactagtgagatcagtacttggcact

SEQ ID NO: 120882 - DNA, 81 bp, Zea Mays
atatgtttaaacaaaaaaatgatgtattacaaagtcatagatctcttcaagctctataattttcatataaactttatcttc

SEQ ID NO: 120883 - DNA, 174 bp, Zea Mays
taataggctgtttggtttgaggaatgagctagttcatcatcttctcactcctcatttttttgtttggtttgtggaatggaatgagttgattcatcatcacctcattcctcatagttagttagttagtactaatatgaggaatggggtcatcccaccaaatttgaggaatggacc

SEQ ID NO: 120884 - DNA, 781 bp, Zea Mays
ttaagcagcccaaaacgcaacctgcacgtacaatcaagcttacgcaccgcagcatgccattctgctcgcatggcatctgttactagtcatgcatgtgaaactttggccgccgccgatccaccccatttctgtatcctggaatgggcctcgctggcctccttgtcccagttggtgcgcagcgtgatggcgaccaggatgagggtctgcaggccgacgcccgtgagcatgccgccccacatcccctgcaccccgccgcgcagcgggaaggcgatgatgtacccgacggggatgccaacgaggtagtagcagccgaggttgatgtacgccaccagccactgccagccggccccgacggcaacgcccgacagcaccggctgcacgctgttgaggagcagcgagaaggcgaagacgacgccgaggctggccacggcgcgcaccacctcggggctttccgtgaagggcgcgccgtacacgtcgcggaaggccaggacgaggacgaagaaggccaacccgatggccaccgaagacatgagcaccaccaggatcgcgaacttggccgcgcggggccgcccggcgcccagctcgttcgacacccgcacgctgcatcagattttgtagaatataatagtcatgagaacgcgaggcgtagcgtacgttcctgcttgctgcacgtacgtcgatggcattggcaatatgatcattattacctgatggccgcgttgaatccgaagaacaccatgatctgccacccgaacaggttcgtgctgtgattcgtatacag

SEQ ID NO: 120885 - DNA, 1546 bp, Zea Mays
aaataaccttcgacattgtcgacatggtatatccatacaacgccatcatgggccgaggctccatcaacaaattcgaagccgccatccacgggttgtacctatgtatgaagataccaggcccgctgggcgccatcacaatctacggcaaccagcagacggcgcgcaacatagagcgggacttcgtgcccggtcagagaaatgtacactgtctcacgacccagcgcgaagtccctgcgccggctagcccaaccgacaagcagcacgacaaggcacagttgcagtgccaagacgggaccaagactgtccccctcgatcaggccacgcccaaacagactgtaactatcagcgaagacctcacgtcacttgaagaagagaaacttctctgctgcctggccaagaataaagatgtcttcgcctggtctgccctcgatctggtcggagtcagccgagccataatcgaacacagcctggggattgacccttcggtgcgacccaaaaagcagaagcttcgcaagatgtcagatgaaaagacagaagccgccaaggcggaggtgcatcgcctcctggaggctaaattcatcgagccggtggcttaccccacgtggctctccaatgttgtgatggtgcagaagaaaagcggaaaatggcgcatgtgcatagacttcaccagtctcaataagtcctgcccaaaggacaatttcccgttgccacggatcgacaaaatagtcgatagcgcggccggatgcgaggtcatgtccctcctcgactgcctctccggctatcaccagatatacatgaaggaggaagacaaggccagcaccagctttataacacccttcggcacttattgctttgtcagaatgccggagggtctcaagaatgccgggtccaccttctctagactcaccaaaacggtgctcgaagggcaggtcggcagaaacgtattcacatatgtggacgacatcgtcgtcgccagcaaaaataaggaggaccacctcgccgacctggcggaaacattcgcgagcatgcgagatgcacgactccgcctaaacccggaaaagtgcgttttcggtgtccgccagggcaagatattgggctacctggtgtcccgccgaggcatcgaggccaacccaaccaagatccaggccatcgtcgacatgtcgcctccgcagtccgccagggacgtccagcgcctgacaggcaggatggccgccctcaatagattcatctccaggtccgccgagcgaagtctccccttcctcaaaaccctccgcggcgcgaaggacttcgcttggggaccggagcaagcggcggccttcgcctcattaaaacagtacctagcggagctggccaccctcacaagcccagactcctcgctccccttattgctctatgtcgcggcttcgccgcacgcggtcagcgcggcactagtgcaggagcagacagtcgaaggcgcagtcaaacagtgccctgtgtattatgtctccgaagtcctgacaccatccaaatgcaacatgacagagctggagaagattgcttacgcagt

SEQ ID NO: 120886 - DNA, 887 bp, Zea Mays
atggacatggaggcggccgcgatctccgggaccgccagcgcgtcgtcgtccacgtcgcggcgcggcaggagcatctcccgcctgccagcgcgcgtcgccggcgcggtgatccggggcctggtcaccttcgtcttcgcggcagtgggcatggtcctcggggccgtcacgggcgcgctgatcgggctcgccacggagagcggcctggtgcgcggcgccggcatcgggtccatctccggcgccgtcgtgtccatggaagttgtcgattcctccgtcgccatctggcgctccgacgagtccgggatctggagcgtcctatacgtgctcgatgtcctctggagcctgctgaccggccgcctggtgcgagagaaggtggacccggccgtgcaaagcgccgtcgacagtcagatgaacgccgcggactcgcaggacatggcgccgacactggcggacatgttcgagacgggcgccgccgacgccaagggcatgccggccgccgctgtcgcggcgctccccatcatggccttcaccgagcacaccgtcgccgacggctccggggagcccatcggctgctccgtctgccttcaggacttcgaagcaggcgagacggcgcggagcttgccggagtgcgggcacacgttccacctgccgtgcatcgacgtctggctgctccggcacgcctcgtgcccactgtgtcgtcgcgcggtctaagccggtgcgcacacttttcgttaggatgtctttgggcaaccgtgagccgatgcgcgtgcacacgtgtcccagaccaggagcacagtacagtagggtagtaggagtgcaggacacctggttctttcttgcataccttgattatttttttccttcttttttctacgtcttgggcacgcatg

SEQ ID NO: 120887 - DNA, 2457 bp, Zea Mays
atggctagatcgttcaacatttgtccgcagatcgaccccttggtggtcacgcgcgtccccggcgtggccctcgacatgctgttcctcgtaatcatccaagcgcttgccgtcatcctcctcgccaagttcatccacctcttcctccaacgctacaaccagccgagcgcagtctctcagatcctcgccggagttgcggtgggcggcatgggcctgcgcaacgccatcctgcacgtggacgtggacgacgtcgaggacatgtacggcggctacatcaccttggcgcgcgtcgtgtacatgttcctcgtcggcctcgacctggacctcgccgcgctgcggaactccacgcgccggtgcgtcgccctggcctacgcgaccgtggccgccagcctgctcgtggccgccatcgtgtccagcgggatgtacggcagcatgatgcactccccggtgaagacgcccgagctgctcgccgccactctcatgctggcgctcaccaacacctcatccatcaccatctcgcggatcgccggcgagctcaacctcacagtgacggagaatggccggctcctcgttgccgcggccatcatcacgaacctcatctgcgtcgtcggcgacagcgtcctgtcgtccacggcactggccaaggagaagagccaggacctgtaccacacctcgccccagatcaagaagggcttcctggcgctcgccgtggcaggcgtcgctgtgtggcaggtgcgccccgttgtgacgcgcatcaaccagcgcaacgttgggcagcaccacgtcaggagccgcgacctggtgatcatactcctgggcatctggttcatcagcaacatacagcagctgctgggtttcgacgggatgccgacgagcctcgcgctggggatggcgttcccgagggaaggccccgccgcgcgttccgtcgccgacgcgcttatgccccccgtcaacggcttggtcctgcccttctacttcgctaccatcgggatgaggctcgactacaactccatgtccggcgccatcatcgtgcccggcctgctactgacgctgctcggcctggtggcgaaggccatcggcgccacggccgcctccacgtacctcaacatcccaatctccgacgcgctccgctacagcgtactgctcaacgtcaagggccacgtcgacaccatgaacatgaagttcgccaaatcggaaggggtgtgggcggagcaggcgctgtacgcgatgatcatcggcaaccttatcagcaccatcatcgccgggccggccgccgccgcggttctgagcagggaaaaggaagagtacaagacaaggcaccaagccatggaatcgttgagcgcagagaaagagctgcgcatgctcgtctgcgcccacagcgcgcacgccgcgcccggcgtcctcagcctagtcgagctcctggtgatcacgccccacgagcagccggccgtgccagtcctccatttcttcgaggccccccgagaccgatccgcccggacgccgtaccaccagcggacgcggggtgacgaaggcgccgaggacaaaggcggccccgatcccgttacgcagatgaacatggtggtcgacgtgttctccaagacgacgggcatctccttccgccagatcgacgtggtgagcctcggcgcgtctcgggacgcggccgtcgcctgccgtggcgcggaggaagcgcacgccagcctgctactcctcccctgctacaaggagcagcggttcgacggcaagatggcgtgccgcctcgaggagcggtggaagctgaaccacgacgtgctggagcgggcgccctgcaccgtggggctcctcgtggaccgcccgtaccgtggcggcggcactagcttccaaacgcccatcgacatcgccccggagaccgggaggacgctggtgcatccgtgcagcgaccgtacggtgacccacgtgatagcggccgtgttcctgggcgggcccgacgaccgcgaggcggtgtccttcgcgtgccggcttgcggagcacccggccatcgggctgacggtgttccgtttcgtgaagcgcagcacgtacgacaccgtgacgtcctccacctcacgcgccgccgcggcggtggcggccggcggcgacgagcttgacgtgccgttcaaggaaggccacgtggacgagcggttcctgtggcggttctacgagaactacgcgtcacgagagctggccatgtacgtggagaaggtggtggagagccccgcggacgtggtagagacgctagaagggatgtccggaatgttctcgctggtggtgctggggcggggcggtcggcagccggtggagctgatggccgggctggagcggtggtcggaggccggcagcgaaatagggcctgtgggagagatcctggcgtcccacgagtcgctagagatgggctccgtgctcgtcatgcagcagcacacggtggcgctctcgccgccatgccaatga

SEQ ID NO: 120888 - DNA, 582 bp, Zea Mays
acttcgacatcacgtgggtggagcagacttggtgggcggacaactatgactgtgttgtcgtctagcacgagcacccctcgcgcgacgtcgactatgacgatgaagattcggctgcgcccgtaaccccatgccaatccaaggacgacgagcaccaacggcaccaggcgagcggggactaggggacgactgtaggcctccccctctttctcgcctccactcacccgccaccaccccaacgacgagggagtgagagatcggcagcatctcagggcctggcagggcagctgcattgcgctgtggtggccatggctgatccatacgatgaggatatgggatcatcgctaaagagccaacagtcacaccctggcctccgccacaagcccgccattgagatatttagttatcatgtctccatgcttattttgattatacactaccttggttaattttcaatcatctccatgggtacattttttcttagttgcttaaactagcactatttcgcacaaattgtactagtacaagatttgatgtaaaattctaggcaaaaatgtatactgcaagggtggcattagtggtgaa

SEQ ID NO: 120889 - DNA, 78 bp, Zea Mays
attggttctcctaccactgatctagaccttcttgaaagtattgctgacaaggccttgaaggaagattcaattttcatt

SEQ ID NO: 120890 - DNA, 856 bp, Zea Mays
aacggtcgggattctccagatcctagtataaagtaaccatcacgtcgtccgcgcaaaaccctcccggctcagacttctgctgcagcgcctccgccgccgccgccgcatctaacgcagttccctccgccgcagcccgaggcaagatggttctccagaacgacattgatctgctcaacccgccggcagaactcgagaagctcaagcacaagaaaaagagactcgtccagtcgcccaactccttcttcatggatgttaagtgccaggggtgcttcagcatgtaagtttttctgcccctcattagattctattcaaggtttagattatttagttctcgccaattgttgattgattgtgggttaccattgaacccccttccctggtgcttatgttttgcttaaaccgaggttcttttgaactgaaatatctttcctattagtaaatactgtattaattgtagccagtaggtatattactgatacatttgggacaaagaaactagccagttagtaagctattgttagatgtttgctatttatttgttgcatgataatatgaagttatgttgtttgaccttcaaaatgagtatgtgtaatttttttacagtttttaacttatggttactgtacagtagaaactttctacaattttaatgcattgagtagagtttgagaacatgtttataaatttcacttgtctttgctcagaagctgttaattgtccctgctccaattccacataagattgtttttcttggtcgactacaattttaaactgacatagcaagttgtagaagacaaataaaagaagctattttttgttaagttgtacattattgttgaatggatattattgaatt

SEQ ID NO: 120891 - DNA, 898 bp, Zea Mays
aacggtcgggattctccagatcctagtataaagtaaccatcacgtcgtccgcgcaaaaccctcccggctcagacttctgctgcagcgcctccgccgccgccgccgcatctaacgcagttccctccgccgcagcccgaggcaagatggttctccagaacgacattgatctgctcaacccgccggcagaactcgagaagctcaagcacaagaaaaagagactcgtccagtcgcccaactccttcttcatggatgttaagtgccaggggtgcttcagcataaccactgttttcagccactcccagactgttgttgtgtgccctggctgccaaactgtcctctgccaacccacaggaggaaaggcaaggctcactgagggctgctctttccgcaggaagggagactagagcggatgtggtcttcaagttttgctctatgccagatactagcgtcatgaactgcctttagctaagattttccataagttgttctcgagcagctatgtgttgcatgttggctacttccaaacttatatctggtttggtttggattgtgatgaactaatggctctttgaatttatattatgatgttgacgatatttggtgacatctggtttcttggtagtcattgtcctttatcctttggtttgagggttaatccagagaacacttcgtacatttctgttggctgagatattagctgtttacgttcttagggggtgtttggttgcttctgctaaagtttagcccgggtcacatcaagcgtttgacttttaaatagagtatgaaatatagacccaaccaactagactagattcgtctcgtcttttaatctttggctgataaattagttttataatccgactacatttaatacccggaacggaggttcaaacattcg

SEQ ID NO: 120892 - DNA, 1234 bp, Zea Mays
actagttaaggtaggatttagagttttggaaaactgtttataaatttcctcatctttggtcaggagctgatagttgtcctgtcgaattccagcaacatttgattttttcttggtcactaacaatttgattaaaatttactttgttagttgtcgtaggtaactggagaaacactcaatagattattatcacaatgatcgctttctcttcgtggactgatgtctttccatttggtatttctgaagtgtcaatgaattttccgcgcattgtgcattgtggaacgtatagttcaaggactttcgggaaaatggatggtttggtagtgttaaactgaattccagagtaatctatcatccgtcaatacaaaactacaaacaggacctaagtttggattagcatgttaaaatatattggtaccatcaaaacttaataatgatcaccaatttgctgtgtctttaggtcccaaataaccaggatgttgtcataaatttaagcatcataagcttatattgtttatttcattgtgttatagttatactcattgttttatcaagttctcctatgccttctggtggaaaggtagtgtaatggattaattaatgtttttttttgcagaaccactgttttcagccactcccagactgttgttgtgtgccctggctgccaaactgtcctctgccaacccacaggaggaaaggcaaggctcactgagggctgctctttccgcaggaagggagactagagcggatgtggtcttcaagttttgctctatgccagatactagcgtcatgaactgcctttagctaagattttccataagttgttctcgagcagctatgtgttgcatgttggctacttccaaacttatatctggtttggtttggattgtgatgaactaatggctctttgaatttatattatgatgttgacgatatttggtgacatctggtttcttggtagtcattgtcctttatcctttggtttgagggttaatccagagaacacttcgtacatttctgttggctgagatattagctgtttacgttcttagggggtgtttggttgcttctgctaaagtttagcccgggtcacatcaagcgtttgacttttaaatagagtatgaaatatagacccaaccaactagactagattcgtctcgtcttttaatctttggctgataaattagttttataatccgactacatttaatacccggaacggaggttcaaacattcg

SEQ ID NO: 120893 - DNA, 478 bp, Zea Mays
cttgcaggtcgagtgagatatggcgtcggagatgaacaagaacgtgaaggccctcgacgagcaggaggtctccttgcagcactcgcgcgcccagaccagcgacgtcgccgaggagcaacagcagcagcagcaggcggtggatccgctggcgcggcagtcgtccatcatgtcgctgacgctggaggagctgcagaactcgttgtgcgagccgggccgcaacttcgggtccatgaacatggacgagttcatggccaacatatggaacgccgaggagttccaggccgccacggccggctggaacaaggagggcgtgtatcgggagccggtgctcgtggcgacgacgatgggcacaggtgagaacggaggaggagggaggggactggttcggcaggggtcgttcgtgctgtcgtcgccgctgtcccggaagacggcggaggaggtctcagccgagatcagccagggcccagcggacttctag

SEQ ID NO: 120894 - DNA, 690 bp, Zea Mays
acatccacacttcctattctctaccaaacgtagttgcctgagttcatcatggactatttgagagagttcgtgtactctttgtcttccgacaattccaaagatgagctcgacaacgtgttcgttttgcaagccgttgagcaacttggcattggaggttcgagcaggcgacgtagacatactttcttgcctcggcgagtaaatcatagggccacagtgatagcgaaaatctcatcaatcaccattactttgaaccaaatcttgtgtatctcatccaagtttttcgtccaaggtacatttcataattattagttttaattttatttagaagttcctttcgttcttacattttccctattcattaaaggttcggatgcatggaccgttgttcatgtgtatccttcaggccatgcagcatgaagacgagtttttcactgtttggtgtgatgctacgaggttagcggtttttggtccgttgcaaaaagtatgtgctgttttgcgtgtcctcgcttacagggtagactacggttagggactgtctcatccgtttctaccgtgcaattatctcctgctttagctaacggtacctccgtatccctaacaacgaccatgtagctcgcttacttcgtgtcaacgccgacatgagttttccgagcatatgctagcctcaattaatgcaactgtcgtactgta

SEQ ID NO: 120895 - DNA, 3280 bp, Zea Mays
cagataacggttgcgacgtggatgagttgaactccaaacgactctgaggggtggacagagctcaaaaatggttttatgaagcttcaacatgaaacctctgatgccgaggtgctggtctcggcagcatcaaggaacctgtcgtcctcttcatcagcatttgtttcagcaaaccagtcccctttcttcacgccacggtcactgtctgcccgtgtcccagagcacactgaccctgagaacaattgctcctccaatggtattgtgctgaaaatcagtgatatactctctggtgattccttcacaccacaggaggagttaccatcagctagcgttggggtcttgccgtcagatgtgtctcctcctattagcctgtgcacttcaagcaactttggcactccagcaattgtctacaacaatcccagctttgtttctactttcaatggcccatgccaaggcagttcatcagcaaccagcaatggtggtcgttcggctccaaaggaaaagcacaagaggctagggggaatatatcggaaatcatcatcgtgccaaccgacaacgtcgtctgcctctgtcagcaggcttcgcagttacgatgtgtacgttggatttcacggccgcaaggcttcactgctgaggttcacaaactggctccgtgcagaactagagatccatggaatcagctgctttgtttctgacaggtctagatgccgaaattctcgcagccatgatgctgtcgagaggataatgaatgcttccacatatggagttgttatcctcacaaagaagtcattcggcaacccttataccattgaggagctcaggaacttctttggcaagagaaatcttatccctatattttttgatttggatgcagctgattgccttgccagagatatcgtcgagaagcgaggagatttgtgggagaaacatggtggtgagctgtggatgttatatggtgggatggaacacgagtggatggaatcggttgatgctctttcccgggtggtagatgtgcaactagaagcgaatgatggcaactggagagattgcatactccaagcaatcattctcttggccacaaaattaggcagaaggagcgtggttgatagggtgtaccggggaaaagggaggttggagaaggaggaattccctttcgctcgtaacaatgattttgtcggtaggaaaaaagagctttccgaattggaactcattttgtttggtgatgtcatgggagatggagaaagagaatattttgagctcacgacaaagcagaggagaaaaggccttgcagttaggcggtctgctaacaatcatgagcacatgaatactgatgacagcaaaggtaaggagcctgttatttggaaggagactgagaaagatattgagatgcagaggctgggtagtccattgtggcatgggcgtccactgagagtgaagaatggcgtaaggtgtggaaggaaaaaaagatctaggaagatactttatggtaagggtattgcttgcatatcaggggagcctggaattggcaagacagacttggttttggagtatgcatatagattctttcagagatacaagatggttctgtgggtcagaggggaaagccgatatattcgacagaactatttggctctgcggacttttctggaagttgacttaagtgtagatagtcacttgcatgaaaagggaagcgatcgatgctttgaagagcaagaagaggaagccattgccaaaattcgtcaagaattgatgcgtgacataccgttcttagtcataattgataatttggagagtgagaaggattggtgggataagagagtcataatggaccttctgccacactttggtggggagactcacttcatcataacaacacgtcttccacgagtgatgaacttggaaccaatgaagctttcttatttatctggtgctgaggcaatgactttaatgaagggaggtgtcaaggaccatccactggtggaaactgatgcactcaaaatcattgaggaaaagcttggaagattacctcttggcctaagtattgttggagctatactctcggagcttccaatcactccaactaggctacttgacacattgaatcgtacaccgctcatcaggaacttttcatggaatgatagagaagttctcagcttgaaaaatcatgaaatccttgtccgcctgctggatgtgtgcttatcaatatttgaccatgcagatggtcctaggagtctggcaactcggatgtttcaagtatgtggttggtttgcaccctctgcagttccaattcacatgttggctcgtgctgcacacaaagtcccaaagaagcaatggaggggtccaaggtggagaaagtggtggcgaccacttacttgtggccttgcaacttctaggatgaagaaatctgaagctgaagcagctgcaatgttaatgaggtttggaattgccagatgcagtgcaaagcccgaacatgtacagttccatgatctgatcaggctatatgctcgaaagctaggaggcacaagaacagctccggccatggtccagtcagtgtacctccaaggctcaatcaaacattcctctgagcacctgtgggcttcgtgcttcatggtttttggatttggttctgatcctctgttggtagaactgagaccatctgaactaatgttctatgttaaacagattgtcatgccacttgcaatacaaacatttataacatactcccgctgtaatgcagcactagagctgcttcgcctgtgcactgatgcattagagagagcagctgagtccatgcttgctcatgctggcaaatggagagaaacatcattctcctgctttaggcaagctcattcagaagcccagtacacttatctttggcaggagctggctcttctgaaagcttctgtactggaaacaagggccaagctgatgctccggggtggacaatatgacattggagatgacttaataaggaaggccatatttatccgtacttctatctgtggcgagcaccatcctgacactgtttctgctcgagaaactctcagtaaactcacaaggcttcttacaactgttcagcttagttgattcttatagtttaggagttcacaatatattcttttcagtgtgccttttcatgaacgccgtacaaaatgcaccagatcttgaaataacaaagtaaatttgtcttatatatcttgactgccttttgttgcttgatggttctgtctttctatcattcttggttcatcaatgtgcaacattggattgaactactgtattc

SEQ ID NO: 120896 - DNA, 581 bp, Zea Mays
atttgtttagaaataggaattttattctggtagagaaattttgatatcaaaacacttccctttggaccgaggttgtcaaactttgctgccacaaatcttggtgtaagcattcccagatcaaggatttttgtgtatacatttgacattaatggattatgcagtatcagtactacaaatttgccagagttcttctgagttgtactattggaaaggcaaaactctggctgctgcttatttgtcatcaatcatataatgtgcattttgatgtaatcttgataattttgttgttgacaagcattttgctccagcggtcaaatgcgggctgcagctgtgtaatatgacttgtatattcactagctatattatatagatgttatagctgtgactctgggaaagctggattattatcttttggcaggttaatagaggctcaagatggcatgctggcggttaaagcagcaacttaatatgtatcatatcatttctgacatttacactgtgcaatatttaaggtcagcacaattctgtcgagccctggtgactccttataaataactagttgataaaatggtgtacatcaa

SEQ ID NO: 120897 - DNA, 98 bp, Zea Mays
ttttctttgtttttttttttgcgtccagctgagtttcatctcatgtcttgtagtcttgcatgttgttgtagatcttctatgtgtcttttaatatcgac

SEQ ID NO: 120898 - DNA, 903 bp, Zea Mays
tatcgtcccttgaagaacagctcttggagcttaattagaaaccaagtcgagctagctagccatggctatccgtcgtctattcctgtttatttctatgctgttggctatggcatgctcttgtgccatcgcttcagacccgagccttctccaagacttctgtgttgcagacaagacgtctcaagttcgcgtgaatggatttgcctgcaaagatgcgaaggacgtggtggccgaggacttcttcttctcgggccttcacaaggccggcaacaccagcaaccggcagggctccgccgtgacggcagccaacgtggcgcagatcccggggctgaacacgatggggatctccatggtccgcatcgactacgctcccaagggactcaacccgcctcacacgcacccgcgcgccaccgagatgctggccgtgctcgagggatcgctctacgttggcttcgtcacctccaatccgaacaacacgctcgtctccaaggttctcagcaagggcgatgtgttcgtgttccccaagggccttgtccacttccagtacaactatggcacggacagtgctgcggctcttgccgccttgagcagccagaaccctggggtgatcactgttgccaacacagtatttggttccgatccattgatatcagatgatgtccttgccaaggcctttcaggtcgatcagaaggcagttaactggattcaagctcagttctaatttttttttctctggtcgggtgtgcatgtttgattcgatctcgtcttattatatgaactatttttttcctctacttcccctttgtaatgtatctttaagctgttgtaagttcatttacgcttgtcagatgtgttgagaaatgtatcccttgtttgcaaaatgaatgtaatttacttcatggtcga

SEQ ID NO: 120899 - DNA, 1686 bp, Zea Mays
atggccagcacccccacccctcgccacgatgcccgcgcccccattctccccagcggcgtgatgcccggcgctactggacgcccctcgcccgatcgagagctcgaccacggctccactgtcatcttggcctcggctcagcaccccatccacccccacccctccccccaatacccgtcgaggcagcgcacgccccctccccccatgcctctcactgtgcctccgcccttctccaccgctgtggccacacccctgtgcccccgcccccgcgcgcgcatggatccaccccgcccctgttctgtcgactcgagattgccttcgtcctcgccccgtgcctgctctgccttctccgttgcgtctcgcactcgagacgctgccccctccgcgtggacgtcgtcccccgtcgtccttgcgggcgtccctaggactccaactgacagagttaaagcaaagatgaagcttcaccttatagagacagattattatgcatacatgagcacacccatgtcctttactggatctgcgcctgcagtaagtggtggcatttggataggcagtgcaagtgggatcaggatatgtgatgctgagacagttaaagttatgatgaagaatcaacagaattgcagtatgattgggaaactggtttcagaagttggactatgggccaatcaagaggttgaacagagttgtgcatatttagtcgctgctgccatacaccagatgcctagatcttctttaggcccttcgtcggcgaggagtatcacaaggtggccgaggcgagaggctatcggtggcgctggtagtccgcaaggaaccggatttggatgcgctctccctcatcacttgggtgtgcatctgtatacccatgttctttacaaggacctgagatctagaaggacacaacaggcaagaggggcgagggttgttcagtgctttgacatgtgtgcaactattcaagcacaatggttagatgatatccccattcattttagattattacattgtggtgttcgacttcttcagtcaagcagcaatcatgcaacatgccttactgtagtttgtatatttgactgtgaatatttgaacccactgttacaattgttgctaattgaggtcagatttcagaggccaaataattctggtatctgcagagttggaagatacaacatctctgcaaaatataggggtaaggttagggatggcaatgggtacggtgggcagatggttaacgggcatccaccggaagcgcacatctgtcccacgcttcttgcccggtcatcctgcgtcacgcgcaaagtacacatctatatcttcctcgccagggtatcgcctgacaactacatcacgtgcaaagcgcacatctatttcccctccccgcttgtgtcacacaagaagcacacatttgttttcccctcccccgataccgagttaaagctagaagcaaagcttgcaacccaagcctttcctagccacacgaatgagcgcctccagacgaagctcaaagggcggtggggtaaaaaaggaaaatgtctggactccatcctccacatcctgcacgcgggcatcgccgcatgcctcgtggccctcctcgccgatggctccaactcacacggttgcagcgtaccgctcgccgcgcgcgtcatcgccgaggccaaccttttagagtcaatggatccatgcgcgagctag

SEQ ID NO: 120900 - DNA, 117 bp, Zea Mays
gaagaaaagagagtgaatctcctctaaatttagaggagaggtcaggggcgggccctattcaattcaagggtattcaaatgaatacccattatatttttagtgaaagaacttcaatat

SEQ ID NO: 120901 - DNA, 91 bp, Zea Mays
tctgctgcttcgctttctgggagaggaggactcgactcaaatcacttggtagcggagacgtcgccctttctagttcaggtgccagttgcaa

SEQ ID NO: 120902 - DNA, 2150 bp, Zea Mays
ggttgcgctgcttgactcgccccgtgcccgtgttcttgctgcccttttcaggcatatataacattcctctttttacactacatccatccccgcttgattagcggcagccactctctccctctccactcttggtgtccgagtcccttggccgtacgctctgcctcactcctccgtttcttgcttctcctgccgccggcgtcggagagcgagcttctcggcgggcggcggcggcgcgcggcgccgggtgcggatcggccgcgggtgcatggtggaagccgccgccgggcgccggtcaggcaccagccgtcggcggcctagcggcagcggaggggagcaccagcgcctggttgcgctcgccgtcgccgcgcgcgtcgccatggtcagcacccggtctgcgggtccagcagtggcgggaggagatggagcgggagctgctggaacaggcgccggccccgctgccggtagaggacgatgcatggaggacttcttcgactgcctcctcggcttgctcggcgcgttaggcatgacatgggctacggcgcggccccagcggcagccgctcccgccgctgcctcgcggggttggggcggggcctgagccaaccgacgcccggcgtttcgcagcggcgctcagggccacccccggccggatcgctggcaatggcgcctgcgccgtcgcgtcactgtacacgctgcagggcaagaagggcgtcaaccaggatgctatgatcttctgggagaacttctgttctagagatgataccatcttttgtggtgtatttgatggtcatggaccttatggccatttggttgccaagagagtaagagatctcctgcctctaaagttaggagcagatttggggatggaagatggtagagtagcatccactggcaacattaagctcaatacaaatgatgtagcttcatctgaacacatagtcagaggaggtactgccgtttcctctgaagctcagcagaatggagattatccagaggtcttcccagcattgagaacttcattcttgaaggcattccatgtaatggatagggatctcaaattacataaaaatattgattgctttttcagtgggactacagcagtggcagtgatcaagcagggacacaatcttataattggcaatttgggggattcaagagctgtcttaggcaccagagatgaaaataaccagcttgttgctgttcaattgacagttgatctcaaacctgacattccaagtgaatcacagagaatcaggcaacgcaggggcagaatatttgcacttcctgaggagccggaggttgctcgtgtttggcttccaaggtataactcgcctggattggccatggctagggcatttggagacttttgtctgaaggatcatggtgtaatttctgtgcctgatgtttcctatcaccacataacggaaaaggatgaatttgttgtgctggctaccgatggggtttgggacgtgctatcaaatgatgaagttgttaatactgtcagccgagtcacatctcgggcctctgcagcacgatttttagtcgaatcagctcaccgtgcttggcgaactcggttccccacttctaaagtcgatgattgtgctgctgtctgcctattcctgaacacaaatgaagcaagtgaatcttcgagttccttggccaacaatttggcagatgctgtacaagttagcactgctcagtgctccaaaactatccaggtgagcgcacctatagacggaaacgaggtgtctgttgttgaaacgaggtgatttgcacaatgatggttgaggcgcaaagtgagcttgcatgctgtgcctgtgactgagatctgctgaacgatagtagttgaggcagagagagcgggggcatgaacatgctgtgctgtgcctgtgattggcatttgtggagccaagatatagcacgtcggtgggtttctgcttgctatttttttctggacgcaagtgtggttattatatgcgacattagatttttataggagaaacataaattgtagggtacttgaagttttggctttaaacatttatgttaacaagatatctgtatcattctttagcctcgttgctactcacagaaaaggttctagagcttgttgatcacataattttattctgatggtcataatttcattgc

SEQ ID NO: 120903 - DNA, 1065 bp, Zea Mays
atgctggtgctgtatctgctacgcaaatatttgggtgaatatgttgaagggctttctgttgaagctctcagaataagtgtatggaaaggtgacgttgttctaaaagacttaaaacttaaggctgaagccctgaattctctcgggtttccagtgacagtgaaagctgggtttgttggcaccataacattaaaggtcccatggaagtgccttggtaaagaaccagttattgtcctcattgatcgtctatttgttcttgctcatcctgctcctgatggacagactctcaaggaagaagatagacaaaaactttttgaagccaagcttcagcagattgaggctgcggaggcagctactcttgaagcaacaaataggaactcaagaggagggcctgcaccaggtggaaattcatggttatacaatttaatatctacaattattggtaatcttaaagtcaccatcagtaatgtacacataagatatgaagattctgtcagcaattctgggcacccatttgcgtctggtttcacgttatcaaaacttgcagccgttacagtggatgaggatggtaatgaaacatttgatgcaggtgtagccctagataagctacgaaagtctgttgaactgcataggctgggcatctaccatgactcagacagtaatccttggaagcttaataaaaattgggaagctctaaatcgtaccgaatggagtgagatatttcaagatggcattgaagatggctctcaaagttccatctgggcagtaaatcggaactacttggtctcgcctataaatggaacccttaaatataaacgacttgggaagaatgaaagaggggatccagataccccattggagaaagcctcacttgtcctcagtgatgtttctttaactgtaactgaggcacagtattatgatggcattaaactgttggaagcattttcgaggtttagaacacgtgttgatgtgtctcatttacggcctgttgtgcctgtaaaggaggatcgtcgtgcttggtggcgttatgctgtgctggctggtctgcgacaaaggaaactatggtaa

SEQ ID NO: 120904 - DNA, 657 bp, Zea Mays
atggcattggatggctgtatacctgcaaaactgtacacaatcaatattgcatttgttaattggaacacgactggtttaccttctgaggaagctacacacccagaatcacagttagatgaagaggaacaactgactaaagaagagtggcaggctattaataagctgttgagttaccaaccagatgaagatatgtcttttccccttgagaaggtttccccaaatgtgattcaatttatgatggatgtatccattggccaggctggtgcaaggatcatcaatattgatggaactgaggttttatgtggtagatttcatcagcttcaggttgtcactaagttgtatccgaagagcacatgttgtgatgtgacattgaaatattgtggtctatcatctccagaaggttctcttgctcagagtgtcgttagcgagggaaagagtcatgctcttgatgttagttttgtacgagcaccaattggtatggaccttgattggcagctcattgcgaagatatcaccatgccatgttacgctactagcaaaattcaacttgatgactacctgccaggttcagacagctgccttgacttaccaaggaaataagacagctgatgttgcctacttactagaaagggaaactgacctatatgtcacccattag

SEQ ID NO: 120905 - DNA, 1443 bp, Zea Mays
atggaaacagcaactgctctacagctgaagctggagaaggtcacacgtagggctcaggagcagcttcagctggtgttagaagaacaaagcagatttggacttgatattgatctggatgcaccaaaagttaggattcctttgaatgctaatcaacctttgctgggcaatgagtactttgttcttgattttggccattttacattgcatacaagagatggtaagcatgatgaagaaagacagagtctgtattcaggcttttatattactgggagggatatggctgctttccttatttgtgatttagctcagaacatatactcaatacctgaaaatttagatcaagataccctcctaggtcatacctttgatgataatcagttctgttctcttcttgatcgctgtggaatgtcagtgataattgagcagatcaaagttccacatccgaattatccatcaactcgtgttgcttttcaagtacccaatctggacattcacttttcaccaaaaaggtactgcaagatagttgaactgcttggtgtgcttctccatatgaagggaaacaataatgaatattcaaataaccatgaaagtggtagcttggcgccttggtatcctgctgatctagctggcgatgctagaacattggtttggaggggcattggttattcgcaagctgaatggcatacttgctatgttgtattatctgggatgtatctatatattttggagtcagaattctccgcgaattaccaaagcatggctagtcgccaagtatttgaagtgccaccaactagtgttggtggatctccttacagtattggtgtgtgttctagaggtggagacacgcataaggcactagaactgaccagcacactggtaattgaatttcgtaatgaaatcgagaaggctatgtggatgaaagcacttgtccaggcaacataccgagcttctgctcctcctgacgtgaacatattaggagatcctgttagccctcccccagaatcaagtacaccacggcttaatagcttgggattagtggatcttgttgtgaatggctctgttattgaaactaaactttcactgtatgggaagctggacagaaagagcagtgattcgcaagagcttctaatgctagagctccttgggaatggagggaaggagaggttggtgcatgtttgtaggcatagccagaggcccacaacaggggaggtgggtggagttgctagggtccaggagcagggattcagggaagatgcgggtggagcagaggaaggaaatgcggacgctagcgaggagacatgtgctgaggcacaagatgcgttagcgagggatagcggagaggtgactgaagcgggagaaatggagaacgaaaaaagacgcgcgcttgatgaaaatggcgaagactgctcatccgctcctcttcactgcttacatatatactag

SEQ ID NO: 120906 - DNA, 1134 bp, Zea Mays
atggcggaagctatggaaggaatgagttgggtcagagacttgagaggtttagtttctcaggagattatttctgatgtcctacaactttgtgatgccatctccgattggtttcaattcgctggtgatccttggagcttgggctatttgggacaccgcaacgactgcatcttcaaggggatcgctcctaatttgtctagcgtgttaggtttggccgaggacgacctcagtctttggtgtatggctggggccaagggcctttccatgatgtttcggctttcactccagcagggcattgagtgtgggtgtgacggtgtgtatggggttttgtatgttaatgttgttcaatcttctcgtggtcttagtgtgaaaacaaaattgcattcattgaaaataatggatgagctacaaggtcgtctttcaatgacttcaaagtatttagtgtgctctgtcatcaatgaaagtgttggagctacctcttccgatacacttgataagggcggcgacctaagcatctttcctgtggatgaggatcctttcatggatgcattaacagattttactccagatcaaaattctaatccagatgactgtcaaattcccaacttcatttctgatgcaaatgagtacaatgaaataggttcaaaagatggttcatgctttgatggggatgaacagaacgcaaaacctactgaaatattttatgaggcacaagatagtaatgtggcagattttgttgttctgacattcttgagcaggagtcctgattcttgtctttatgatggtatagattcacagatgagtattcgtatgtccgcactggaattctactgtaacagacccacacttgttgctctaattgagtttggatttgatcttagcacggttaattctgtgccgaaatgtagtcttgatgtggcacctgcaattgaaactgtgaaacccacagggaaggaagaaggtgctcctactattgtaaaaggattgttaggttatgggaaacgtcgaacaattttcaacatcaaaatggatgtggatagggtatcaatgtttctcaataaggaagatggttctcagcttgcaatgtttgtgcaagagaaatttctgtttgatttgaaggtgagatatttgcaatga

SEQ ID NO: 120907 - DNA, 444 bp, Zea Mays
atgtggttgatggatttctgcgcctggtcgcagaagggacatgctggctggtgggccagtttttctgagtatgcacttcaattggttggtaacttgcttcagacactagaatgtttgggattcacattccagtcgtacagtatcgatgatgaagattttgaaggtcataattacagcttgactggtcagctttctgctgttcgtattgtctttctctaccgttttatccaagagtttacttcttactttatggagcttggcacccctcatactgaagaggcaattaagtttattgataaagttggaggttttgagtggttaattcagaaatatgaaatggatggagcttctgctataaagctggatctttcccttgagacacccataatcattgttcctaagaattctcagagcgaagagtatgtctatgtttccagctattag

SEQ ID NO: 120908 - DNA, 8637 bp, Zea Mays
tcttcctgcagttatatacagtttgatcttggtcaattgaaagtaaggaatgagtttagttggcatggaggtaaagagactgacccttctgctgtaaggcttgatgttctccatgcagaaataaatggaatcaacatggcggttggggtaaatggaactctgggaaagtgtatgattcgtgatggtcgcggcatcaatatagaggtgcgacgtagcctacgggatgtcttcaaaaaggtcccgatactgtctatgaaatttcagataggattgcttcatggtgtcatgtcagataaagaatacaatgtcgcgataagctgtatttcgacaaatctgtccgatacacctaaccttcccccaagttttcgtgaaaatatgaacaggacaaaggagtcaattcgtttacttgcagataaagtcaaccttagcaaccatttgttgctttcacgtaccgttgttgtcatgaccgtggaaattcagtatgcgttgcttgaacttcgcaatggcccagatgcagagtcacctctggcagagcttgctgtggaaggtctatgggtatcctatagaacaacttcaatgcttgaaatggatctatatttgtcaatattgaaattttcaatacatgatatccgtccagatacgaagtctgagatgcgtctgatgcttggatcttgttcagagactgctaatctgtgcgttgatgactcttcaactgatgcaggggtttcgaacctcacaatgctgatactggattatcgttcgcgttcttcttttcaatcatttgttataagaatacagcagcctcgtatacttgttgtcctggattttctgcttcctgttgttgagtattttgtgccttctttaggctcgataactggcagagaggaaagcttagacccgaagaatgatcctcttatgagggctgatgatattatacttactgagcatgttttcttgcaaaaagaggattttattcaactatctcctgtaaggcagctaatagttgatggttgtgatattgacgagttcatttatgatggctgtgggggcactgtatccttatgtgaggaatttgataagaaaggacaggtatactctgggattataatcataattggttgtggcaaaagacttcgattcaaaaatgtcaaaattgagaatggtgcactgcttagaagatgtgtatacttgaacatgggaagcagttactcaatttcttctgaagatgatgtagaggtttctgtgttagaaagttctttcacgaatgatgaagactgtttaaaccttgaagaacataaaaagagaaatctgcagaatgccattgatggtcccacaaaccaaatactgaactttacatttgaggctcaggttgtatctccagaatttacattctatgacagttcaaagttatcaatggatgattcgttgcacattgagaagcttcttcgggccaagatggatttcagtttcatgtatgcttcaaaagaaaaagatatatgggctcgatctgtcattaaagaccttacaattgaagctggttctggtcttcttgttcttgaacctgtagatgtttcatggaaatatacttcagtcaatgaaaagacaaacatagtgttggtgtcgacagatgtttgcatccatctttctctgagtgttgcttctcttatgcttaaactgcaaaaccaaactcttgcagcattgcagtttggtaatattagcccactaatttcttgcacaaactttaagcgaatttggagctcaccaaaaggtgacctacctggttacaacctaacgttctggcggccacaagctccctccaattatgtcatattgggtgattgtgtgtcctcaaggtctgtgccaccttctcaggttgtggttgctataagtaatacttatggtcgtgtacgaaaacctcttggatttaggctaattcatgtattacctggttctctggatctcattgattcctgtcaatcaactgaagaaaacgaatgttctatctggattcctgtaccaccacctggatatttagctctaggaataatctctgaatttagcatctggcgtgtggacaatgtgattgcttcattctgtgcacataattctatagagcaacccactaaaacagaagctcttaatttgcaccatgttctcctccggaatccaaattgctatattgttaaagatctaagtgcagattcatctatccagaatgaccaatcttctgatcaattaaatcaccgcaagagtctttctggatgggatgtacttcgcactttgtcaagaccaagtaactattgtatgtctactccccattttgaaaggatatggtgggataaaggaaacgataccaagaagccattttctatatggagaccgttacctcgttttggttttgcttcggttggtgactgtataactgaagggtttgaaccacccactcttggcattcttttcaagtgtgacacagttgtttctgagaagcctgtacagtttactaaagtgacacaaattgacagaaaaggccttgaggaaatattcttctggtatccagtgccacctcccggttacgcttctcttggatgtatcgtaacaaaaacagatgaaatgccaagcaaggattccatttgctgccctaaactgagtctagtgagccaagcgaatatgtcagaggatcctatctccatgtcttctagctcaaaaggtccttgctgctggagcatctggaaagttgaaaatcagggctgtactttcctggccagaccagatgtcaagaagccctcagctcaactggcataccgtattgctgaccatgcgaagccgaaggcacgtgaaaacattactgctgagctgaagctgggttgtttgtcggttggcattcttgacagctcttgtggaatggtcacaccactttttgacacaacaatcgctaatataaatcttgcaacacatggaagatttgagacattgaatgctgtattgatctgttcaattgctgcatccacattcaatagacacttggaggcatgggaaccctttgttgagccatttgatggaatattcaagtttgaaacatatgataccagtgaacaccctccttccaaagttggtaagaggattcgtgttgctgcaacaagtcctctaaatgctaacctgagctctgcaaatcttgagctgcttatagaaacgttagtttcatggagaagacagattgatcttgaaaataaatcgtcaacaaaaagcgagggtaccattgaaaacatgaaaaaagctgatgattcttcgtactctgcattgaatgaagatgatttccagagagtggtttttgagaataaattaggatgtgatgtttatcttaaaaaaaaaatggaagatagtgaaatcactattgagcttttacagcatgagagcaaagtttcgttgttgcttccgcctcccaggttttcagataaactaaatgtgttatccaattcaacagaatcaagatactatgttgttgtacagatctttgagtctaagggcttgcctatcatagatgacggcaatggtcacagctacttctgtgctttacgcttacttattggaagccatgcttctgatcagcacaaagtgttcccacagagtgccaggacgagatgtgtaaaacctgtggaaactactgagttactgacccactgtgccaagtggaatgaacattttatatttgaagttccagaacaggcatcagctaatttagagattgaagtaacaaatcttgcatcaaaagctgggaaaggtgaagtaattggttctctgtctatgcctattggacgaggagcaaccatgttgaaacgagctccttctatgaggatgattcagcatgtttctgatgtcaaacgggtgctaacatgtcctcttacaaagaagggtcagatacctaattttgaggacaggaaaaaaggtggtgttttagtactctcaagctgttatgtggaacgttctactcattcatatttccagaggttgaaagacagtataaacaatgtggagagcgacttctgtataggacttagcccagatggtccatgggaaagttttactgcagctttgccagtgaccgtccttccaaaatcgcttaataataaccgttttgcatttgaggtcactatgaggaatggaaagaaacatgcaaccttgagaggtcttgcagttattgccaatgatgctgacataaaacttgaagtgtctatatgtcctgtaaacatgcttgataactctatgttaaatactagattggcaagctccaccagtgttattgatgaagtatttgaaaatcagtggtaccgaccaattgcagggtggggacataacccttcaattggtcacagaaaagacttaaagcagtggagcacaaaggactgctcatactcatctaaggcattttttgagcctggccttccatctggttggaggtggacctcaccgtggaaaattgaaaggttgaattttgtagataatgatggatgggcatatgctgcagattttcaaaacttgaattggccatcatcatcctggagatcttctaaatcaccacacgacttcgtgagaagaaggcgttgggtacgttctagacagcagtcgcaagaacaaagtgcagaaattcctagaaaagtacttgctactgtcagtcctcattcatctactgcgttgccttggacatcgatgattagggatatggatttatgcttgcaagttcgcccatattctgaaaaatcagaggaatcatatagctggagccagatttgttcactaggttctgagagtatacctaaacagcagcactcttcactttctaggcaaagcaccgtaaagcagtcagtggtatcatcaaggaattctgttcttaagcttgctgaactcgagaaaaaagatgtgctctcatattgccatcctcctgttagcactgaaagatatttctggtttagtgttggaattgatgcttctgttgttcatacagatttgaatgtacctgtctatgactggagaatttctttcaattcaattcttagacttgaaaataaacttccctatgaagctgagtatgctatatgggagatttccactaaaagtaatatggttgaaaagcagcatggtattgtcccttcgggtggaagtgtatttatctattcagcagatatacggaaaccaatttatcttacattgtttctccaaaacggttggattctagaaaaggatgctgtattgataatggacttgttgtccttggaacatgtttcttcgttctggatggttcagaagcagagccagaggagactacgagttagtgttgagcatgacctaggtgctagtgatgctgcaccaaagacactgagattgtttgtcccttactggataaaaaaccactcgtcaattccattatgttatcgcatagtagaaggggaatccacagaaagcacagaagcagactcacttagcagaccagactcgctaagtagagtgtctaagtcttcaaaattttcccttaaatattcttcaaagtctcttgtcagaagaggaacaatgtcgcacagaaatatgcaagtactggaagatattgaagattgtagcacagactatgtgatgctatcaccacaagattacttgaaccgatctgctggtatgcgctctgagtcaagggataacaatttcagtccagctcgagttgcaatatctatggctgttggtggttgcacacagtacagcgtaggagtatcgctttttgagcttgagaacaaggagcatgttgatatcaaaacatttgcttctgatgggtcatattactggttctcagttcaattgaagatggcttcagataggacaaaggtggtaaatttactgccgagagcacttcttatcaatagaattggaagaactatttttctatctgaatatcatgatgagactgaagagcccttacaaccatatgaacctccaaaagtatttcaatggcgatcagaatttggaagtgaacttttaaagttgaggttggagggataccaatggagtacaccttttagtatcaatgctaatggagttatgtgtgtgctcatgaacagcacaacaggaaatgatcaggcttttgtcagggtaaatgtgagaagtggaacaaaaagttcacggcatgaagttgtatttcagcttgattgctggtccagcccatacagggtggagaatcgctccatgttcttgcctatacggtttcggcagtttggtggtgatgatcattcatggcgtaatctgcttccgaattcatcagcttccttctttttggaggacctgagcagaaggcatctattggaagttttggttgatggaactgaccctatgaactccatgacatatgacatcaatgtcgtaatggatcatcagccccttactaattcagatgcccttaagaaggccttacgtgtcactgtcttgaaggaggggaaattgaatgttattcaaattattgattggctgccagataatagaaatcgaggacagataactgaaaggatgttatcaccaatctttcagccatcagaggtcgactatgggcagtcatctcctgatctggatagtgaatttcatgttactttggaactaacggagcttggcatttctgtaattgaccatatgcctgaggaagttctttacctctcagtgcagcaactgttacttgcatactcatctggaattggctctggagtaaatcggctcaaaatgcggatgcattggattcaagttgataatcaattaccatttgttcctatgcctgtacttttctgtcctcaaaagattgaaaatcagtcagactatattttcaagttctctatgacagttcagaccaacaattctcttgatttttgtgtctatccttatgtcggtgtccaggttcctgagaattgtgtgttctttgttaacatccatgaaccaatcatttggcgcctccatgagatgattcaacacctaaaattcgataggatatatagcaatcaaccttcagctgtttcagtggaccccatactgaaaattgggcttctgaacatctccgagatccgatttagagtgtcaatggcaatgtccccaagccaaaggccaaggggagtatttgggttctggtcgtcgttgatgactgcattgggaaacatggagcatatgccggtccgtatagctcaaagataccgggaggaattgtgcatgcggcaaagtgcacttatgaactctgctatatctaacattcaaaaggatcttcttagccaacctcttcagctactttccggtgttgatattcttggtaatgcgagtagcgctctgagtaacatgagcaaggggatagctgcattgtctatggacaagaaattcattcagggccggatgagacaggatagcaaaggtgtggaagactttggggatgtcataagagatggaggtggtgctcttgcaaaaggcatcttcagaggtgtcacaggcatattgacaaagcccatcgagggtgcaaaatcttctggtgttgaaggttttgtgcaaggagttggaaagggtataattggcgcagctgcacaaccagttagcggagttcttgatcttttatcaaaaactactgaaggtgccaatgcggtaaaaatgaaaatatcatcagcgataatggctgaggagcagttgctgcgtaggcgtcttcctcgagctattggtgggaatagtttgctctatccttatgacggacacaaagctactggccaggctatcttgcatctagctgaatgtgctacattccttggtcaaattgatatttttaaaatccgaggaaagtttgcttctaccgatgcttatgaggatcattttttacttcctaaggggaagatttttttaatcactcacagaagagtactattgcttcagttaccaatgatgacccagcgtaagttcaatcctacgaaggatccttgttcagtaatatgggatgtattatgggatgatttggtaacagtggagatgacccatgggaaaaaagatcctccagattcctggccttctaagcttattttatacttgaaagctaaaccttcaaattcgaaggaaattgttcgtttggtcaagtgtaatcgaggttcagatcaagcatctatcatttactcggcaattgacaaagcttataaagcttacggtccaaactcgttgaaggaattcttgagatggaaggtaccaaggccatatgcccctcgcaatagtagtggccgaagtatccaagacttatcatttggttaaaaggtcaacacaaatgcacactttagtgttaaacacagtagaatcttaggatgaaggtaagcgcacttaagtacagcacttaagtactgtgtaattttgtttcacaaaagaaaaaaataatagcattttacatggctgcgctgaattgcagtttatatttgttttgcaggtattttaggttgacacttttggttaccaggcaaatgatatattctacatatacactataggtatcagaggataggtactttgccttcatgtaaatagatatattttaggaggcgccggtattcatgtaaatgtgaacatctctgttataaagaaaaaaaataataatgcaaatta

SEQ ID NO: 120909 - DNA, 8629 bp, Zea Mays
tcttcctgcagttatatacagtttgatcttggtcaattgaaagtaaggaatgagtttagttggcatggaggtaaagagactgacccttctgctgtaaggcttgatgttctccatgcagaaataaatggaatcaacatggcggttggggtaaatggaactctgggaaagtgtatgattcgtgatggtcgcggcatcaatatagaggtgcgacgtagcctacgggatgtcttcaaaaaggtcccgatactgtctatgaaatttcagataggattgcttcatggtgtcatgtcagataaagaatacaatgtcgcgataagctgtatttcgacaaatctgtccgatacacctaaccttcccccaagttttcgtgaaaatatgaacaggacaaaggagtcaattcgtttacttgcagataaagtcaaccttagcaaccatttgttgctttcacgtaccgttgttgtcatgaccgtggaaattcagtatgcgttgcttgaacttcgcaatggcccagatgcagagtcacctctggcagagcttgctgtggaaggtctatgggtatcctatagaacaacttcaatgcttgaaatggatctatatttgtcaatattgaaattttcaatacatgatatccgtccagatacgaagtctgagatgcgtctgatgcttggatcttgttcagagactgctaatctgtgcgttgatgactcttcaactgatgcaggggtttcgaacctcacaatgctgatactggattatcgttcgcgttcttcttttcaatcatttgttataagaatacagcagcctcgtatacttgttgtcctggattttctgcttcctgttgttgagtattttgtgccttctttaggctcgataactggcagagaggaaagcttagacccgaagaatgatcctcttatgagggctgatgatattatacttactgagcatgttttcttgcaaaaagaggattttattcaactatctcctgtaaggcagctaatagttgatggttgtgatattgacgagttcatttatgatggctgtgggggcactgtatccttatgtgaggaatttgataagaaaggacaggtatactctgggattataatcataattggttgtggcaaaagacttcgattcaaaaatgtcaaaattgagaatggtgcactgcttagaagatgtgtatacttgaacatgggaagcagttactcaatttcttctgaagatgatgtagaggtttctgtgttagaaagttctttcacgaatgatgaagactgtttaaaccttgaagaacataaaaagagaaatctgcagaatgccattgatggtcccacaaaccaaatactgaactttacatttgaggctcaggttgtatctccagaatttacattctatgacagttcaaagttatcaatggatgattcgttgcacattgagaagcttcttcgggccaagatggatttcagtttcatgtatgcttcaaaagaaaaagatatatgggctcgatctgtcattaaagaccttacaattgaagctggttctggtcttcttgttcttgaacctgtagatgtttcatggaaatatacttcagtcaatgaaaagacaaacatagtgttggtgtcgacagatgtttgcatccatctttctctgagtgttgcttctcttatgcttaaactgcaaaaccaaactcttgcagcattgcagtttggtaatattagcccactaatttcttgcacaaactttaagcgaatttggagctcaccaaaaggtgacctacctggttacaacctaacgttctggcggccacaagctccctccaattatgtcatattgggtgattgtgtgtcctcaaggtctgtgccaccttctcaggttgtggttgctataagtaatacttatggtcgtgtacgaaaacctcttggatttaggctaattcatgtattacctggttctctggatctcattgattcctgtcaatcaactgaagaaaacgaatgttctatctggattcctgtaccaccacctggatatttagctctaggaataatctctgaatttagcatctggcgtgtggacaatgtgattgcttcattctgtgcacataattctatagagcaacccactaaaacagaagctcttaatttgcaccatgttctcctccggaatccaaattgctatattgttaaagatctaagtgcagattcatctatccagaatgaccaatcttctgatcaattaaatcaccgcaagagtctttctggatgggatgtacttcgcactttgtcaagaccaagtaactattgtatgtctactccccattttgaaaggatatggtgggataaaggaaacgataccaagaagccattttctatatggagaccgttacctcgttttggttttgcttcggttggtgactgtataactgaagggtttgaaccacccactcttggcattcttttcaagtgtgacacagttgtttctgagaagcctgtacagtttactaaagtgacacaaattgacagaaaaggccttgaggaaatattcttctggtatccagtgccacctcccggttacgcttctcttggatgtatcgtaacaaaaacagatgaaatgccaagcaaggattccatttgctgccctaaactgagtctagtgagccaagcgaatatgtcagaggatcctatctccatgtcttctagctcaaaaggtccttgctgctggagcatctggaaagttgaaaatcagggctgtactttcctggccagaccagatgtcaagaagccctcagctcaactggcataccgtattgctgaccatgcgaagccgaaggcacgtgaaaacattactgctgagctgaagctgggttgtttgtcggttggcattcttgacagctcttgtggaatggtcacaccactttttgacacaacaatcgctaatataaatcttgcaacacatggaagatttgagacattgaatgctgtattgatctgttcaattgctgcatccacattcaatagacacttggaggcatgggaaccctttgttgagccatttgatggaatattcaagtttgaaacatatgataccagtgaacaccctccttccaaagttggtaagaggattcgtgttgctgcaacaagtcctctaaatgctaacctgagctctgcaaatcttgagctgcttatagaaacgttagtttcatggagaagacagattgatcttgaaaataaatcgtcaacaaaaagcgagggtaccattgaaaacatgaaaaaagctgatgattcttcgtactctgcattgaatgaagatgatttccagagagtggtttttgagaataaattaggatgtgatgtttatcttaaaaaaaaaatggaagatagtgaaatcactattgagcttttacagcatgagagcaaagtttcgttgttgcttccgcctcccaggttttcagataaactaaatgtgttatccaattcaacagaatcaagatactatgttgttgtacagatctttgagtctaagggcttgcctatcatagatgacggcaatggtcacagctacttctgtgctttacgcttacttattggaagccatgcttctgatcagcacaaagtgttcccacagagtgccaggacgagatgtgtaaaacctgtggaaactactgagttactgacccactgtgccaagtggaatgaacattttatatttgaagttccagaacaggcatcagctaatttagagattgaagtaacaaatcttgcatcaaaagctgggaaaggtgaagtaattggttctctgtctatgcctattggacgaggagcaaccatgttgaaacgagctccttctatgaggatgattcagcatgtttctgatgtcaaacgggtgctaacatgtcctcttacaaagaagggtcagatacctaattttgaggacaggaaaaaaggtggtgttttagtactctcaagctgttatgtggaacgttctactcattcatatttccagaggttgaaagacagtataaacaatgtggagagcgacttctgtataggacttagcccagatggtccatgggaaagttttactgcagctttgccagtgaccgtccttccaaaatcgcttaataataaccgttttgcatttgaggtcactatgaggaatggaaagaaacatgcaaccttgagaggtcttgcagttattgccaatgatgctgacataaaacttgaagtgtctatatgtcctgtaaacatgcttgataactctatgttaaatactagattggcaagctccaccagtgttattgatgaagtatttgaaaatcagtggtaccgaccaattgcagggtggggacataacccttcaattggtcacagaaaagacttaaagcagtggagcacaaaggactgctcatactcatctaaggcattttttgagcctggccttccatctggttggaggtggacctcaccgtggaaaattgaaaggttgaattttgtagataatgatggatgggcatatgctgcagattttcaaaacttgaattggccatcatcatcctggagatcttctaaatcaccacacgacttcgtgagaagaaggcgttgggtacgttctagacagcagtcgcaagaacaaagtgcagaaattcctagaaaagtacttgctactgtcagtcctcattcatctactgcgttgccttggacatcgatgattagggatatggatttatgcttgcaagttcgcccatattctgaaaaatcagaggaatcatatagctggagccagatttgttcactaggttctgagagtatacctaaacagcagcactcttcactttctaggcaaagcaccgtaaagcagtcagtggtatcatcaaggaattctgttcttaagcttgctgaactcgagaaaaaagatgtgctctcatattgccatcctcctgttagcactgaaagatatttctggtttagtgttggaattgatgcttctgttgttcatacagatttgaatgtacctgtctatgactggagaatttctttcaattcaattcttagacttgaaaataaacttccctatgaagctgagtatgctatatgggagatttccactaaaagtaatatggttgaaaagcagcatggtattgtcccttcgggtggaagtgtatttatctattcagcagatatacggaaaccaatttatcttacattgtttctccaaaacggttggattctagaaaaggatgctgtattgataatggacttgttgtccttggaacatgtttcttcgttctggatggttcagaagcagagccagaggagactacgagttagtgttgagcatgacctaggtgctagtgatgctgcaccaaagacactgagattgtttgtcccttactggataaaaaaccactcgtcaattccattatgttatcgcatagtagaaggggaatccacagaaagcacagaagcagactcacttagcagaccagactcgctaagtagagtgtctaagtcttcaaaattttcccttaaatattcttcaaagtctcttgtcagaagaggaacaatgtcgcacagaaatatgcaagtactggaagatattgaagattgtagcacagactatgtgatgctatcaccacaagattacttgaaccgatctgctggtatgcgctctgagtcaagggataacaatttcagtccagctcgagttgcaatatctatggctgttggtggttgcacacagtacagcgtaggagtatcgctttttgagcttgagaacaaggagcatgttgatatcaaaacatttgcttctgatgggtcatattactggttctcagttcaattgaagatggcttcagataggacaaaggtggtaaatttactgccgagagcacttcttatcaatagaattggaagaactatttttctatctgaatatcatgatgagactgaagagcccttacaaccatatgaacctccaaaagtatttcaatggcgatcagaatttggaagtgaacttttaaagttgaggttggagggataccaatggagtacaccttttagtatcaatgctaatggagttatgtgtgtgctcatgaacagcacaacaggaaatgatcaggcttttgtcagggtaaatgtgagaagtggaacaaaaagttcacggcatgaagttgtatttcagcttgattgctggtccagcccatacagggtggagaatcgctccatgttcttgcctatacggtttcggcagtttggtggtgatgatcattcatggcgtaatctgcttccgaattcatcagcttccttctttttggaggacctgagcagaaggcatctattggaagttttggttgatggaactgaccctatgaactccatgacatatgacatcaatgtcgtaatggatcatcagccccttactaattcagatgcccttaagaaggccttacgtgtcactgtcttgaaggaggggaaattgaatgttattcaaattattgattggctgccagataatagaaatcgaggacagataactgaaaggatgttatcaccaatctttcagccatcagaggtcgactatgggcagtcatctcctgatctggatagtgaatttcatgttactttggaactaacggagcttggcatttctgtaattgaccatatgcctgaggaagttctttacctctcagtgcagcaactgttacttgcatactcatctggaattggctctggagtaaatcggctcaaaatgcggatgcattggattcaagttgataatcaattaccatttgttcctatgcctgtacttttctgtcctcaaaagattgaaaatcagtcagactatattttcaagttctctatgacagttcagaccaacaattctcttgatttttgtgtctatccttatgtcggtgtccaggttcctgagaattgtgtgttctttgttaacatccatgaaccaatcatttggcgcctccatgagatgattcaacacctaaaattcgataggatatatagcaatcaaccttcagctgtttcagtggaccccatactgaaaattgggcttctgaacatctccgagatccgatttagagtgtcaatggcaatgtccccaagccaaaggccaaggggagtatttgggttctggtcgtcgttgatgactgcattgggaaacatggagcatatgccggtccgtatagctcaaagataccgggaggaattgtgcatgcggcaaagtgcacttatgaactctgctatatctaacattcaaaaggatcttcttagccaacctcttcagctactttccggtgttgatattcttggtaatgcgagtagcgctctgagtaacatgagcaaggggatagctgcattgtctatggacaagaaattcattcagggccggatgagacaggatagcaaaggtgtggaagactttggggatgtcataagagatggaggtggtgctcttgcaaaaggcatcttcagaggtgtcacaggcatattgacaaagcccatcgagggtgcaaaatcttctggtgttgaaggttttgtgcaaggagttggaaagggtataattggcgcagctgcacaaccagttagcggagttcttgatcttttatcaaaaactactgaaggtgccaatgcggtaaaaatgaaaatatcatcagcgataatggctgaggagcagttgctgcgtaggcgtcttcctcgagctattggtgggaatagtttgctctatccttatgacggacacaaagctactggccaggctatcttgcatctagctgaatgtgctacattccttggtcaaattgatatttttaaaatccgaggaaagtttgcttctaccgatgcttatgaggatcattttttacttcctaaggggaagatttttttaatcactcacagaagagtactattgcttcagttaccaatgatgacccagcgtaagttcaatcctacgaaggatccttgttcagtaatatgggatgtattatgggatgatttggtaacagtggagatgacccatgggaaaaaagatcctccagattcctggccttctaagcttattttatacttgaaagctaaaccttcaaattcgaaggaaattgttcgtttggtcaagtgtaatcgaggttcagatcaagcatctatcatttactcggcaattgacaaagcttataaagcttacggtccaaactcgttgaaggaattcttgagatggaaggtaccaaggccatatgcccctcgcaatagtagtggccgaagtatccaagacttatcatttggttaaaaggtcaacacaaatgcacactttagtgttaaacacagtagaatcttaggatgaaggtattttaggttgacacttttggttaccaggcaaatgatatattctacatatacactataggtatcagaggataggtactttgccttcatgtaaatagatatattttaggaggcgccggtattcatgtaaatgtgaacatctctgttataaagaaaaaaaataataatgcaaattatgcaagattcattgctgctgtcttgttgcaatgtttaatgtgttctcttgcgattgtctaaagacccaaaccgttaacgtgtctttactactatggtttcatttc

SEQ ID NO: 120910 - DNA, 626 bp, Zea Mays
atacatctttgatgagggataagtgtgtgagagaggaggtgggcggccaccaccacctcctccacgtatcagccgccggagcgcaggcgacgatgacgacggttccgtcgcttttgtgcagaggagatgaccgagccggcacctgcggcagcagcggaggagaagaaggccgtcgcggacacggctgcggctgtggtggcgaagggaaaagagaaggaggaggcggcgccaactctggcggccggcgccagggggaggttcgtggcctacccggcgcgggtgacggagcacacggacgtggtggcggacgccgcgcgcttcagggcggcgctcgaggggctgcacgcgcacatgaacacgaggctcaaggtgccaattattggagggaaagatttggatcttcatcagctatataaggaggtcacatcacggggtggtattgacaagttgaaggcagagaatagatggagggaagtgaccgcatcatttattttccctgccactgcaacaaatgcttcttttatgttgaagaaatactatatgtcactcttatatcattttgagcagctatacttctttagagtgcaaggctggtaccaacaagaaatagattccagaacgaattc

SEQ ID NO: 120911 - DNA, 1755 bp, Zea Mays
gcaccactgacacgctggcccaactcgctttctgatctccaaaataaagggtaatccccgaggaaccgattcgaaacaatcaaatagctccaggactctaacccaaagaactgagcgagccaaatcgtcgaacagatggaagccatggacacggaaccgtcctcccctgcgccggcagcagccgtcaatctgcctcctccgccgtaccatcactgcccagctccagctgatgaggttgcagcgacgccgcagccgaagccgaagcaatcaaccgcggggccggggctgaggacaccctcgccgccgccgtcggttcaggtgtccgggtactctctacacgacctgctgctgctgtccccgccacccccgagctcacgccgccaccggtcgagtacgcgtggggcagctgggacgagcgtggacgagagcctggagattgttgcggtggcggggacgcccacgcctccaaggcgcaggcggcgcgggggcgcggagcagtgtgtgacgcccgttctggcgtccccgaggaatgcacgacgggcgagacggaggctggagaaggacgtcgaggcggttgaggacgccggcaggagggcccgcaggaggaagtccacaagggctgcgccgaaagctgcagcggctgccgacaaggcagaggcggcgctgaacgaggaggatataaccatggctgtggtcccggcttgtcctgctgctacctgcggtgagcaatggtgtctcggcctgctcgtgatggctatagcctttgggatgtctgcttcaattttgctaaggattccactgtgattgttcctcttttggcacgtaggaactgacttcctggagcaatctgacttggaaggtctctgggaaaggatcgttgaattggtgatgtggaggaatatggctaaatcagcactttggttcggatttggatcgatgttcttctcatgctcattgtcaagagacgtcaccttcagcccaatctcagctctctgtcacctcggcgttatgatcttaggcttagctttcttcaaagattctgttcctcagaggccgcaggtggagaatgagagaaggttccggttgactgaagaagacatgcttcgtgcttctcaagctgtgcttccgtttgcaaactccatgatatcgacggcgcaagtgattttctctggtgaaccttcaatgactctcaaagtattgcctttacttctgttcggtgctaaatatgggggccttgttacagtgtggaggcttttagctgcaggatttttcatcagttttacagtcccaaagctatatagctgttattcaagtcgtattcataaaagagttgagattttgagagatcaggctctagaagcgtggaagtcttgcccacgcaaaaaacttgttgcagctattatagtaacaatgttctggaacatgttcagtgtgaagacacgcgtcatggcagcctttgtttcacttgtaatactgcgctataataagaaacaccacaaggcagcagaagttggaagttaccgagatgagcaggggcagacaatggagatggatagctaaaattttcagtactatgcggtcctaatgatgtagggttgtcagagtgcagccacaagtactgctactatttctgtacaataatattcagttagttccatgtctagtggtcctactagctaagatgtattttctgtacgttgcataagggagcctttgcaaacaatggagatggataaccaaagttttcagtactat

SEQ ID NO: 120912 - DNA, 1659 bp, Zea Mays
gcaccactgacacgctggcccaactcgctttctgatctccaaaataaagggtaatccccgaggaaccgattcgaaacaatcaaatagctccaggactctaacccaaagaactgagcgagccaaatcgtcgaacagatggaagccatggacacggaaccgtcctcccctgcgccggcagcagccgtcaatctgcctcctccgccgtaccatcactgcccagctccagctgatgaggttgcagcgacgccgcagccgaagccgaagcaatcaaccgcggggccggggctgaggacaccctcgccgccgccgtcggttcaggtgtccgggtactctctacacgacctgctgctgctgtccccgccacccccgagctcacgccgccaccggtcgagtacgcgtggggcagctgggacgagcgtggacgagagcctggagattgttgcggtggcggggacgcccacgcctccaaggcgcaggcggcgcgggggcgcggagcagtgtgtgacgcccgttctggcgtccccgaggaatgcacgacgggcgagacggaggctggagaaggacgtcgaggcggttgaggacgccggcaggagggcccgcaggaggaagtccacaagggctgcgccgaaagctgcagcggctgccgacaaggcagaggcggcgctgaacgaggaggatataaccatggctgtggtcccggcttgtcctgctgctacctgcggaactgacttcctggagcaatctgacttggaaggtctctgggaaaggatcgttgaattggtgatgtggaggaatatggctaaatcagcactttggttcggatttggatcgatgttcttctcatgctcattgtcaagagacgtcaccttcagcccaatctcagctctctgtcacctcggcgttatgatcttaggcttagctttcttcaaagattctgttcctcagaggccgcaggtggagaatgagagaaggttccggttgactgaagaagacatgcttcgtgcttctcaagctgtgcttccgtttgcaaactccatgatatcgacggcgcaagtgattttctctggtgaaccttcaatgactctcaaagtattgcctttacttctgttcggtgctaaatatgggggccttgttacagtgtggaggcttttagctgcaggatttttcatcagttttacagtcccaaagctatatagctgttattcaagtcgtattcataaaagagttgagattttgagagatcaggctctagaagcgtggaagtcttgcccacgcaaaaaacttgttgcagctattatagtaacaatgttctggaacatgttcagtgtgaagacacgcgtcatggcagcctttgtttcacttgtaatactgcgctataataagaaacaccacaaggcagcagaagttggaagttaccgagatgagcaggggcagacaatggagatggatagctaaaattttcagtactatgcggtcctaatgatgtagggttgtcagagtgcagccacaaggagcctttgcaaacaatggagatggataaccaaagttttcagtactatgcagtcctaaatgatgtatgattcccagagtgcattcctaaatgatgtattattccacagtgctgctactatttctgtgcaataatattcatttagttct

SEQ ID NO: 120913 - DNA, 1754 bp, Zea Mays
gcaccactgacacgctggcccaactcgctttctgatctccaaaataaagggtaatccccgaggaaccgattcgaaacaatcaaatagctccaggactctaacccaaagaactgagcgagccaaatcgtcgaacagatggaagccatggacacggaaccgtcctcccctgcgccggcagcagccgtcaatctgcctcctccgccgtaccatcactgcccagctccagctgatgaggttgcagcgacgccgcagccgaagccgaagcaatcaaccgcggggccggggctgaggacaccctcgccgccgccgtcggttcaggtgtccgggtactctctacacgacctgctgctgctgtccccgccacccccgagctcacgccgccaccggtcgagtacgcgtggggcagctgggacgagcgtggacgagagcctggagattgttgcggtggcggggacgcccacgcctccaaggcgcaggcggcgcgggggcgcggagcagtgtgtgacgcccgttctggcgtccccgaggaatgcacgacgggcgagacggaggctggagaaggacgtcgaggcggttgaggacgccggcaggagggcccgcaggaggaagtccacaagggctgcgccgaaagctgcagcggctgccgacaaggcagaggcggcgctgaacgaggaggatataaccatggctgtggtcccggcttgtcctgctgctacctgcggaactgacttcctggagcaatctgacttggaaggtctctgggaaaggatcgttgaattggtgatgtggaggaatatggctaaatcagcactttggttcggatttggatcgatgttcttctcatgctcattgtcaagagacgtcaccttcagcccaatctcagctctctgtcacctcggcgttatgatcttaggcttagctttcttcaaagattctgttcctcagaggccgcaggtggagaatgagagaaggttccggttgactgaagaagacatgcttcgtgcttctcaagctgtgcttccgtttgcaaactccatgatatcgacggcgcaagtgattttctctggtgaaccttcaatgactctcaaagtattgcctttacttctgttcggtgctaaatatgggggccttgttacagtgtggaggcttttagctgcaggatttttcatcagttttacagtcccaaagctatatagctgttattcaagtcgtattcataaaagagttgagattttgagagatcaggctctagaagcgtggaagtcttgcccacgcaaaaaacttgttgcagctattatagtaacaatgttctggaacatgttcagtgtgaagacacgcgtcatggcagcctttgtttcacttgtaatactgcgctataataagaaacaccacaaggcagcagaagttggaagttaccgagatgagcaggggcagacaatggagatggatagctaaaattttcagtactatgcggtcctaatgatgtagggttgtcagagtgcagccacaagtactgctactatttctgtacaataatattcagttagttccatgtctagtggtcctactagctaagatgtattttctgtacgttgcataagggagcctttgcaaacaatggagatggataaccaaagttttcagtactatgcagtcctaaatgatgtatgattcccagagtgcattcctaaatgatgtattattccacagtgctgctactatttctgtgcaataatattcatttagttctgtct

SEQ ID NO: 120914 - DNA, 103 bp, Zea Mays
gctttgtgaccaaccaacccaagtgctcaatggtaacggtaaaccgccacatgccttgttatgtcttacctctaaggacaagatctaggtgatgagatggatg

SEQ ID NO: 120915 - DNA, 1528 bp, Zea Mays
ccttccttttcgtcctcttctccagtcgtcccccagtctcagtccaccaccgtcgcagccggaggggagaggacggaaggcaatgccgtgctgccagactgtgctcagtgccgcggcggccgccgccgccagcagaacgccgtcatggctccatcggctgcacgccaaagggggtctatccttcccctcccacctcaacattgacgacctcctctacgggggccgacaggcccaaactccccctccccctccctcgcccctgccaccttcttcttccaatgatcacaacgacctcgtcgttgttgtcagggagtcgcctacaaaggccgccgctaagcccaagccgccgccggcggctcagcgtccgccccgcaacccttcgcgaccaaaccctagctctagcaattcctcgcagccgccgccgcaaccacagcttcagctcgttgccgtgatctccgatgtcttcgcggtcccgtcctccgccccgccgggccccccggcccccaaagccttccgcaagcagtcccggccccgcccgagaactgacgaggaccagccgatctctgcccttcctgcacagcgtccccacaaggacaaaaaggacaagatcgccaaggccaagaagcgccgccgggcggagcgcgccgcggatgccgacggtgagaggtgtagccggaccgatgtcaccgtcatagacaccagcatcgatggctggaaggccgccaaggtgctcatccgccggggagacgtctggaaggttcgtaacaagaagccttccgcggtgtctgaactggaggatgccattgccaagggcaagaggagggctggccttgtctctaagcttcagagagacaaagagaaggagaagcagaaggagaaagaagcaatcacatcaggaaacactcatgctggcagtggagatgtgacaaagactcagattatcctattcaaaccccgaaaagatcttagttctgtgctagaaccagaaggccaaagtgcatgaatttttcatttgcagacaacatagaggcaaggaaaacgagtcagacagccatatagctgacttgagaaggaattatggacaaggcacattgagacaaggatgccattacattgcaattaacatattcagtttgattattgtcctactgatgttttggtgtcttaaatggaccctgttagaagttcaaaaaaattccaactgcgaataactggcccttcggggccaggaagatatgtttgtggatgaacactcgcgaggccacatgactgttacttttgtttcttccccttttttttgtagaaaaaggtcaaggctatctaaatgttgtccggcaattgttggagttgatggaggttctgattcgtttggtcaatctggccagtcgatcgtgtactgcaaacccatttgggtactgtaaatgttatgttgataatgctacctcagttgctgtacaagttgagttggcggtatttagccaagcgtttccaggaaagcttcaataatgataaatattgttaccgcggt

SEQ ID NO: 120916 - DNA, 521 bp, Zea Mays
attattaatcaactcatattcgacaaagtatacattagatagtttaggtttgataatggatccaaaatatgttagcctatgcatcttcgtattacttgtattgcatggagatactactttggcagaaacttgcagggagtttgctaaatggcatccattctgctttagtgcaatgtgcaaggcaaattgttttatagaaggaaaaagctccgatggttcctatgcaaagggatatagatgtgattcacatggatttcattctatgtgtatttgccttttgtgtaaaagttagttatcttaagacaagcggggatatattctatgttcatatccgtcatttagggtgttgttcaaataattttatgggataataattaactagtttgtttacttctagatatatgtaatactacttaaataatccttatttctttaatttcttagctctatagctagaaacatgtttttagttgccaaccactttagtaatatatgtttcttctcctttattataaacctca

SEQ ID NO: 120917 - DNA, 348 bp, Zea Mays
atggcggaggtgatgcttcagaaatatctatctcatcagataccaacgatataggtggcggcgaaggtggttcatcagtgttgtagttgcttatcgaaatggcattattgtccggcgtctcctcgggtgtcaggtacaatgatgacaaagacgacgacgctgtgtacatcccatcagatgtggtcatcgtctcttcagttgtctggtagaatggtgataaagacgacgacgttgtgtacatctcatcagatgtggtcgtcgtctgggattcaccactatgcaactggtcacctgtcccaaagaccttggcaaggagatgtcggagccagccaattccgaaaattctag

SEQ ID NO: 120918 - DNA, 209 bp, Zea Mays
cccacttccccactaccctttcaagtttcctagaaattacccaccattgccattataatctaccgaatcgtttttgcgcctatcggatcggagaagcccgccgcccaacagaaacacgccaaataatctgggtaaacaaacaggactactcagattatataatccaaattatataatccagattatataatcctccaaaaataatccag

SEQ ID NO: 120919 - DNA, 115 bp, Zea Mays
atttctacaaccagaccattttaaaaaaacttggatgtaaaaatgctgtaaacgatgggatgctagctgatgtcgaagttggtttaccaactgaagtcacaagcaagttaccaac

SEQ ID NO: 120920 - DNA, 709 bp, Zea Mays
atggtcgtgccctgccatcctcgccccacgcttcctgcccgcccgctcgcatcctccgctccgctgctcgcgccatctcagcatcatccgcccgtccgcatcctccgcgactgtcgctcaaccacctccgcgcatacaccagcagtccgcggagggacgagtggaggaggcacccgatggtgggaaacccactgcgccacaccacacccgggctcgacattgccattgtcggctttggaatctacctcatcgtcgaggccgcctacaaccgccttaagcgcccctccggcaaccaccaccactaaatcgcctgctaggattcatgactctaagctcagaggatcactgaagatcgctgccatcaaagcccctggttttggagagcgcaagacacagtacttggatgatattgccatccttactggagcaactgtaatcagagatgaagttgggctatcacttgacaaggccgacaaatcagttcttggaacagctgcaaaggttgtccttatgaaagagtcgacaacaattgttggtgatggcagcacccaggaagaagttactaagagggttgcacagattaaaaatctcattgaggctgcagaacaagaatgcgaaaaggaaaagctcaatgagaggatagcgaagcttgctggtggtgttgctgtcattcaggtgggagcacaaacagaaactgaactaaaagaga

SEQ ID NO: 120921 - DNA, 1650 bp, Zea Mays
agccagggaccaaatcaactcaagtcatcgagtccacagctcgcgcgcgcagccaatcgctctccctccggcctccacagcccaaaaccacctcggccccacttcttctctccgtcgccccctgtttgtccaacccatggcgacccacgccagcgacaatggcagcgggcacgcggagtggcggttcgctcgggcggcgaaggagggtgcgctggccgtggccggggacaagatgagcatccgggcggcgcggttcaagatcagcgcgagcgtggacgggcgcgacccgcggcccgtgctgccgcttgcgcacggggacccctcggtgttcccggccttccgcaccgccgccgaggccgaggacgccgtggccgccgcgctccggacgggcaagttcaactgctaccccgccggcgtgggcctccccgaagcccgccgtgctctggcggagcacctgtcaagtgatcttccatacaagctgtcaactgatgacatcttcctcaccgctggaggcactcaagccattgaggttgtcgtctcagtccttgcccaaccgggcgccaacatattgctcccaagaccaggctatccaaattatgaggcgcgtgcaggactgcacaacttacaagttcgccatttcgatctgattcctgagagagggtgggaaatcgatatcgactctctggagtcgattgctgacaagaacaccaccgcaatggtcatcataaaccccaacaatccttgcggcagtgtctacacccgtgaacatttagccaaggtcgcggaggtagcaaggaagcttggaatactagtcatcgctgatgaagtgtatggaaacctggtgtttggggacaccccttacgtcccaatgggtgtctttggccacattgcccctgtcttgagcataggatcactatcgaagaggtggatagtgcctgggtggcgacttggttgggtagctgtatgtgatcccaacaagattctgcaagaaaccaagatcattgcatcaataacaaacttccttaacgtttcaactgatccggcaacttttgttcagggagcacttccccatattcttgggaacacaaaggaagattttttcaggaggatcattggtctgctagcagaaacctcagagatatgttacagagaaataaaggacatcaagtgcatcacctgccctcacaagccagaaggttccatgtttgtcatggtgaaattaaatttgtatcttttggaggggattcatgacgatattgatttttgctgcaagctggcaaaagaagagtctgtgattttgtgtccagggagtgttttgggaatggaaaactggatccgcatcactttcgccattgattcatcttctcttcttgatggtcttgagaggatcaaatctttctgccaaaggcataagaagaagaatttgcttaatggccattaactgtatctacgttcaaagttacctagttccattgtattatcaacaaatgtggaactttgaaatccctctgaattaataaagttttccttgaatacgcagaaattttgattatctgtcgatcatcctaggaggtagattttaggttttgatattacacaaatacaatactatacaactaagaaaaaaaaatgcagcaatacaatctaaga

SEQ ID NO: 120922 - DNA, 2417 bp, Zea Mays
attcagcaatgcatcccgttccactgttccagcttgcacccgacaagccgaacacttcaccctttcccacttcacctccgccgttccgcatctgtggtcaaatacgacgctcgcgtccataccgatccgtgtttgcccattcctctcctcccactcgcttttcctccaaagcgagcgagctaggcgttacgccggagctcgtttgggcggtggtggaggagagaggaaagggaggagatgaaggcggtggagcgagcgaaactggtgaggagcctccggcacgagtcgcggcggctgcgtctactcgtcctcgttatcggtttcttcctcgttactctcaccttcgttgtcgtctccaagcccgacgcgctcctcttcaacctgaacggcaggctgtcggtggaccaggcgccgcgctcgctcttgatccgccagcgggttgacgccgacgaggggagatccgccgaaactctcgcctcagccaccggagatccaaaggtggtcgaagacgatacctacggcgaggaagccagcgccaaagccagagccaacgccaatgcccgagggaccactgccgaggaggaacggatgctcgctagtgagcccgagcagagaaaaagggcacaggaagccactacatctgagattttagctggggaagacgaccggggaaggaaaagccagcaagagggacacaaagagcaccagcagcacaagttgaccctcccaactgtttcgaattataccattcacgatgccactgacggcaccgacaatggcaaacaggaagatacagaatttaatctcactccagatgttgaccagagaaatggtcgagacagatctcatcaagcagcattggataatatggagcgggacaaaccattgtgtgatttctcaaacttcagagcaaatgtctgtgagatgagaggtaacatcagaatacacccaaatggcagttcggtcatatacatggaacctacgagttcaggttcaaagagaaacgaacaatggaaaattaagccttaccctcgcaaaggtgatgaattatgcctcaatcatattacagaggtgacagtgaaatccagcatagtggcacctgagtgttccaagtaccatgacgtgcctgctgtgatctttgctctgactggatacaccggaaatctattccatgacttcaccgacgtgcttgtcccccttttcacgactgcaagcgagttcaatggtgaagttcagttcctaatcacagacatggctatttggtggacaaggaagtatgctgtggtgtttgagaagctaaccaagtaccccttgattgatttcaacaaagacaacgaagtgcattgcttcaaccatgccattgtcggccttcatgcttacatggagttcacaatcgacccgttaaaggctccacacaattactcaatggtggacttcaaccagttcatgcgcaggacctactcactgcctagggatgcagtgagagcacctggtgagaccccacagaccaggaagccaaggctgctgattatctcgaggcaaaggacaaggatgttcctcaatcttaaggagatcgtggccatggctgaggagatcggctacgaggtggtggttgaagaggccaatgtgaactccaacgtcggccatttcgccaaggtagttaattctgtggacgtgatgatgggcgtccatggcgccgggctcacaaactgcgtgttccttccgcacggcgccacactgatccagattgtaccttggggcgccctagatgggatatgcaggatcgattttggttacccagcagaacagatgggcctgaggtacaagcactacagcatcggcgtgcacgagagcagcctcacggagcagtaccctttggaccacgagatcttcagaaacccgcttgcgttccacaagaacgggttcgagttcgtcaggcagaccttcatggatacacagaatgtaaggcttgactgcaaccgtttcagacctgtgctcttggaggctcttgaccaattgaaccaataaggacccattggtctaattccacggccactgtactagatttttgttttccttggcgattctagtctcaccatttttcctctttgtaaaatttcgtgatcactgtatctggttacatgagcaacatgaaaatcaattgtttctccaaatgtgtaggatcgaaatcgggattgtactgtattttgtttaatgtaaattagcagtcgtcgatcacagaaatatcagcgagaagctgctgttacatgatcacagcgagtagaattttccaggcctgacaggcatgatagaaatggggttggtggagaccaccttttttttaggctgtgtgattcatcatgttttttgctcccacttttttggttcttggacacgaagaaacgctaatgctgttc

SEQ ID NO: 120923 - DNA, 902 bp, Zea Mays
ccacaaaccccataaccctagcaccgctgccaccatgtcctcgtctccatcttcagtgaaccgccgtcccccgggcccgctagcgttagggctggagtccttggcgaagaagaagacacataggaagaagctcaccgccaaacctcctccagatccagtcgttgccctccaatggtcggatacagaacgtctcgtctcttcctttgaatccagcagtcggtgctcctcctctggatccggcggtcaactccatcatccgcagcttctatggcacctcccctagtccccctccatcgccgccctcacccaccgcttctatatcgccacctctctcattatagaagaagacactgagaatctggtgagcttccacctttttagcttattccgtttagatctgttgtctatatttgattctcgttatggaagaagctgctagtgcttgcttgcatcatcgctgaggatctgctggtaggatagattagcttgatagcttgatcggtgcatccatgcgtgcaatctaaacttgcaatctagaactccacctagaaatctttctcttttgattaggtcttttctgataaattggtcggtgcatccgtggatgcagtttaaacatagcttagttttttttaaacagtgcacttcaggcttagtttttttaaacattgcactttaggcttgctttatattcttgttcctattaagaactgagcaactagctaagctgagatcaagttacagtttactaaatactggtatgttaaaaaggaaccctcatgtagctgtgagagtaaatttcttcttcttgtgccagagtatattagcatttcttggttttcaattatatgtcagtttgcatttctcacaaacacatgcattcattctctggtgctatcaaa

SEQ ID NO: 120924 - DNA, 1213 bp, Zea Mays
ccacaaaccccataaccctagcaccgctgccaccatgtcctcgtctccatcttcagtgaaccgccgtcccccgggcccgctagcgttagggctggagtccttggcgaagaagaagacacataggaagaagctcaccgccaaacctcctccagatccagtcgttgccctccaatggtcggatacagaacgtctcgtctcttcctttgaatccagcagtcggtgctcctcctctggatccggcggtcaactccatcatccgcagcttctatggcacctcccctagtccccctccatcgccgccctcacccaccgcttctatatcgccacctctctcattatagaagaagacactgagaatctgatgtgcatgcttgtccctcttgcactgcttgtctgttacctgcagcaatctttgccaaacggacacagggaacctatgccccacaggactgcaccacacgtgggacaggtaatgcaggtattgcccccgctgtggctggccggtgtgcaattcaccaggctgccaaacgagccctaaaggccccagcatgggcgaccctctccaggccgccgtcgcagccgcccacgcgctctccctgctatggagaaaaccgctcatggaggttaaatatcctatttatgatcaaacagtgtaccttaacgattatcataagaagatgttgaaggatcaatatgttcaagctctgcaaggtgatgtctgttcagtttggccaaaaaggcatcccctacctgaacacctacgacggccgcaccatccgctaccccgacccgctcatcaaggctaacgacaccatcaagatcgatctggagaccaacaagatcatggacttcatcaattttgatgtcggcaatgtggtcatggtgactggcgggaggaacaccgggcgtgtaggagccatcaagaacagggagaagcacaagggcagctttgagaccatccacgtgctgcttggagctttttgctatgtctagttttctcctatttgttgtacaggaaaacatagaatggaattcaaatttggtggtcgcaaaagtctgaagactttaattcatataaagttaggcttaacattagtgcaaacagttgtattttagtttagatttagagtacacttatgtatgcgttgtttgacaatgcttatttatgatatattgaatggtacttatttatattatattaattataatgttg

SEQ ID NO: 120925 - DNA, 1145 bp, Zea Mays
ccacaaaccccataaccctagcaccgctgccaccatgtcctcgtctccatcttcagtgaaccgccgtcccccgggcccgctagcgttagggctggagtccttggcgaagaagaagacacataggaagaagctcaccgccaaacctcctccagatccagtcgttgccctccaatggtcggatacagaacgtctcgtctcttcctttgaatccagcagtcggtgctcctcctctggatccggcggtcaactccatcatccgcagcttctatggcacctcccctagtccccctccatcgccgccctcacccaccgcttctatatcgccacctctctcattatagaagaagacactgagaatctgggaacctatgccccacaggactgcaccacacgtgggacaggtaatgcaggtattgcccccgctgtggctggccggtgtgcaattcaccaggctgccaaacgagccctaaaggccccagcatgggcgaccctctccaggccgccgtcgcagccgcccacgcgctctccctgctatggagaaaaccgctcatggaggttaaatatcctatttatgatcaaacagtgtaccttaacgattatcataagaagatgttgaaggatcaatatgttcaagctctgcaaggtgatgtctgttcagtttggccaaaaaggcatcccctacctgaacacctacgacggccgcaccatccgctaccccgacccgctcatcaaggctaacgacaccatcaagatcgatctggagaccaacaagatcatggacttcatcaattttgatgtcggcaatgtggtcatggtgactggcgggaggaacaccgggcgtgtaggagccatcaagaacagggagaagcacaagggcagctttgagaccatccacgtgctgcttggagctttttgctatgtctagttttctcctatttgttgtacaggaaaacatagaatggaattcaaatttggtggtcgcaaaagtctgaagactttaattcatataaagttaggcttaacattagtgcaaacagttgtattttagtttagatttagagtacacttatgtatgcgttgtttgacaatgcttatttatgatatattgaatggtacttatttatattatattaattataatgttg

SEQ ID NO: 120926 - DNA, 1360 bp, Zea Mays
tccacactttttctagcagttctctaaaataaaccatggaactgagagttaaaaaagcagcttcttctcatttagttgatgcatggaatcctatatgtgtcactgagtttactttagagaattacagagaatcaattctgatgatcaatgaatcaccatacacaaagaacacaatcaggaagagctcaaccaatctgtctcttgctagctgctagggctactgtttccattttgcagactttgtgattcgtaaaattctttggttggtgcaaaatagaatttttctaaaaataattaaatatttatattgtcaaataaaagcaccagcaatggtacctccatgttcatgtttataattatctgtgattcttacatatttcaattactatgcttatttgttaaggttaaaatgtattatcatgtgacctgccttttgtccacctgcactgcttgttcgtagatgtgcatgcttgtccctcttgcactgcttgtctgttacctgcagcaatctttgccaaacggacacagggaacctatgccccacaggactgcaccacacgtgggacaggtaatgcaggtattgcccccgctgtggctggccggtgtgcaattcaccaggctgccaaacgagccctaaaggccccagcatgggcgaccctctccaggccgccgtcgcagccgcccacgcgctctccctgctatggagaaaaccgctcatggaggtaaaccactgtgttgcgcgcacatcaagatgtcaagcagtggcttctgttaaatatcctatttatgatcaaacagtgtaccttaacgattatcataagaagatgttgaaggatcaatatgttcaagctctgcaaggtgatgtctgttcagtttggccaaaaaggcatcccctacctgaacacctacgacggccgcaccatccgctaccccgacccgctcatcaaggctaacgacaccatcaagatcgatctggagaccaacaagatcatggacttcatcaattttgatgtcggcaatgtggtcatggtgactggcgggaggaacaccgggcgtgtaggagccatcaagaacagggagaagcacaagggcagctttgagaccatccacgtgctgcttggagctttttgctatgtctagttttctcctatttgttgtacaggaaaacatagaatggaattcaaatttggtggtcgcaaaagtctgaagactttaattcatataaagttaggcttaacattagtgcaaacagttgtattttagtttagatttagagtacacttatgtatgcgttgtttgacaatgcttatttatgatatattgaatggtacttatttatattatattaattataatgttg

SEQ ID NO: 120927 - DNA, 1080 bp, Zea Mays
aatatttatattgtcaaataaaagcaccagcaatggtacctccatgttcatgtttataattatctgtgattcttacatatttcaattactatgcttatttgttaaggttaaaatgtattatcatgtgacctgccttttgtccacctgcactgcttgttcgtagatgtgcatgcttgtccctcttgcactgcttgtctgttacctgcagcaatctttgccaaacggacacagggaacctatgccccacaggactgcaccacacgtgggacaggtaatgcaggtattgcccccgctgtggctggccggtgtgcaattcaccaggctgccaaacgagccctaaaggccccagcatgggcgaccctctccaggccgccgtcgcagccgcccacgcgctctccctgctatggagaaaaccgctcatggaggttaaatatcctatttatgatcaaacagtgtaccttaacgattatcataagaagatgttgaaggatcaatatgagggactgaagacaatcgagcagattacaatggactcagcttcggtcgagaccaatatgttcaagctctgcaaggtgatgtctgttcagtttggccaaaaaggcatcccctacctgaacacctacgacggccgcaccatccgctaccccgacccgctcatcaaggctaacgacaccatcaagatcgatctggagaccaacaagatcatggacttcatcaattttgatgtcggcaatgtggtcatggtgactggcgggaggaacaccgggcgtgtaggagccatcaagaacagggagaagcacaagggcagctttgagaccatccacgtgctgcttggagctttttgctatgtctagttttctcctatttgttgtacaggaaaacatagaatggaattcaaatttggtggtcgcaaaagtctgaagactttaattcatataaagttaggcttaacattagtgcaaacagttgtattttagtttagatttagagtacacttatgtatgcgttgtttgacaatgcttatttatgatatattgaatggtacttatttatattatattaattataatgttgttcagt

SEQ ID NO: 120928 - DNA, 784 bp, Zea Mays
cacatcatctctcattgttctagttgagcatgacgatcttggtagctgtgtgaggttgctgtttttcattagtagatatgtgtaccttatccttgctatactgtccatatatgttgtgtgcatgaaagtcttgcattgaaaatgtcatgtgctacaatcgttaggactaataatagatgttgctcactgcttgcattgaaaatgtcacgtgctacattgaaaatgtcatgtgaagtgctcactgtttttctattggtttgtgtgcagttcaagctctgcaaggtgatgtctgttcagtttggccaaaaaggcatcccctacctgaacacctacgacggccgcaccatccgctaccccgacccgctcatcaaggctaacgacaccatcaagatcgatctggagaccaacaagatcatggacttcatcaattttgatgtcggcaatgtggtcatggtgactggcgggaggaacaccgggcgtgtaggagccatcaagaacagggagaagcacaagggcagctttgagaccatccacgtgctgcttggagctttttgctatgtctagttttctcctatttgttgtacaggaaaacatagaatggaattcaaatttggtggtcgcaaaagtctgaagactttaattcatataaagttaggcttaacattagtgcaaacagttgtattttagtttagatttagagtacacttatgtatgcgttgtttgacaatgcttatttatgatatattgaatggtacttatttatattatattaattataatgttg

SEQ ID NO: 120929 - DNA, 169 bp, Zea Mays
cccaaaataagcaaacaaccgcctcttgaagaggactacaacaaaagctatgtcaatcctaccaacgacagcaactccctagcaacaagagcgtgcgcacaaacaatgctggcacaacatgagcacacccagcaaaacaaagacaaaatctaacgaaaaaacaaagaaa

SEQ ID NO: 120930 - DNA, 1489 bp, Zea Mays
tatctccgcccagtgaggaggcggcacgcgcgcgccgtcgaccacgcccatgccgaaatctgcctctgtgggctgtggctgccggacgagcaagcgccacgcgcgcgccgtgcctgccatgagccgtcagtccgcagtccgcagtccgcagccacacttttgctaaaccctagtaaatatacgatacgaagcgcaaacgcttgcctcatcctcgaattcgccatggcgatgcccaccacctcgtctgcttccccatgccaggcaccgtcgcccgccgggctgcccatttcccctggcgcccgcgctaccatcctctcattcagccgccgcctccgccgctcccgtggcgccatcatttctgcgcccactgattgatgaagatgtacagaggcataatgaacttcttgaagtagtaaaatccacaccatctgataaacttggttctattgttgctaagcggcgtaaagatttcacagtggaattcttcaaccacctttactatgttgcagagtcttgtcatgatgaaccagaaaagcaaactgagttggcaaagcttggaaatgattgtgtagatgccctacaagctcatgatgatacaacagggagccttgaagctttgaatgctgcagaattgaagttaaaagatatacttaattcaccttcggtggatgctgcttgcagaaagattgatgacttggctgagaaaaaagaactggactctgcactagtgttgatgctttcaaaagcttggtcagctgcaaagggcactgacatcacgaaatctgaggcaaaggatataatgtttcacctatatatgactgcggtggcgaatctccagagacaaatgccgaaggatataagaatactgaagcatcttataatgatagaggatccagaagaacggtcaagtgcacttaatgacgcttttactcctggccctgaacttcaaggggacaatgttgatacattatacacgagtccagaggcgctgcacacttgggcaagagctatagttgatgcatattataacagcagagaaggcactctcattgggcaagcaagagacatgatgaatcctaaaatcattaagagagtcgaagagatagtgaagataatcaaggacaagtacctttaagttttagtcatcataaaatgggggtttaacatttctactgattgtacaagtcttgtgcgatgatggtcttttacaggctgctcccgtcaaaactactgccatcgttccagttggaactcctcagcactgacgaaacaatcagtgtttaaaggaaatgcaagttgttgtaactcattacaatgagaaggtgtttgtagcatgtggtatcagtttagctgctacatagatattagcggagtacttgtagctgtcctgactctaacagtgttgtaactgtactagtatcgaaccaggagacatgtatgtgtccaagcattcttgtaatgagctagtgatctcaaacaattctacggc

SEQ ID NO: 120931 - DNA, 1893 bp, Zea Mays
tatctccgcccagtgaggaggcggcacgcgcgcgccgtcgaccacgcccatgccgaaatctgcctctgtgggctgtggctgccggacgagcaagcgccacgcgcgcgccgtgcctgccatgagccgtcagtccgcagtccgcagtccgcagccacacttttgctaaaccctagtaaatatacgatacgaagcgcaaacgcttgcctcatcctcgaattcgccatggcgatgcccaccacctcgtctgcttccccatgccaggcaccgtcgcccgccgggctgcccatttcccctggcgcccgcgctaccatcctctcattcagccgccgcctccgccgctcccgtggcgccatcatttctgcgcccactggttgtctgtttcttggtcttcccaagtcgtgctgttctatcgcagcctttggtgaagtggcagcggtttctgatgattatgtagaaagctcgccctcaagcagtggatatctgaatagtactatggatgcttcatctcatgaagataatcaatcagaaagggttgctaaaatgaaccaaaactccagagacaataacaaaatgatcaaaatatgtgataagttaattggcgtattcctggtggataaacctacaccaacggattggagaaaattactagcttttagcagggaatgggacaacataaggcctcatttctttaaacgctgccaggaaaaagcagatacagagctgaaccctgagatgaagcacaatcttctcagacttggtagaaaacttaaagagattgatgaagatgtacagaggcataatgaacttcttgaagtagtaaaatccacaccatctgataaacttggttctattgttgctaagcggcgtaaagatttcacagtggaattcttcaaccacctttactatgttgcagagtcttgtcatgatgaaccagaaaagcaaactgagttggcaaagcttggaaatgattgtgtagatgccctacaagctcatgatgatacaacagggagccttgaagctttgaatgctgcagaattgaagttaaaagatatacttaattcaccttcggtggatgctgcttgcagaaagattgatgacttggctgagaaaaaagaactggactctgcactagtgttgatgctttcaaaagcttggtcagctgcaaagggcactgacatcacgaaatctgaggcaaaggatataatgtttcacctatatatgactgcggtggcgaatctccagagacaaatgccgaaggatataagaatactgaagcatcttataatgatagaggatccagaagaacggtcaagtgcacttaatgacgcttttactcctggccctgaacttcaaggggacaatgttgatacattatacacgagtccagaggcgctgcacacttgggcaagagctatagttgatgcatattataacagcagagaaggcactctcattgggcaagcaagagacatgatgaatcctaaaatcattaagagagtcgaagagatagtgaagataatcaaggacaagtacctttaagttttagtcatcataaaatgggggtttaacatttctactgattgtacaagtcttgtgcgatgatggtcttttacaggctgctcccgtcaaaactactgccatcgttccagttggaactcctcagcactgacgaaacaatcagtgtttaaaggaaatgcaagttgttgtaactcattacaatgagaaggtgtttgtagcatgtggtatcagtttagctgctacatagatattagcggagtacttgtagctgtcctgactctaacagtgttgtaactgtactagtatcgaaccaggagacatgtatgtgtccaagcattcttgtaatgagctagtgatctcaaacaattctacggc

SEQ ID NO: 120932 - DNA, 1141 bp, Zea Mays
ccaaaatcggagcgactgagcgggggggggggggggtgagtgagtcgcctaagtgtgcttagtgtgttttgattttcggcctcctcttgttgttgctagctaatgcatgcatgcatgccagcctctctcctctgttttggcttggtgcttctcgatcgacactgtaatccgtcttgagagagagggcgagagagttggtttgcatggggtgtgtgtcctccaaggagtccagacgacgacctcagggatacgaggatcccaacaccttagctagagagaccacgttttctgtcaacgaagtggaggccctctacgagctgtacaagaggataagctattccataaccaaagacggcctaatccacaaggaggagttccagctcgctctcttccggaacagtaacaagaggaaccttttcgccgatcggatatttgacctgttcgacctgaagcgcaacggagtgattgagttcggggagttcgttcgctccctcgacgttttccacccagatacgcccgtggaagaaaagatcgcctttgcgtttcggctgtacgatctgagaggcactggattcattggacgcgaagagctgaaggaaatggtgctggccattctgaacgaatcagaattacttctttccgacgacgccgtcgaagaaatcgtggatcagactttcaggcaagcggacatgaacggcgacgggaagatagatcctgatgaatggaaggtgttcgcgagcaaaaacccggcacttctaaagaacatgacgctcccatacctcaaggacataaccatggcgttccccagctttgttctcaactctggagccagtgacgacgagttgtagtagctgcgagcatgcatggccaagctgcgagcgaggaaaaggaacgctgacctcactcctcagttcactaagtttcagacggagcagcagcaggaggacccctcctgaaaggtgatttggaagctggtggttcactcaagctgctaggatcatctgtggaagaacacacatgctccatacttgcccagcccacagcaaggctgtacatgctgtatcttaatgagatgtaagcgcttcccctaaggccggccagcaagtaaccaaacttgccaacgagattatttagtttttgc

SEQ ID NO: 120933 - DNA, 254 bp, Zea Mays
actttctatttgaatttcagttttgaagttgagttcaaatttgtttgtgggcattacccccaaattgagtgcacaattaaaaatagtggcctaaggaattatgattatttatatttttcttttataatgtatattcctttttcttcttttcccttttctctttcattttcagttttttgtacttaaacttgagacttagaatgcaaggatccaccatgaaatacctctttatatatttatttattcgttatttg

SEQ ID NO: 120934 - DNA, 365 bp, Zea Mays
atgaagtgtacatttagattttatgcaacaaaatcgcgcatgttgttactatgttttttacattaaaatacattcttttactgttcatttttttcttacaacaaataacatggtgtatatacgttttcatacagaaactgaacatccgttgcatctcatatgatgtcattttgtccatatgtataatgaatgatcgtcaacacgaggctgtagcgaggaaagattttcaaagtattttggaaatgtcaacggacggcttcgctgttggctcgttattgagttgcactacacgacgattgatctttagcgacccttattaggtaccaactgttggttgctaaaggttagggaccaacggtcagtcg

SEQ ID NO: 120935 - DNA, 901 bp, Zea Mays
tttgattcttaatttatttaagctggattatataatgtaaacgtaaacaaagagccactgattgctgctccacggtctaccgtgatctgataataacaaaacctgtactcctgtaggctgtagcccaacgagaggaatcaaattggacaaccctgtcgccctctcggtctccctcgagcttttcttgtgcgcagccgcagccgcagccgctgcttttcgttcgtcttcatcctacgcgagggcgaaacccacaaaccctctccctcccgtactccggcctacacatccaggggcgatgacgctgggtagctccggcgccggatcgagcgtcgtcggtaagtaacctactcacccatccctttttttcatgccgtggatcttccaatcggatccggtctttggtcgaccttgcgcgggatgcgcgtgccccgatctgccccggggttatctgattcgactatggctggagaggaatatgtatgtggtgctttttttcgggctagattggaccgattgttctattggatactgcggcgtggatagactatatgtgtttttatttctgccgagttggactaattgctagagattcgactggtcctacatgcatgcaagattgacagtcctgtgaatgctttatactggttcagaagcggtgttaattttgccatgttctttaactaggcatttcgtatctagacaggtgaatgaaggcactcgtacctgatatatactttaatcaatttaataaattatagttcatattgcatgaataaaggattatggatggagattgagggtttattattgtgatagcagtgcaactggttcgtttgagttattgagaaaataaagcaatgcattctcttaatcatgaaaatggcagtacttgtagcaatgc

SEQ ID NO: 120936 - DNA, 1602 bp, Zea Mays
tttgattcttaatttatttaagctggattatataatgtaaacgtaaacaaagagccactgattgctgctccacggtctaccgtgatctgataataacaaaacctgtactcctgtaggctgtagcccaacgagaggaatcaaattggacaaccctgtcgccctctcggtctccctcgagcttttcttgtgcgcagccgcagccgcagccgctgcttttcgttcgtcttcatcctacgcgagggcgaaacccacaaaccctctccctcccgtactccggcctacacatccaggggcgatgacgctgggtagctccggcgccggatcgagcgtcgtcgttccccgaaacttcaggctattagaggagctcgagcgtggagagaagggcattggtgatggaacagtgagctatggaatggatgatgccgatgacatctacatgcggtcatggactggtaccatcattggccctcacaatgtgagaacacaatctcatcctctttatatttcccgtgcctttatttaattaaggttagacacgcacaactgccaactactagtactttgctgcaactaccgcatccaacattaaaattttatctataccatggctaattaaattgaagggtaggtcaggtgcagtggtaagagtcctcgtttcacccaaccatcgagctgttcgaccttcaatagcatggagaaaaggatggtgactacaatggttgtagattgatgcatatatatgattaaccatggtagttctttctcctaaaatataaataaataaatttgtggatattccatttttacatcacatcacaagaaaactgcttgggacatgtgcaatccttgagtattcaaccatctgtaggtcttctctaacaacagcgcattcttttccatagagttgcttctcttggctatctaatttatttccacgtcccacaacatttctctttgtcagactgtacatgagggtcgcatctaccagctgaagttgttttgtgacaaggactatccggagaagccaccatctgtcagattccactcaagaatcaacatgacatgcgttaatcacgagacaggaatggtaatctttgtcatgtctgtgtgagcaactgagcatgcacaaggggattcacacaactaatttgactattggtgcatccgtgtaggttgatccaaggaagtttggtttgctagcgaactggcagcgggactacacgatggagaacatcctcacccagctcaagaaagagatggctgcctcgcagaatcgaaagttagtgcagcctccagaagggacattcttctaacgaagtgttcacttggcccgtcatgggatccaacagtaattgaaagttttatgggctaaaaaacagcgtctacatctggtgcccctacctgtctttgtgattttttatgacttttatgttcttgtatcgtgaaccgcagtgaacaacggttgttgcaagttccagggatatctttggaagtggtaaacaaatgcgtcttatttctatgtaatattagaccccgtgcgtgtgtggtttcgaggtacagctccctatcaactgttgccgtgcattccgtcgatttgcttga

SEQ ID NO: 120937 - DNA, 1532 bp, Zea Mays
tttgattcttaatttatttaagctggattatataatgtaaacgtaaacaaagagccactgattgctgctccacggtctaccgtgatctgataataacaaaacctgtactcctgtaggctgtagcccaacgagaggaatcaaattggacaaccctgtcgccctctcggtctccctcgagcttttcttgtgcgcagccgcagccgcagccgctgcttttcgttcgtcttcatcctacgcgagggcgaaacccacaaaccctctccctcccgtactccggcctacacatccaggggcgatgacgctgggtagctccggcgccggatcgagcgtcgtcgttccccgaaacttcaggctattagaggagctcgagcgtggagagaagggcattggtgatggaacagtgagctatggaatggatgatgccgatgacatctacatgcggtcatggactggtaccatcattggccctcacaatgtgagaacacaatctcatcctctttatatttcccgtgcctttatttaattaaggttagacacgcacaactgccaactactagtactttgctgcaactaccgcatccaacattaaaattttatctataccatggctaattaaattgaagggtaggtcaggtgcagtggtaagagtcctcgtttcacccaaccatcgagctgttcgaccttcaatagcatggagaaaaggatggtgactacaatggttgtagattgatgcatatatatgattaaccatggtagttctttctcctaaaatataaataaataaatttgtggatattccatttttacatcacatcacaagaaaactgcttgggacatgtgcaatccttgagtattcaaccatctgtaggtcttctctaacaacagcgcattcttttccatagagttgcttctcttggctatctaatttatttccacgtcccacaacatttctctttgtcagactgtacatgagggtcgcatctaccagctgaagttgttttgtgacaaggactatccggagaagccaccatctgtcagattccactcaagaatcaacatgacatgcgttaatcacgagacaggaatggttgatccaaggaagtttggtttgctagcgaactggcagcgggactacacgatggagaacatcctcacccagctcaagaaagagatggctgcctcgcagaatcgaaagttagtgcagcctccagaagggacattcttctaacgaagtgttcacttggcccgtcatgggatccaacagtaattgaaagttttatgggctaaaaaacagcgtctacatctggtgcccctacctgtctttgtgattttttatgacttttatgttcttgtatcgtgaaccgcagtgaacaacggttgttgcaagttccagggatatctttggaagtggtaaacaaatgcgtcttatttctatgtaatattagaccccgtgcgtgtgtggtttcgaggtacagctccctatcaactgttgccgtgcattccgtcgatttgcttgacgtctttcgtccaca

SEQ ID NO: 120938 - DNA, 1193 bp, Zea Mays
tttgattcttaatttatttaagctggattatataatgtaaacgtaaacaaagagccactgattgctgctccacggtctaccgtgatctgataataacaaaacctgtactcctgtaggctgtagcccaacgagaggaatcaaattggacaaccctgtcgccctctcggtctccctcgagcttttcttgtgcgcagccgcagccgcagccgctgcttttcgttcgtcttcatcctacgcgagggcgaaacccacaaaccctctccctcccgtactccggcctacacatccaggggcgatgacgctgggtagctccggcgccggatcgagcgtcgtcgttccccgaaacttcaggctattagaggagctcgagcgtggagagaagggcattggtgatggaacagtgagctatggaatggatgatgccgatgacatctacatgcggtcatggactggtaccatcattggccctcacaatactgtacatgagggtcgcatctaccagctgaagttgttttgtgacaaggactatccggagaagccaccatctgtcagattccactcaagaatcaacatgacatgcgttaatcacgagacaggaatggttgatccaaggaagtttggtttgctagcgaactggcagcgggactacacgatggagaacatcctcacccagctcaagaaagagatggctgcctcgcagaatcgaaagttagtgcagcctccagaagggacattcttctaacgaagtgttcacttggcccgtcatgggatccaacagtaattgaaagttttatgggctaaaaaacagcgtctacatctggtgcccctacctgtctttgtgattttttatgacttttatgttcttgtatcgtgaaccgcagtgaacaacggttgttgcaagttccagggatatctttggaagtggtaaacaaatgcgtcttatttctatgtaatattagaccccgtgcgtgtgtggtttcgaggtacagctccctatcaactgttgccgtgcattccgtcgatttgcttgacgtctttcgtccacatgtgcccagcagtattctctatgctcttgctttcctgtcatacttccaactggcactcgtaaaaactaatattacaatttcatagccgcgctctgttttgtgatgtactcgtgtttttcttgcacaaattgcaataacttcgatgga

SEQ ID NO: 120939 - DNA, 757 bp, Zea Mays
tttgatttttaatttatttaagctggattcgtaaacaaacagccactgattgctgctcgacggtctcccgtgatctgataataacaaaacctgtaggctgtagcccaacgagaggaatcaaattggacaaccctgtcgccctctcggtctccctcgagcttttcttgtgcgcagccgcagccgctgcttttcgttcgtcttcatcctacgcgagggcgaaacccacaaaccctctccctcctgtactccggccgacacatccaggggcgatgacgctgggtagctccggcgccggatcgagcgtcgtcgttcctcgaaacttcaggctattagaggagctcgagcgtggagagaagggcattggtgatgggacagtgagctatggaatggatgatgctgatgacatctacatgcggtcatggactggtaccatcattggccctcacaatactgtacatgagggtcgcatctaccagctgaagttgttttgtgacaaagactatccggagaagccaccatctgtcagattccactcaagaatcaacatgacatgcgttaatcacgagacaggaatggtaatctttgtcatgtctgtgtgagcaactgagcatgcacaaggggattcacacaactaatttgactattggtgcatccgtgtaggttgatccaaggaagtttggtttgctagcgaactggcagcgggactacacgatggagaacatcctaacccagctcaagaaagagatggctgcctcgc

SEQ ID NO: 120940 - DNA, 1076 bp, Zea Mays
tttgatttttaatttatttaagctggattcgtaaacaaacagccactgattgctgctcgacggtctcccgtgatctgataataacaaaacctgtaggctgtagcccaacgagaggaatcaaattggacaaccctgtcgccctctcggtctccctcgagcttttcttgtgcgcagccgcagccgctgcttttcgttcgtcttcatcctacgcgagggcgaaacccacaaaccctctccctcctgtactccggccgacacatccaggggcgatgacgctgggtagctccggcgccggatcgagcgtcgtcgttcctcgaaacttcaggctattagaggagctcgagcgtggagagaagggcattggtgatgggacagtgagctatggaatggatgatgctgatgacatctacatgcggtcatggactggtaccatcattggccctcacaatactgtacatgagggtcgcatctaccagctgaagttgttttgtgacaaagactatccggagaagccaccatctgtcagattccactcaagaatcaacatgacatgcgttaatcacgagacaggaatggttgatccaaggaagtttggtttgctagcgaactggcagcgggactacacgatggagaacatcctaacccagctcaagaaagagatggctgcctcgcagaatcgaaagttagtgcagcctccagaagggacattcttctaacgaagtgttcacttggcccgtcatgggatccaacagtaattgaaacttttatgggctaaaaaacagcgtctacatctggtgcccctgcctgtctttgtgattttttatgacttttatgttcttgtatcgtgaaccgcagtgaacaacggttgttgcaagttccagggatatctttggaagtggtaaacaaatgcgtcttatttctatgtaatattagaccccgtgcgtgtgtggtttcaaggtacagctccctctcaactgttgccgtgcattccgtcgatttgcttgacgtctttcgtccacatgtgcccagcagtattctctatgctcttgctttcctgtcatacttccaactggcac

SEQ ID NO: 120941 - DNA, 1907 bp, Zea Mays
gataatcaacaaatctcaccagtttgccgtccgcaccatagccgtccgcaccacggcgtcagactcagacccttcacattcccagttccctctgcgccccgtaaaccctagccgcgattcatggcccgcaagcgccgcgcgccttcgcctcctccgcctccgcaggaggagtcgtcctctgaggaatctggctccgaagagttggaggagcctcctcgcctccccgagctccgtagtcctccgcaggccgcggccaacaacgccgactcgtcggaggcggacacggactccgacaccgacgctcaagctttccagatgcgccaggtgccccgctccctcactaagcatacgcatccagttccccagccagaatccgatcccgaagaggaggagggcgagtcatcggagtcggagcatgagaaccctgtgcctgtggttcagaagaaggctgcggcggcggccgtgttgtccaaggcagagcaggaaaggaagagacccccctcggatcctgctcctaccgggaaggcaaaaaagatgaaggctgtggctacccctcttgccaaggcgaagaagggcaaggccgagctagagaagccggcgcctgaggccactccagcaggaaatgcaaagaagggcaaagctgagctagagaagccgacgtttgatgccattccagcaggaaaggcgaagaagggcaaggccaaggaggcagctcctgaggccacgccctcaggcaaggggaagaaggatggggacaaactagagaagtcagcagcgctagatccctcacattcagacagcaagtctgagaagcctgtgcgccccacatgggggaaagatgatgagatgaagattttggaggcccttgctgcgcatgtcaagcgtgagggtgagctgccaaagactgatttacttcttgctagtgttcgtgaccacctcgtcaggaagaactgcacctactcagatatctatgagaaggtgcgaaggctaaaggaacggtacaagaaagcagcgagcacgggcattgtgccaagtaaagaagatgggctccagatgtataatctctcagaagcaatctggggagagaaggcaatggaggctgctgctgccgttacgtctcaaaagggtggtgctgttataaagggtaagaagggccaggctaacaaagagaagatgcttgaaaatgcaaagagtgacgtgacaaaggagtctgcccctagtactgccaatcaaagtggtgattctcagaaagcaagtaagaaggggcaagccaggttgtcagaggaggctaccaccactgcctccccaagtaagagtaagaagcaggaaagtcacaatggggaattaaacaaagatgatggtaatttggctaagggaaagaaggggaaaactgacaaagggaagatggacatagatatggatcgtctgacaccaaaggaacccgtaaatgcaaatcagaatggtggcattgtgattaggagtaaggaaggagaaataaatgatgagggaacagaaggagatgctaatgtgcaaggtgtgcacagacgttttggtgagctccagaagttgtattccaaccttgctgtttatgtggaggagattgagacccatcatccgtgcggggaaactctgaaaagagtatttgagttcattgctgatgagaaggcagaagatctggaatccaagatcaagaagctaagagtagcacaggcgaaggcggaggtccgtcaagggaacataaaaaaggaggttcttaatttgatgctcagcttagtggactaacctttctgaattaatgtgaagtagccgcctgaagcatgcagattgtgtgggagttcgatttcacacgtgtgaaactgcacttgtctagtgactacaggggacagcaaaagttgtcacagatggta

SEQ ID NO: 120942 - DNA, 2266 bp, Zea Mays
gataatcaacaaatctcaccagtttgccgtccgcaccatagccgtccgcaccacggcgtcagactcagacccttcacattcccagttccctctgcgccccgtaaaccctagccgcgattcatggcccgcaagcgccgcgcgccttcgcctcctccgcctccgcaggaggagtcgtcctctgaggaatctggctccgaagagttggaggagcctcctcgcctccccgagctccgtagtcctccgcaggccgcggccaacaacgccgactcgtcggaggcggacacggactccgacaccgacgctcaagctttccagatgcgccaggtgccccgctccctcactaagcatacgcatccagttccccagccagaatccgatcccgaagaggaggagggcgagtcatcggagtcggagcatgagaaccctgtgcctgtggttcagaagaaggctgcggcggcggccgtgttgtccaaggcagagcaggaaaggaagagacccccctcggatcctgctcctaccgggaaggcaaaaaagatgaaggctgtggctacccctcttgccaaggcgaagaagggcaaggccgagctagagaagccggcgcctgaggccactccagcaggaaatgcaaagaagggcaaagctgagctagagaagccgacgtttgatgccattccagcaggaaaggcgaagaagggcaaggccaaggaggcagctcctgaggccacgccctcaggcaaggggaagaaggatggggacaaactagagaagtcagcagcgctagatccctcacattcagacagcaagtctgagaagcctgtgcgccccacatgggggaaagatgatgagatgaagattttggaggcccttgctgcgcatgtcaagcgtgagggtgagctgccaaagactgatttacttcttgctagtgttcgtgaccacctcgtcaggaagaactgcacctactcagatatctatgagaaggtgcgaaggctaaaggaacggtacaagaaagcagcgagcacgggcattgtgccaagtaaagaagatgggctccagatgtataatctctcagaagcaatctggggagagaaggcaatggaggctgctgctgccgttacgtctcaaaagggtggtgctgttataaagggtaagaagggccaggctaacaaagagaagatgcttgaaaatgcaaagagtgacgtgacaaaggagtctgcccctagtactgccaatcaaagtggtgattctcagaaagcaagtaagaaggggcaagccaggttgtcagaggaggctaccaccactgcctccccaagtaagagtaagaagcaggaaagtcacaatggggaattaaacaaagatgatggtaatttggctaagggaaagaaggggaaaactgacaaagggaagatggacatagatatggatcgtctgacaccaaaggaacccgtaaatgcaaatcagaatggtggcattgtgattaggagtaaggaaggagaaataaatgatgagggaacagaaggagatgctaatgtgcaaggtgtgcacagacgttttggtgagctccagaagttgtattccaaccttgctgtttatgtggaggagattgagacccatcatccgtgcggggaaactctgaaaagagtatttgagttcattgctgatgagaaggcagaagatctggaatccaagatcaagaagctaagagtagcacaggcgaaggcggaggtccgtcaagggaacataaaaaaggaggttcttaatttgatgctcagcttagtggactaacctttctgaattaatgtgatgggcggatagaagatttgatcaacaaaaggtgatgtgtgttgaatttatgggaaagatgcgagcagtgagcatattttgcaatttcatggtggtgagcattagtgatacatatttgtattttcttctaagctactgcttaagctgttgatcctgctaatccctacatctgagctagcatttagctttagcatgtatgcttaatgcggtgctaaattattggaaactcctttcattgagttttgacatgaaaaatctttgttaggtccagcactccagttaatgatgcaagtagttttgttctgttatcattcccctgtagatttttctatttttagtgtaagtttgtatctgttatcagggtaacgtggtttgtccctgaagtctgaactgagaactgaatatgcatgagttctcaaaccagtttgcttgaattgatctgtgtggttgcgattgatgtatgtca

SEQ ID NO: 120943 - DNA, 2248 bp, Zea Mays
cccgtaaaccctagccgcgattcatggcccgcaagcgccgcgcgccttcgcctcctccgcctccgcaggaggagtcgtcctctgaggaatctggctccgaagagttggaggagcctcctcgcctccccgagctccgtagtcctccgcaggccgcggccaacaacgccgactcgtcggaggcggacacggactccgacaccgacgctcaagctttccagatgcgccaggtgccccgctccctcactaagcatacgcatccagttccccagccagaatccgatcccgaagaggaggagggcgagtcatcggagtcggagcatgagaaccctgtgcctgtggttcagaagaaggctgcggcggcggccgtgttgtccaaggcagagcaggaaaggaagagacccccctcggatcctgctcctaccgggaaggcaaaaaagatgaaggctgtggctacccctcttgccaaggcgaagaagggcaaggccgagctagagaagccggcgcctgaggccactccagcaggaaatgcaaagaagggcaaagctgagctagagaagccgacgtttgatgccattccagcaggaaaggcgaagaagggcaaggccaaggaggcagctcctgaggccacgccctcaggcaaggggaagaaggatggggacaaactagagaagtcagcagcgctagatccctcacattcagacagcaagtctgagaagcctgtgcgccccacatgggggaaagatgatgagatgaagattttggaggcccttgctgcgcatgtcaagcgtgagggtgagctgccaaagactgatttacttcttgctagtgttcgtgaccacctcgtcaggaagaactgcacctactcagatatctatgagaaggtgcgaaggctaaaggaacggtacaagaaagcagcgagcacgggcattgtgccaagtaaagaagatgggctccagatgtataatctctcagaagcaatctggggagagaaggcaatggaggctgctgctgccgttacgtctcaaaagggtggtgctgttataaagggtaagaagggccaggctaacaaagagaagatgcttgaaaatgcaaagagtgacgtgacaaaggagtctgcccctagtactgccaatcaaagtggtgattctcagaaagcaagtaagaaggggcaagccaggttgtcagaggaggctaccaccactgcctccccaagtaagagtaagaagcaggaaagtcacaatggggaattaaacaaagatgatggtaatttggctaagggaaagaaggggaaaactgacaaagggaagatggacatagatatggatcgtctgacaccaaaggaacccgtaaatgcaaatcagaatggtggcattgtgattaggagtaaggaaggagaaataaatgatgagggaacagaaggagatgctaatgtgcaaggtgtgcacagacgttttggtgagctccagaagttgtattccaaccttgctgtttatgtggaggagattgagacccatcatccgtgcggggaaactctgaaaagagtatttgagttcattgctgatgagaaggcagaagatctggaatccaagatcaagaagctaagagtagcacaggcgaaggcggaggtccgtcaagggaacataaaaaaggaggttcttaatttgatgctcagcttagtggactaacctttctgaattaatgtgatgggcggatagaagatttgatcaacaaaaggtgatgtgtgttgaatttatgggaaagatgcgagcagtgagcatattttgcaatttcatggtggaaaccaagcaaggggctactgttggggttagggagaaggtacctcacctaaggttcatcttaacataagccattgtttaaacaaactttcaagattgaagcgtatggaaagagctttgaatcaagacgaagctggtcaatgagaggtcgaagctaggaggcgtcgccgaaggagatacatctctaggacatgtgaatcttcagtaaaggggaacagaacaagaaggtcagagagagaaaatgtgtatgatatttcatgcaattgtatcccctagttctaaagatattagtaggaagggcattcttataactttatgaatagaggaacaataccgctgctatagggattaggcattttgtaatctcgtgtctacatcttcttccgatagagctacttgtctcaatagatcttccgaaggtataacgataatgaagctttattattagcata

SEQ ID NO: 120944 - DNA, 965 bp, Zea Mays
cagttgatcactaagatattagttttgttgaagggacttgagtcctcaactgcagtggataaaaaaaaaatctctgctcagaattattgcccaaactaggaacttatacatgaataagattgaggtttagcgcagagatgtgttctgagcctcttgcaacatgatggtcttaacatataaatgatttatgagttcaatttgtttttgtgatatcattttgatttgttacatagaagataataaataccttaatttcctaatcctcttaaggactctcctcatcatttgagaccaacttgaaactacataaaaaatggatccaactcaatattacatctgaattttactcaaccacattctgctataacgggttcatgtagaactctttatgtagagatgtctatttaaattgtattttcatgcacattgcatttctgttttcttttactttttatgatattccattgtgtatgcacttatatgagtattgtttattggttataatcagatgggcggatagaagatttgatcaacaaaaggtgatgtgtgttgaatttatgggaaagatgcgagcagtgagcatattttgcaatttcatggtggtgagcattagtgatacatatttgtattttcttctaagctactgcttaagctgttgatcctgctaatccctacatctgagctagcatttagctttagcatgtatgcttaatgcggtgctaaattattggaaactcctttcattgagttttgacatgaaaaatctttgttaggtccagcactccagttaatgatgcaagtagttttgttctgttatcattcccctgtagatttttctatttttagtgtaagtttgtatctgttatcagggtaacgtggtttgtccctgaagtctgaactgagaactgaatatgcatgagttctcaaaccagtttgcttgaattgatctgtgtggttgcgattga

SEQ ID NO: 120945 - DNA, 210 bp, Zea Mays
cgttccggtgggtttttaaaaaaatatttttatttatatttttttatttttatatatgtttatattattttttatatatatttatatatatatatatttttatttttttatttttttttttttttttttttatatatatatatttatttttttttttatatttatatatatatatatttttttatatttatatatatatatatatttata

SEQ ID NO: 120946 - DNA, 1507 bp, Zea Mays
cgtcaagctcatcttctcccctctgatttttccgccgccttcttccgatgcttatcagccgccggtgggatatttttcctggccgccctgatctttatctacgcgcgtcgttctcttctccaaccggccagcaatccagttcgttcggtgcctgctctgctcgacgtttctctgctccagcgtccagcctgcaagcagccaagcttcctcgcgtctcctatggtcgagcgccctccccatctccttcctcgccctcagctcggaccgtgtcctgctctcagctcccttgccgtggagttctctgtgtacgttctggttcctgctccctctcctatggtggccgcgagctcccctgccccatgatgccgtcgccctcaagctcgtgccccgctcgccatggccgccgtcaagttcctccctgaagcttccctgcgcacggatctctcctttcccctgctcatcttccccgcgcgcgcctgctctgtccatggccgcgtccagcctctccagcacccggccggatcttccatggtgcgcgccacctgctcctccctgccccagccgcgttcgaccaaacgttcctgcgccctgctcgctccctggagcttcttcctgcgcacgcgccgtgctctcagcttggaattcccccgttgttcagctcatcgcgcccggctgtttctcccctgcgcgcagctgtgccctctactcggattcctgttggccgcgccccctgttcctccgggccggtcaagttctttccggccgcgagctctctcatgtgcgcgttcagccgaggctcctgctccccacgcgcgtccctcggtatctgctcggatttcggccctgcccagctgttcctcctctctgctcgctctcctccatggtcgttgtgggctcgccggcgtggtccctgccctggccgccgtggtggcgcgcgctgctcccctgagctctcctctgcgcacccggcctccaactttcctcccatagcgccctgctctgtttactgctcgtcgctcgcttggaatccttgctggcgctcagccccgttgtgcgcagacgaggttgcgtcgtcaagctcgtcgaacctcgttcttctctgctcgatctcgtcgaaccccgaatccagatattagacaaaaataagtgaggtctctgtgtatcgcttatcaagtactcgattgaagacttcaatcgaagatcgtcgccgttccgcgcgtcatcaagaatcccaagaatcgggtgaagacgaagctagcagcgcgatattccccaagcgctcgacaattgcctggatcggaaaatcactaccgatctcgcggattcgagtcagctattgaaacggtacgttaattaatcgcgtgatgcggaagacaagccaagtcgaccccaagcgcgggctaaccagcaggatgatgcagatggataacccgatcaagtaccaagacaaaggctgctcgtcaagcgaacgtcgtctaacaacactaacctagtgttactcaggcaa

SEQ ID NO: 120947 - DNA, 591 bp, Zea Mays
atggccgccgtcaagttcctccctgaagcttccctgcgcacggatctctcctttcccctgctcatcttccctgcgcgcgcctgctctgtccatggccgcgtccagcctctccagcacccggccggatcttccatggtgcgcgccacctgctcctccctgccccagccgcgttcgaccaaacgttcctgcgccctgctcgctccctggagcttcttcctgcgcacgcgccgtgctctcagcttggaattcccctgttgttcagctcatcgcgcccggctgtttctcccctgcgcgtagctgtgccctctactcggattcctgttggccgcgccccctgttcctccgggccggtcaagttctttccggccgcgagctctctcatgtgcgcgttcagccgaggctcctgctccccacgcgcgtccctcggtatctgctcggatttcggccctgcccagttgttcctcctctctgctcgctctcctccatggccgctgtgggctcgccggcgtggtccctgccctggccgccgtggtggcgcgcgctgctcccctgagctctcccctgcgcacccggcctccaaatttcctccca

SEQ ID NO: 120948 - DNA, 1727 bp, Zea Mays
ggtgttttccccttcccgcaaggcaaccaaaccccgaaagcggagccgccctcacctgaccaccaccttcttcttcccagttcttccgcccgatgcctccgcatcatcacgcccccctcccgcgaaaccgcgtctagggttctcgccttcacccacccacccaccctactctcctctccccttttcccttccgcaacgtcgccgccgccgtcgcacgcagatggcactcctcggcgacgcgctgcggcaggccttcttgatgccacggcgcgcctacgcggcgctccgcgacgacgagcagtccttcccgccgcgtctccgccgcccgctggccgtgaccgccgcctgctgtgtcgccgccgctgtggcagctgccgcgtgcgtcagcctcgggatcgtgttccctgccgagcccgcggagcggcccttctgccgggagcgccgcatgctggaggcgctgcctgccgccgccagcagcagggaggaggagcccgaggcgtaccggtaccgcgggggtgccttctacatgaccaccgctgaggccgccgacttctactggatggtcgtcttcgtgccatccgccgtcctctttggcgcctcgttcacctaccttgtagctggaatgtctgttgcatatgctgctccaagaaggcatccgatgatctgtgttgttgagaacaacttttgtgcttctagaagaggtggcgttcgttgcctggctatacttaatgtggttttcgctgtaatattcggtctcatggcaattattcttggatcaacactgctggcgctcggaagtacctgttcagttcctcttttctggtgctatgagataacagcctggggtttggtagtcttatatggtggcacggccttcttcttgagaaggaaagctgcagttgtccttgacgagagcgattactctacccacaatgtgggtctagagatgctggagtccaaaatggaagtgactccagagatgcagcgccgcatcaccgatggtttcaagcagtggatgggttcgtccctcctatcttctgatgacgaggaggaagcctcggatgactacctcgagcacgatgttcctagcccgactgccttaggtcaacaacaccagcatgagcatgatcgagagacctgactgctgtataaataaatgtacatagagcgtcccacttattcgttgaggtttgatgtagtaagtgccgggttcgggttcgattgctaacaagtgattgcctttgttctttttccataatagagggattagttagcttctcaagttcatatttgagttttgctgtttcaatgccattcatacacatgcaaaaaagtagatagcatatgtgtgggctcattgttcactggtgtcgaaagtcacgtggagtccttttagctcccccgagtgggctgatttgatgggccgatttgatgataagggaattggaggtccacaccttgctattttgtcaccaaaccagccctaagattgtacacagagatagcctcgaggtgctgaatgagtggggtctgttcatgcaaattggatcattctgtacacattgtatggtttcacatttttcgtcgctttatggcatatgtaataagttgtgcatgttatttgttttttgctatttagcgaaaggcgaaagtgatgtcatgttgtgcacttctcgttaggaggttggaccaaactcctgctttctgatgtcaatccgtgaaaacat

SEQ ID NO: 120949 - DNA, 1430 bp, Zea Mays
ccgaaagcggagccgccctcacctgaccaccaccttcttcttcccagttcttccgcccgatgcctccgcatcatcacgcccccctcccgcgaaaccgcgtctagggttctcgccttcacccacccacccaccctactctcctctccccttttcccttccgcaacgtcgccgccgccgtcgcacgcagatggcactcctcggcgacgcgctgcggcaggccttcttgatgccacggcgcgcctacgcggcgctccgcgacgacgagcagtccttcccgccgcgtctccgccgcccgctggccgtgaccgccgcctgctgtgtcgccgccgctgtggcagctgccgcgtgcgtcagcctcgggatcgtgttccctgccgagcccgcggagcggcccttctgccgggagcgccgcatgctggaggcgctgcctgccgccgccagcagcagggaggaggagcccgaggcgtaccggtaccgcgggggtgccttctacatgaccaccgctgaggccgccgacttctactggatggtcgtcttcgtgccatccgccgtcctctttggcgcctcgttcacctaccttgtagctggaatgtctgttgcatatgctgctccaagaaggcatccgatgatctgtgttgttgagaacaacttttgtgcttctagaagaggaacatttgggaggatgactgttgaatgtgcgccactggggagtatgagtatgggaggcagtgaagcagatatccttgtgtttctggcacgggcgcttgtttccatagtgtaaccatcaatccatgcatatgtgcaggcctaggactgaggtggcgttcgttgcctggctatacttaatgtggttttcgctgtaatattcggtctcatggcaattattcttggatcaacactgctggcgctcggaagtacctgttcagttcctcttttctggtgctatgagataacagcctggggtttggtagtcttatatggtggcacggccttcttcttgagaaggaaagctgcagttgtccttgacgagagcgattactctacccacaatgtgggtctagagatgctggagtccaaaatggaagtgactccagagatgcagcgccgcatcaccgatggtttcaagcagtggatgggttcgtccctcctatcttctgatgacgaggaggaagcctcggatgactacctcgagcacgatgttcctagcccgactgccttaggtcaacaacaccagcatgagcatgatcgagagacctgactgctgtataaataaatgtacatagagcgtcccacttattcgttgaggtttgatgtagtaagtgccgggttcgggttcgattgctaacaagtgattgcctttgttctttttccataatagagggattagttagcttctcaagttcatatttgagttttgctgtttcaatgcc

SEQ ID NO: 120950 - DNA, 1968 bp, Zea Mays
atggagtttgggcctgaagatgacaaggttgatgacgatttggatttcacattctcaagggtgagaatgatggcaaagccaaaaactgatataggccattcatgcaaggatgctcaacatggccttgcgatttccaagatggaagtcggttctaccaccagggatggtcgtttggaagttgggaaggagaagcaaggttgtttgggcctctccctggcccaggtgttcagacattcctggaggcccattaacccgaaatggttatgggtgcccaggtccaacattctctcaggtaaaggataccaggcaagaccagaagaggttcgccggctagggcaaagggctagacgtatcaagagagttgagccaccgacgccatttgtgcgatccttttctcaggtggttaaggagggaaggatggcgtggagaagagaatcggggggaaatagctggaagcgacccccaaaggattggatggaagaggatgacttactggattcggagttcagcagggaggaagacctacgatccaagctccagagggccccaggggaacacactgagcaggatcagcaagatgtggggcatcatcgtcaaggaagctttacaggtaacaaaattcctcggaggggtggtttctggagagggcgtgggaattttgtgccagctaggggtggctttgggggttttcgctctgttgataggaatgagacagggggtaggggaagcaaaaaccaagaaaatcgtgatagggaacaaggctctcagccatgttcagagaggggaagaccttctggttttggagtttgcatgcagcagggcagggattctaaaatccaggaaggtctggtcaaggagattagatgcttccgttgctctcaatctggacaccatcaagctgactgcccgaatgaccctctatgctacaaatgtaaagagtctgggcatatggcggcggaatgccaaaataacaagaaacttaggttgtttggatttggaattccggagcagggcttctttggttttgatattcctgagaaaaaagtgcaggtgaatatgttgaatgctgttattcacattcttgagggggaacccacagaagagaaattggacagagagcttaaaatctggtgttcggtggatgatcgggccaaggtggctcctgagaaatctcagattgaaatgatgaaacagagagtggatgatcagactttctgctcaaacaaagagattaatacacttacaaacagtcgggtcaacagaaacagtattgggctggatggtatgaatcattttgggggaagaattaaccttcagcttgctaaccaggagaaaaaggatcaggatttgaagctcatgctcgatgactttccaatagaggacaatgaggaagattggcatgggaacataatggagcaagttgagctttatcacacagaagaagatggtgaacatgaatgggagaaggcactaagcaagaaagggaagaaaaaaagtagaaggaactttccagtgatagctacaagagccagctcgagaattgccagagatggaattcccatacttgagaaagccaccaaaagagctcgtgagaaaaatcagctacaaggtacttcacgtccaaatccttttctcattctgaataatgaatctaatgaaaacctgtctactgttatgaaagatataggcattgttctagaaaattatgacaatcaaatagatttgttcaaagctgaagagcgggttagagccactatagctgaagctaactataacaagtatgtggataaaattaacagtaaaaatgcccctcaaactgaagaggacctgcaagaattagccatggaggctataacaaataaagagagattggaggctcctttaatttcccaggaaggcccagggggggctgaacccgagaaaaataaaaagaaagggagacctgggaaacagtctaaaaaaggataa

SEQ ID NO: 120951 - DNA, 2281 bp, Zea Mays
attaagcaagaattttcggttagagagcttaactggatctcctctaattgttgtttccaatggaattggattcccgcgagaggtcattctggtggtattttactaggggtcaaggaagactctctcgaggtggaaaattgggaaaacttcaattttgctattaaggctacggtcagaaacaaattcagcaattaccgttgggtggtgttgtgtgtttacgggcctgctcagcaccaccagtctgctagttttctacaagagctgtcggagatatgcgaaagggagacccttcctgtggtgttgggggtgattttaatttaataaggaataggcaagagaagaattcccataatatcgatcagagcctcatgaacatgttcaatgaatttattaatctctacaagcttcgagaaattgccaggggggccctcagtatacttggactaataatcaagttaatccggtgctagttaagttggacaggttccttgtttctactgagtgggaggagagattccctctttgcttttctaaaggattaactagagtggggtctgatcattgtcctattgtgcttgactctggtgagaataatcctaataaatctcattattttttctttgagaataactggcttctccaacaagacttcagggctttgatttcgcaaaaatggactgatcttaaggatcgtaggcctgaaggttcctactcgatggatgggtggcatgggagcctggtttctatcagaagattcttaagagggtggaacagacaaaaaagaggtgatcaaaataagattaaacaagatctgttattaaaactaaaaagcttggatgatggtttggttatgaaggacaatcttccccaaaattggaacgaaagatatagagttgagaaagaattagagcatgtgtatcatatggaagaagtgtattggcaacaacgggccggaaaaaactggattctcaaaggtgactctaattctagttttttccacctgtttgctaacggtaggaggaggaaaaataatattctacagttggtggcagattcttgtaccttggtggaccagaaagatattagcaatcacgtggttgatttttataaacagctttttggaccatctactccttgtgcgatgaagttacgcgagaatttctgggaaggtagaagtgaattatcaattgaggaggccattcacctgattaagccttttgatgaagaggagataaaacaggtgattgaccttatgcatgttgactctgccccgggtccaaatgggtttggagtggccttcttcaaaaacttttggcatataatcaaaggagatcttatgaaaatgtttagagatttccatggaggaaatttagatattcagaggctgaattatggggtcatctccttggctccaaaaattaaagatgccacctcgattaagcaatatcgtccaatttgtcttcttaacgttgatttcaaaattttcaccaaagtcctttctagtaggcttgcccaggtagccaaggtggctgttgggggcaatcaaacaggcttcataaaaaacagaaacattcttgaaggagtagtgatacttcatgaggtaattcatgatttgaaattaaaaaaacagagaggtctgattctgaagattgattttgagaaagcctatgataaggttagatggaattttttagctgaggtcttaaaattgaagaagttcccggacagatggaccaatatggttatgagaacaatggagaatgggaaagtgtgtgtgaacattaatggtgagaggagtaaatattttaagacttttaggggtcttaggcagggcgaccctctctcccctttacttttcaatttggtggctgatgctcttagtgtgctgttggatgtagggattgccaaagggcacatctctggagttttgaacgatgttctaccaggaggtatttcacatatacaatacacagatgacacagtgattatgattgatgggtcaaaaaaaacaattttaaatctgaaattaattttgtattgctttgaatggttatcagggctgaaaataaatttccataaaagcgaggtctttgtgtttggagctgatgaccaggaggaaaaagagatggccaatatgcttaactgttccctgggatccttgccgatgaaatatctaggtatatctatctctgatcataacattaactcagtaatctcggagcctattttggagaaaatgaggaaaaggctagacccatggaagggcaagcacctctcttct

SEQ ID NO: 120952 - DNA, 279 bp, Zea Mays
atggacaaaaatgccagagttgtagattattatgaggaaggggagtggcatatcgacctcaagcgccccctgacgattgctgattttcaggtttgggatgaacttgttactaagcttgtcgatcaggagctcactcatgggagagatgaggtgaaatggaaggtgttgctatctgaagatgaccaaagcatgttagagaagaaggtagaggaggtgcagtcttggatcttcagcttcaaaagtgttgatggagggggaagcgacatagtagtgatttga

SEQ ID NO: 120953 - DNA, 1461 bp, Zea Mays
atggacaaaaatgccagagttgtagattattatgaggaaggggagtggcatatcgacctcaagcgccccctgacgattgctgattttcaggtttgggatgaacttgttactaagcttgtcgatcaggagctcactcatgggagagatgaggtgaaatggaaggtgttgctatctgaagatgaccaaagcatgttagagaagaaggtagaggaggtgcagtcttggatcttcagcttcaaaagtgttgatggagggggaagcgacatagtagtgatttgaagtattagaaaatctttgttagagatttctctacactttctggagtgtttcagagtgttttactcttagctggtggttcacctttgctgggaggaaaattctggaggtttttctttttctttttggtggagttcatggctcctgtgtgctgtctatattacttctagctgatcggttcactgattgcatcttggctatgctagtctataggttcctttagttctggtggttggttgtctgatgattgtaaactggtatccccagtatgtgtttgaacattgttatatgctttcttaaaagcagagtaaaatctcgtttcaaaaaaaaggactcttttgtatactggtgcagtgtacggaactacggatttgggcatttggcagcacatccacatcagttaccaattaaacaagaaaaaagagttaaaattgtgtgttatgttgaataacttgaaaaggcatcaggatactttcggtttaggtcctgtctggaagcaacccagtttttaagaaactggttttatcttttagctaggagagaccaacctcttggtttttaagaaattggtaatccaatttctataaattgaggcataaactggtatgtttggaggcaacttaattttcataaaccagtttcttgggtcaacggccctgttttcttgcttcgaccacttgagttctatctctgcctaagcaaaatactttctccagaggccagcgcaactggcaaggtggactgggggtggagcagtagtacaaaactaggaaagcgatgtttccagtttccacaactatcgatatcaaacgtgaatagcaccaaacatttaaatggctggtacaagtaataatattaccgatatatctcattacgacggcgaaatatataaaaaataaatcctacagaaagcagagacacgatccccactcccaaaattcagcgagatatatattatcaaatgatagaaggacaaattaaataatgaagaggagggaggagagatctgaccagtgagcacgattgccttaacgtcgtcacggcgcaaggcctccgcgtacttgtccttgagccccgcgatgactgcaggcgatgttggggagcacgacgccgggattagaccgcaggacgaaactccaccgaaaggaaaatcacgacagaattgaacaccgaggaagaagggag

SEQ ID NO: 120954 - DNA, 411 bp, Zea Mays
atggcacgagaaaggggcgccaggcaaaccgattcgaccagcagacactgcgacgaggactggccgcgggggctgtcgcgtgcacagccacgtcggaatcaaatcctctacagtaacatccttttgacgtatggggccaggcaccggtcggccccacacgtcaaggatgagggcagcaagagcgtcatcgccttcgtggtgtgggccctgacgggtgacggctacaagtttgagaggcctggaacgctggagcatacctacaactatggtgtcaccgacaccgagtatgacaaggggaattgcatatgcccaggtgttcgtcaacgacatcgactttgccaaggaacaaatgagctcaaacactctgcgaacaggattctgtctcgaaaacaagaacaagcgttagactaa

SEQ ID NO: 120955 - DNA, 195 bp, Zea Mays
atgagccacagcatgtgtttcttcaaagttgcggtcacagttatagatacatggatgctacccaatcataagcttcccagacctcttcatagtctttgtatggtgctatttggtgtcatacattgcaagctgcggccaatccaagtagaatatgacagcctttcagcaaagagggtgtatgctaaccaaccatga

SEQ ID NO: 120956 - DNA, 1016 bp, Zea Mays
ctttttcctggtgtcacggacgacccaagaagacacgggactcggtagtatagtggatggtcagtactgcggcaggccgcactcggttggcttgacgccgttgacccacctcttggagtcgacgcagtagtcgtagatggcgtagtctttctgcaggctctgcatgagcccccgctgctcggggctgagctggcacgccccactgttgggcgccgccgccgccgcgcagttggtgctgcaggcgtagccgccggggcagtcgcagatgtcgaggtggatgttccggtagttggcgacgaagggcgccttggaccagtcggtcttgacgcggccgccctgcgtggcccagtcctccgccgcccagatgctggagtatgcgtgcatggggcggctcgtcgggtacgccacgccgtagctctgctggtagttgcggaacacgcggatggggacgctgtcaacgtaccacctgtatgcaccgacgacgtagtaaatgggatatgtcaatatgggtaggcaattcatttcatttcgttctatagttcttttctatagctctcttacacgatcatgcaggggctccaggagatggtgtaattgtggtagccggtggtggggtcgaaccagggcttgaactgaatctccttgttgcccacgccattggcgtagatgttggtgtggaaggtgtatggttgcccgctcacgttgcccaggaactcgaagtcgatctcatcatggttgtctccaacagaggatgcctagtacgtggtgacagtgccggccgagttgcctgggacgagctggatgagtgttgacacggtcccatagacgtactgcttctttgtcctcagcatgcaacctgagttgctgaccagcgccatggagaggccgttgccgtcgctcgtaaacctggcgttctggggctcccacgggatgtcgcagtcgtcccggaaattggcagcggcaaggccggccaccgcagcagcggtcactgcaacaaggaggagagccatcgtcct

SEQ ID NO: 120957 - DNA, 588 bp, Zea Mays
aagcttattgtatttgcatatgtatagtgctcagatgggatctcaaatgggaccccagttcacccgttcgtcacaatctggacagaccctaaacaccaacgaaacacagggttctgagactggacaaggaaacccacagatggacatgcagtggtcgatgcctcctagaggacagattcttcctcctccataaccaggtatgggatattggccgccaccaccatggggatatcctacacatccaatggggccttggggacgcccccatggccaacacagccacttccatcaccagcggattccggctctcatcaagtgactcctccccctcacgctgactttgcggacagatgtctcaattctagtggtggagctacgaacaacaatccgatgtcctgatcgagagcgatgtagctaatgtttgaacttgtgtgtttgaacttgtgaactaaaaatgtgaactatggatgtgaacttatgtgaatttgtgcacttatgtatttggacttatgtgaatttgtgaacttatgtatttggacttgtgtgaatttgtgatatgaacatatatccatgtgtttgaaatctata

SEQ ID NO: 120958 - DNA, 1785 bp, Zea Mays
atggacaagctgcaggccggaagcggcggtggcaaggcccgcgtggctgcggccaagcagcaccgttcgtcgtcggcggcggtgccggccgagatgcggctcgaggcggccctcacgaggaggtggtggtggccgccgttgcggaaccgcgcaacggtgaggacgatggccctgccggccctcttcgtcgtggcggccgtggcggcggccgccgccttcgtgctcaccgccggctggggctcctcctcgtcgaacgacatgccgacgtcctctttcttcgacggctcggaacctccgttgaacatcaccgacgagcattttctggacggtcttcttagcgctgatttccgctatatgtcgtgccggagtcgctatgagttcgccgtctaccacaagacttcgtcgcacaagccgtccccctacctcatcgctaacctccggaagcatgaagcgctccagaagcgatgcggccctggaacggccgcgcacaagaaggcagtccggcggctcgactccggtgagggcgtcgtcgacgatgacgatggctgccgctacctcgtctacatcagctaccgtggcctcggcaaccgcatgctcggcattacgtcggccttcctctatgcggtgctcaccgagcgcgtcctcctcgtcgacggcggcaaggacactggcgcgctcttctgcgagccctttccaggaacgacgtggctgctaccgcaagccggctggttctccttctccccgctaagtagactccaaggctacgagggcggctccaaggagaacctcggggacatgctgcagagcggcggcatcaccgtgtccgccgacgggaacgtgtcgtggtcggcgccgcggccgccactgtacctgtacctccacctctccggctcctacggatttcacgacaagctcttcttctgcgacgcgcaccagagactcctcggcgaggtgccgtggctgttcatgtggacggataactacatcgtgccggggctcttcctcacgccagcgttcagcgacgagctcgaggccatgttcccggagaaggagtccgtgttctaccacctcggacggtacctcttccacccgacgaaccgcgtctggcacgccataaagagctactaccacgccaaccttgccgacgtcgaccagcgcgtcggcgtccagatcagggtgttccagaagaagcagccgccacggttcgtgctggagcagatcctgtcgtgcctccgcgacgtgaagctcctctcggggacgaagacggacgcggcaggcggcggcaacggcacgtcgtcctcgttctcgcgcgccgtcctggtgacgtcgctgagctcgtggtactacgaccggatcagggacgagtacggcggcaggatctccggcggcgtgcaccagccgagccacgaggggcggcagcggtggcgcgacgcggcgcacgacatgagggcgctgagcgagatttacctgctgagcatgtgcgacgtgctcgtcaccagcggctactccacgttcgggtacgtcgcgcaggggctcgctgggctgcgtccctgggtcatgcccagggcgccgatgtgggctgccgactggagggaggagctggacccgcgagacatgccgtgccggcgggcagactccgtcgagccgtgcttccacgcaccgtcggcctaccgctgcgcggcggggagggacgtggacctgggcaaggtgtcgccatacatcagacgctgcgtcgacgttaagtacggcataaatcttgtcaatgaaagcagcggacagtggtaa

SEQ ID NO: 120959 - DNA, 691 bp, Zea Mays
tcacagttggattgtggcaacatgatccagagctcctcatgagctaacgtgtttctaattcgcaggttggctgacgccactgttgcttgcttggtgttgcaatgtggtgttggtggtctggaattggtgaattgcatgttagcgatacaataacacagacaggacaggagatggattgtttgataaatttattcctgcgtcgctctgcctcgacggctcatatctatacgcgtgcttgtgtatgtataagccctttttcaaaacatggcagattggctactttttgatgagatgtagtagtatctgtaggagcaacagctgtagtattatatgcattcgtgtttgtgcaatgcaatgcaatgcacatcaaaacccttgtgcggttgtccctggccatctgaagggacgacttatttgttcatgtcgctggtcttgaatctgaactaatattttttacatatttttcctttatcatatcatattttttcggtgttcatggatctgccccggcggcggaaataattgtgcatacacaattgacaaagtatttggctttgttcaattaaacaaatgtcagatacagattattctccgaactgttgatatttcaaagcaaaacaaacaagtcttggtcccaattgtacaggaaacaaaagagcagtacttctgtgcttttgaacgaggttcgtca

SEQ ID NO: 120960 - DNA, 323 bp, Zea Mays
gtctggccgctggtgcccggcgccaagctccacgccgtcgtcgacgcgtgccacagcgattccgtcctcgacctccccttcctctacaacatgtccaggtaatttggaagctcatcgtccagtgctggaatccccgtgcccatacatctaaaacatatctccattcctctctctgtctgtctaggactgggaactggcagtgggaggatcaccgtccaccgtcgggcgtctacaagggcaccagcggcggccaggcggtgcttatcagcggctacagcgacggcaaaagcaagttcagcatggtcagtgcactgcactgcaca

SEQ ID NO: 120961 - DNA, 1168 bp, Zea Mays
ctgatcttttcacacaagtgaaggatccacaaaagggatttgttcactgtggaatgatcaagcatgctaaacatcttagttgtctaacttagttcttcagataaacaatctgtcctttttttaaatgtcatatttttgcttcatggaactactcgtgtcattctataaggcaaatgggagccgcaaaccaaataggaaaatttctatggagacatgctagtgaggagcagtttagtcggttcttgctttatgaagtggatgcaattagaaaggcgtgtgccagcttggaagagggctaccttcctccagttacattcattgtggtgcaaaagcaccatcacacacgattttgtcctgaagatcattgttcacacaaacagacagatcgacgtggaaatattttgctaggatgaactagatgcaaaacctgaagaactggaaggagaagagttggaatctcagcttctagagcttgttgcagctctttcgatgcatctagtgcatgtcccaggcaacaagcaaccagctcgccctgcttcacagaaagctacagctaaagacgataaattggctgcactgcaagctgaaatggcattatgaacaggattaacgcatggaccaaggaagcgcatgacaagcttgatagcgtggaactgatgaaagggatggtctctgctacatgtattattgtccatcccatctttgtttaatgctcgcagttgctttatacaattattcctacctatgctagactgtgagacattatatatcaatgtattttatcatattgattccgcagatctaggggctgtgtgcgcacttagaatcaaaggtgcagctgccaaagttcaactagcatttgtttgcactttcgtaagtctatggccatctcaattcagaacatgcagtataccatatggtctgattacttttggtgcttaggttccttttgacatggctacagattctttttacggaacaagaagacatcccatgaaaatccgtccctcacatatacacaaaaatgaatctatttgatggaagcaggtaactattctttgtgatcccaatatttcccagccctcctcagatagcagcttggaatgcaccattttatgactgagttcttcaatttgaagtatataaacatcgcaatggtcatgatatt

SEQ ID NO: 120962 - DNA, 1620 bp, Zea Mays
cccaacccagaatcaatttcctcgcgccgctgtcccttcgtttccccagacagtgcagaccgaaccgaacaggcgaacagacattggttttccccgccgcgcagcgcgcacacgcctgcctgccatttctaaatccggggccggtcatcctctcttgtttccgtggcaaccgcgcctctcctccttccttgcagcgtgcccctgcggggggctgcgcgtggatctgatctcgtcaattgtcgtgctatgtttttctccagcggcacgaagtgaagaacacgtttttgtgacgccatggctgtggaaagagatatatttggaatttctgggccaacgtatctgaaatcaatcgattgttctcacaattcattgacttgaggaagtaactatctctcattatcaattgtcaaaaggaactgtgagcataatcggagatctgtggctgcaagcttagttcaggctgtatatgtgttggagagagaccggcaactgaatcatcaatcttttgaagccttggcacctgcttggtgggaattcctccattttgagctgattcgcaagctgattgatgatgctgatatgtccatatttggtgcaatatttgaattcaaccctccaaaggaggaagcttctggtgcaaatgctccaagatttgtcatcgcattcagaggcaccataacagagaaggatactatctctagggacctttccctggacctgcaccttgttcaaaatggtctccacaggacctcgagatttaatatagcaatgcaagctgttcaaaacgtagcctcggttttccctggatccacgatttggctagcagggcattcactaggcgctggcctggccatccttacgggaagaaacatggttaagaagggtgtgcttttagaaagctttctcttcaacccaccgttcgttgctgctccagttgaaaggatcagggacgaaagggtaaagcacggatttcgtattgcaagaagcgtgattactgctggattgactattgccatgaaagctaaaactgagggtagcagtcagagatccgtcgctgaagaatctttcagcattttgtcatcatggacgccgtacctgttcgttaatccaggagaccacatttgctcagagtacattgggtacttccagcaccggaagaacatggaggatcttggtgccggatttatcgagaagcttgcgacacagaattccatcggagacctgttcttcaaggcactagggtgggagtcagaaccgctgcaccttcttccgtctgccgatctaatcgtcaacgtgagcccttcgtctgatttcaagtacgctcacggcatcagccagtggtggcaacctgagctgaatttgcagtgcagtaaatataggtactcatagttgtacgtcgctagaaatgatgtctcagaaacttagttatcctctctatcccttcagtttattcatgtggttcattctgtttgttgtagtgttggtttcccagctgtggtagactatttcagacatattgactgcattttcctgacctgcaaaatctgttgattgtgtggagtaaagttgtgacatccatcgtttatctgccctgtacagtatgtttatccatttatggat

SEQ ID NO: 120963 - DNA, 1563 bp, Zea Mays
cccaacccagaatcaatttcctcgcgccgctgtcccttcgtttccccagacagtgcagaccgaaccgaacaggcgaacagacattggttttccccgccgcgcagcgcgcacacgcctgcctgccatttctaaatccggggccggtcatcctctcttgtttccgtggcaaccgcgcctctcctccttccttgcagcgtgcccctgcggggggctgcgcgtggatctgatctcgtcaattgtcgtgctatgtttttctccagcggcacgaagtgaagaacacgtttttgtgacgccatggctgtggaaagagatatatttggaatttctgggccaacgtatctgaaatcaatcgattggaactgtgagcataatcggagatctgtggctgcaagcttagttcaggctgtatatgtgttggagagagaccggcaactgaatcatcaatcttttgaagccttggcacctgcttggtgggaattcctccattttgagctgattcgcaagctgattgatgatgctgatatgtccatatttggtgcaatatttgaattcaaccctccaaaggaggaagcttctggtgcaaatgctccaagatttgtcatcgcattcagaggcaccataacagagaaggatactatctctagggacctttccctggacctgcaccttgttcaaaatggtctccacaggacctcgagatttaatatagcaatgcaagctgttcaaaacgtagcctcggttttccctggatccacgatttggctagcagggcattcactaggcgctggcctggccatccttacgggaagaaacatggttaagaagggtgtgcttttagaaagctttctcttcaacccaccgttcgttgctgctccagttgaaaggatcagggacgaaagggtaaagcacggatttcgtattgcaagaagcgtgattactgctggattgactattgccatgaaagctaaaactgagggtagcagtcagagatccgtcgctgaagaatctttcagcattttgtcatcatggacgccgtacctgttcgttaatccaggagaccacatttgctcagagtacattgggtacttccagcaccggaagaacatggaggatcttggtgccggatttatcgagaagcttgcgacacagaattccatcggagacctgttcttcaaggcactagggtgggagtcagaaccgctgcaccttcttccgtctgccgatctaatcgtcaacgtgagcccttcgtctgatttcaagtacgctcacggcatcagccagtggtggcaacctgagctgaatttgcagtgcagtaaatataggtactcatagttgtacgtcgctagaaatgatgtctcagaaacttagttatcctctctatcccttcagtttattcatgtggttcattctgtttgttgtagtgttggtttcccagctgtggtagactatttcagacatattgactgcattttcctgacctgcaaaatctgttgattgtgtggagtaaagttgtgacatccatcgtttatctgccctgtacagtatgtttatccatttatggat

SEQ ID NO: 120964 - DNA, 635 bp, Zea Mays
atgagccccatggttatgattacttgtatggttcctggaaggcttctccaaccccacaccatccatggatgccctgaccatgaggtgctaccgctactcacctagtgtcgccatggttccgatgaggaagacctcgaggacgacgatgacgagagcctccatctccacagatggctgctcgagttctgagcccaagaagaaatcccactctgtcagcttcgctggcaaggccaacaaggttttacgaggacaaggacatgggaatcctctgctacaccgacgagaacggtgaactggtgtgcgagggccctagacgaaggcccgatgctgacgtggcaggacatgttaaaaagatggaggaccatgagtggatgtacacgggccgtgtaggaaagaatgatgtcacccctgaatggattagaaagaccgattcttacgtggaacggtcatttggcgaagctgctaaaggagtgagtctagtcccatgcccgtgcagcaagtgtgccaacaggaaaagaaaaacaaagaaggacatgcgcacgctgggggaagctagaccatccgcaaggagtaatcggaccgtccacagggaggttaccaaactgtccgtgattttgcacagagctacaggatga

SEQ ID NO: 120965 - DNA, 1407 bp, Zea Mays
cggccgattccatgtgccgccgctgcgcctgctctagttccggagggcgtcggcctcctaagcagaaacgatgccagcggttgtccaaaaccacagacatcccccaagcccccaacaagaaaccagaggcgagaggaggcagctgcagccggccgctccagctgagagcctcgagacggagagggatctccggatagctatgggtgacgcgaagacttcggtactaatcacgatgcccagccgcgaccgcgaccgggaccggctcgtgcctaccgctgccgttgccacccatgagtccccgtccgccctcactgtcggcgactccgatgacgacaagagcaagccctcctctgcttccgccgccgctgccgccgcgcagaccggccgtgaggcgttccataaagttgtgcatagctgggcgtccaagaagttcatgaccggatgtgtcatcctcttcccaattgcagttacattctatgtgacatggtggttctttcgctttgtggatgggtttttctccccaatatatgctcacctgggaatcaaaatatttgggcttggttttgtaacatcgatatctttcatttttgtggttggtttattcatgtcatcttggctgggagcatctatccttggccttggagagtggtttataaaacgaatgccatttgttcgccatatttacgatgcatctaagcaaatcagtgctgccatttcacctgatcaaaacaagcatgcattcaaagaagtggtcatcattaggcacccaagaattggcgaatatgcatttggatttatcacttcggaagttctacttcagggttattctagtgaagaacagatgtactgtgtttatgttccgaccaaccatctctatattggtgacatatttctggtcagctcaagtgacgtgattagaccgaacatgtctgttcgcgaaggcattgaaattgttgtctctgtgggcacatcgatgcctcaagtattgtcgattctggaaactgagccaaaccagttgaacaggatcagatccacccgaagctgagatgacttcacattttgtaatttcgtgttacaaagtccttgttgtacaagagtaggttctgacagattgtacagttctcctgggtagaaagcaaaatctgtttgtgaacacatctcacctgaacgcgattgcttgtatggccgtctcagcttcttcagaaatgtaacttagcagttgagtagagttgacctatgttaagagttgtcaagttttgaagtggaagaattttcttaaccatttggtttatgtgtccagggagtcttgtgaggcctgtttgaatgggagggattcattttttttacagtctggttcaaacttgacctgaattccaaaaagattattcaattacatgatcgtgtaaa

SEQ ID NO: 120966 - DNA, 1096 bp, Zea Mays
gaattgaggatatgactcagtatatagggtaatgtatgtaggactcgagagactgagccctataattatttgatgaaattttataaaatagagccaatgttggaagagtgttttatggttttgattcatataattaaaataggattatgtttagagtctttatgatcttagctacctaattccactgccaatttttagccaaataactagctaaacaaacacccctcggcactgatagaagagagaagaaacagacagcctaaagcccttcctctctcctcggcgccggaatggcgaaaagcggcggcgagtccactgtggaggttcctattcccgcttccgcgtcggctacgaggccgaaggcgaaacaccgtatagagatcgaggggtaccctgtggatggcgtctccattggcggtcaagagacttgcgtcatcttcccgactctgagcctcgccttcgacatcggccggtgcccgcagcgcgccgtctcccaggagttcctcttcgtctctcacgggcacctcgaccacatcgggggccttcccatgtatgtggccacgcgggggctcttcaggctgcgtccgcccaccatcttcgtccccgcgtgcctccgggacctcgtggagaggctatttgaggtgcaccgcgccatggaccagtccgagctcaaccacaacctggtccccctggaggtcggggaggagtacgagctcaggagggacctcaaggtcagggctttcaggacctatcacgccatacccagccaggggtatgtgatatactcggtgaagcagaagcttaagcaggagttcattggcctaccagggagcgagatcaagcggctcaagctatcagatcacaaatacggtgtccacccctgaaattgctttctcgggggatacaacagcagatttcattcttgatccggataatgcagatgtgctgcaggcaaaaattcttgttgtcgaggtattttgtcatcacttgtcgctttacagctaagttctcagtttgcaacatgtcaccaattgtgtggcattaacaagcaagtcaacatacttagaaacacattctattccactgctgaatgttt

SEQ ID NO: 120967 - DNA, 336 bp, Zea Mays
tgggtggacaatcaaaaagaaacatttagagaaggggttgatcttgcatgggctcatgtggatgatgcaatcggtgctcctagttcacttcaaggtcgcgacttcacaagaagagcccgatatgagtctgtttattcaaggcgttgtcaagttgctgctacacaggaggagagagttatggaagaggaagagcaaggcaacgagggcaatgaacaagatgatgaagagtacatgcctaatgatgatgaagaagtggatgactttggtaaatccccacatagcagtccaactcaagctggtgctggtggtgaagaaaatgcaatggccaatggatga

SEQ ID NO: 120968 - DNA, 146 bp, Zea Mays
aaaaacccaaataatccggtccctgtgaatgaaaagaaacataaatgggggaagaccatgcggttacctctcctcaatcaagaacagaaatccaagaaaatatcctcacttcctgaatccgccgagccgccgtatcctccagagtc

SEQ ID NO: 120969 - DNA, 939 bp, Zea Mays
actatttttaaaatctgttttatgttttctggaaacgatttgcactggcggttttattacgtcgaccgccagtgaaaatcgattttcactggcggtcttcagttacccgcctgtaaaaatggtgatttctactgacctctagcactggcggttacgaaaaacgtcactgtaaatatgtttaggaccgtcagtatagagcttatctgtactagtgctctctctcagctgtcatgcatgagtcggatgcaaatcaaacctatagcgttagtgcaatttaccatcatataagaccatgataactgcaaagtccatcggcaaagcatttttgagtcgtccaccaaaaataacaacgaagcccagctcaagagtgctggggaggggccgcaacttttccggttgtgacaacttcacttggtaaaaagggaaattattattttttgcttgttgtgctagaagtataatatttaaagataaatttaaattagttgtgtcaaattaatacaaatttaacaaacaagattgaaaattataagtgacatctactttagagtttagtttgctattttataacatgtcatgcactgagtttttactataattttaacaagtaaattgactaacttgaataaaaaagtttcgtggggcaggtacacgaggaacgggatggagatggtttcccatccccgtccccacgaattcgacgaggataaatttctcccatttagatcaccgtgaggactaaattaatctcatacctgtcctctaatagagaaattccccgcggggaaccgaggatcaggtccctattgtcatctctatcgtcctctattcgatatatgatctcttgaggggtctttaagtggctaaataaaaaagtacaagagacggtctctttgtaaaaaactgtctctacacgattctctatacatattgtcgctt

SEQ ID NO: 120970 - DNA, 101 bp, Zea Mays
ggatggagacttatattatttacagtacatgcttatggttcctcccactcccatagacatacgtacatatatctataaaaaggtcattcaaacatgtcaac

SEQ ID NO: 120971 - DNA, 309 bp, Zea Mays
atgactgctattctaaaaagcagtggccaacctgctgatggtaatggttttgtaggatgcttacagtttctcaggcagtctttatgggcacaacatttgccattgttcgtcctaagtcaattagccagaccattttctcttgaccggttatctgaagaaagcaagatgaaaacatctacctcgatgaccttggcaccatctagggtacctgacacgcttcctcataatctcaactgggaagacaacatcctccaagatgccatcatgaactggagtcaaagtcctggtgcgagggcgctgaacagttga

SEQ ID NO: 120972 - DNA, 1641 bp, Zea Mays
cactccccctctctctccttttactcttcctgtagtctcctcactcttccaaccaaaacaatcaataaactagcagaagtcagcgcctccctcctccgcccgtttcctcaagcgacaagaacccaaccactccgcgtcgtcgtctgctgccaatggaggaggagcgctgcttcaacaactgggatctggacgccgtcgtgcgcttgggctgccgccgcctcctctccccgtcgccgcagcccgacccgttcgcttcgtttctcccgccgccgccgcagaaggagaagcccgtggcgccagcgccggctaaagagccagagccacataccgcgtggcgcttccctgaccttggtgctggcggcgggcaagacggcgaagagctcctcagggccctgttagccgaccagcctcccctgcatcagcctctgccaacgccagcggcaacgccaacgccaacgccaacggcaacgcctcccccaccatcacaacagcagcatctacagccgactgtgacagccgtggacgtggctccaccccaggtgcgccccgctccggctagggcgcagccgagcgggcggcaggtgcccggtggcgtgccaagatccaagagaaggaagaaccaggtgaagaaggtggtctgccacgttccggcggacggctcgtcgccggacgtgtgggcgtggcgcaagtacggccagaagcccatcaagggctccccctacccaaggggatactaccgatgcagcagctccaaggggtgcgcggcgcggaagcaggtggagcgcagccgcgcggaccccaacactttcatcctcaccttcaccggggagcacaaccacgcggcgccgacccaccgcaactcgctcgccggcaccacccgccacaagttcccgtcgtcggcggcgcctcagccgccgccgccgtccgtcgtggtgggcggtgacgcgcaggaccggcagccgagcccgagcccgacgtccacgtcgaccgcggggctctcgcccacgacgccgctgcgcacgccgtccatggaggaggaggaggaggaggaggaggaggaggaggaggaggacgagctgctggtggaggacatggagatggctggcgaggacgagctcctgttcctcagcaccgacgccgacgccggggcaccgacgtcctcgctcttcgacgtcgtcggcgagcccttcctaagccctccctgggtgacagccgccagcagcgccggcgagccagccacaggggcagccggcgctgggagctgacttcttctagagagagatgtgccgtctgtccttgcagatggagcaaaatcaagggaggagaagagagcatctgatgtcccattctagtagtagttctagcatcggtagtcagccctgactagtacgtacagagcttgatgcatcaaccgaccctcaagcagttcttcttctttcctgatcagaagaacatctttgcatcctgttctttttgctctttttttaggtatggttggcactctgcatctcttttctttaggtgcctgttttttgttttttttttgcatttgtgtatagaaagtggtagatgatgaaccaacaaaagaagtgaaaaaaaactaaagaagaaaagtggatcatggtgtggtttagttggctc

SEQ ID NO: 120973 - DNA, 260 bp, Zea Mays
ggagcatgattttttatttgttcataaagtgcaaaggtcttattttaattaatttattctttctgtgtgcagcccaaattatttaataatagaaatttacctaaaatttgtttatttgacattttatttctagaaatactatttttgaaattattatagtttttgaaaaatttaaaaacatatatttctttttaagtaacttatgttagaaaagggaaaataaaaaaaagttaatttcgaaatttgaaaaaaaaacaaaa

SEQ ID NO: 120974 - DNA, 107 bp, Zea Mays
ttttcctatcagcttaagcttttgggttgaactgttttgtgcatgcaacttaatatggtatcagagccataggtcttgagttcaaatcctagttagcataattaaaa

SEQ ID NO: 120975 - DNA, 1062 bp, Zea Mays
cacccacccacctccgcggctcccaagccctagatgtccccttcccactcctcctgcctccgcagcgccgccgctgccgcctgcgccccgagccgatcaccccagatctcgcgcgaatcagaggtcccgcgcctccccgtggcccgattcgccgtccgtgcgcccgggaacggcgccgatttgagacggttttggaggtgaggcggggtgcgatttaggtggtcctgggccttgcgggcccggtggatggatgcagtggaactgccgttaccagccaaggtggagttcgggaaaatcctggcgcaggcagccgcggtggagggggtggacggaggcatccccggaggcgggggcggggaggtgctcaggcgctgcgccgacgcggaccggcggcacgatgtgaagcagcacaatcagaatgcagaaggctttccatctcatagaagtaaaaggatgtctttggaagtctctatgcagaaatctcttggttttggcttgaagtctgataatggcaaacatgattatgttgcaaatgatacggttcaatccctgcataagcaagatagtaagatagtgataaaaaagaccataaaattgttggacggtccaccttatccaaaaaggccaaagcttgagccagcacaaactggtagagatgctgaggctaagggacatgaattcatatcacagaagaatgtgcctgatttaacaccatgcacaacatctggtaagttataaacttcctttgttcatttaaattgtccaatgtgatgtctgatgtagttcctttttattgcccatgttaggacaaaccacttttattgccatatcatcttgttttgattcaacatcatttcttgcgtgcactgaattcctcgccgcttcatctatcttccttggggccttgcttttattcaatttctttacatagataaccttaaattgtttgctgatttccattccaaaagttaactgctttgattcatgcaattttttgcttggaaacgcaggagaactgcgtgtcattatattaagaagaaaaagactaaggtcctagatgac

SEQ ID NO: 120976 - DNA, 3182 bp, Zea Mays
cacccacccacctccgcggctcccaagccctagatgtccccttcccactcctcctgcctccgcagcgccgccgctgccgcctgcgccccgagccgatcaccccagatctcgcgcgaatcagaggtcccgcgcctccccgtggcccgattcgccgtccgtgcgcccgggaacggcgccgatttgagacggttttggaggtgaggcggggtgcgatttaggtggtcctgggccttgcgggcccggtggatggatgcagtggaactgccgttaccagccaaggtggagttcgggaaaatcctggcgcaggcagccgcggtggagggggtggacggaggcatccccggaggcgggggcggggaggtgctcaggcgctgcgccgacgcggaccggcggcacgatgtgaagcagcacaatcagaatgcagaaggctttccatctcatagaagtaaaaggatgtctttggaagtctctatgcagaaatctcttggttttggcttgaagtctgataatggcaaacatgattatgttgcaaatgatacggttcaatccctgcataagcaagatagtaagatagtgataaaaaagaccataaaattgttggacggtccaccttatccaaaaaggccaaagcttgagccagcacaaactggtagagatgctgaggctaagggacatgaattcatatcacagaagaatgtgcctgatttaacaccatgcacaacatctgaaaaatctcggttgctcaagcagaagcgcatttctgatggaaagagaactgataagaagaatattaggtctggtgtcagatcgaaacatgattgtttctcatcaaaggctggtttagcaaattttgattctggtttctcaggaaacagcgtgcttggagcacatggccttaaatctgatattcgtgacatcacacatcacattgagaacctgtcattgatcgaacttcttgatggcacttacaagtattccagtttaggaagagataaaggaaagaaggtattgcacacgaaggaggaactcctagtctctgtcagaaaaactttttctatgctttctgacatggactatcgccatggaaaggactctaatctcattctgagccctaaactttcttctgcaagtacttctagctgtgatatcaaagaacaatgtggtgacaagccacccctcttggttaaggacccatcacaaattaatctctgtgatagtgcactttgtcatccaaaagatatcttaagccgtttaactcttcctcatcgacaagatctagactctcttttagcacccggaagggagagcacagctgcagttaagccttatatgccttccatgacagttcatggagctagtttgccaccatttccttggtcacattcacaggctgggggctgtcgacaaggtgttgactgtggtaaacatggatcaagtaggagtaactcccagtggcaatgggtgcgggttggctccaacctcacttctctagatcatgaagacacgtctgtccatagaattgatgatctccttcaagagatggatgcagcaaaattatgtatattggatccatgtgatggacaacataatttgtgtggcacagaatcaacttctggatcacttgtacaaaacattcactccagaaaaattgggggtgagcatggttctcagcaactgcagccccaggatcatcttgactctttagatggtttccagaagcatgacattgattattctcttttaaaaacatctcaaggtaggccaaagtctatttgggaaaaagttactctgatatacatattaccttgctgaaaatagtacttcattccaaactgtaagttgatttgacttttctaggtacatagattttgttgtgcacctagatatacacaatgtctaaatatagtatatgtatctagaaaagtcagaatggcctataacttcgaacggacagagatttggaatggagggagtagctgctaagaaatactatatgtatctagaaaagctaaaatgacttacaatttggaagggagggagggagtagttgctaagaaatttgaatatttcgacaaaagtattttgcttatagaacactattctagatgtacttgtacaaatgctttgttggcctcacatattaaacattatactgaaccatattatgccatatgtgttatcatgtagcatttgcaagttaagccagaatagaagtacctaggaattctttatccctatagctaggcactcgttctatatcggaaaataatattttctgtccattcatctagtattactcattttcagtttatcttattttgataatacttacgtgagctttccttccccaaaagcagtatcgccaaagatacagtgcgccgctgagatcttatgtgatatgagaaggagcactgaatcatggattggccaaggatacagcaatgggacaattaagtggccaaaatcaccacctgaaaaggcgatgaaagcccggaagccctcatcccagtttggtacaactgagagctcgtcaggttctcgtaacaatgaggcaacttggaatgggagcagtcactctaccaagaaaattgttgacaggaacaatgattctgcacgcttgaataaccctggtaagggaactataagatggcctgtccctgttgaagacaatgcttctcctgtcaggtccgagcggggtcttatggtcgacatgaggcagccccatggaaatggcggaaggcatctggtccaggtgtcatcacagacacggcttgagaaggagtatgagaaccagcagaagttgaggaaggcaacactgacctcttctctaggatctgcaggagattggaatagggagaagaacaggagaatgtgaagtgtacattattcatgtcaaaatcatagggtacggtatatcgtctgggggacagcgggaaccaggcaactgtttcataagaggtcacagaacattggcagatgtcataatttaggtggctggtgatgtatctattgggccatttgttgttggggggaaactgctgtatttagtgtaatttattttttattgccatcgtatcacaggtctcgtctcaaagtcgcccgttttgtattatatagtactattattatgtgtcgacttattcgtaaaagcaataatagcaggcgaggtaattgcgttccag

SEQ ID NO: 120977 - DNA, 2706 bp, Zea Mays
cacccacccacctccgcggctcccaagccctagatgtccccttcccactcctcctgcctccgcagcgccgccgctgccgcctgcgccccgagccgatcaccccagatctcgcgcgaatcagaggtcccgcgcctccccgtggcccgattcgccgtccgtgcgcccgggaacggcgccgatttgagacggttttggaggtgaggcggggtgcgatttaggtggtcctgggccttgcgggcccggtggatggatgcagtggaactgccgttaccagccaaggtggagttcgggaaaatcctggcgcaggcagccgcggtggagggggtggacggaggcatccccggaggcgggggcggggaggtgctcaggcgctgcgccgacgcggaccggcggcacgatgtgaagcagcacaatcagaatgcagaaggctttccatctcatagaagtaaaaggatgtctttggaagtctctatgcagaaatctcttggttttggcttgaagtctgataatggcaaacatgattatgttgcaaatgatacggttcaatccctgcataagcaagatagtaagatagtgataaaaaagaccataaaattgttggacggtccaccttatccaaaaaggccaaagcttgagccagcacaaactggtagagatgctgaggctaagggacatgaattcatatcacagaagaatgtgcctgatttaacaccatgcacaacatctgaaaaatctcggttgctcaagcagaagcgcatttctgatggaaagagaactgataagaagaatattaggtctggtgtcagatcgaaacatgattgtttctcatcaaaggctggtttagcaaattttgattctggtttctcaggaaacagcgtgcttggagcacatggccttaaatctgatattcgtgacatcacacatcacattgagaacctgtcattgatcgaacttcttgatggcacttacaagtattccagtttaggaagagataaaggaaagaaggtattgcacacgaaggaggaactcctagtctctgtcagaaaaactttttctatgctttctgacatggactatcgccatggaaaggactctaatctcattctgagccctaaactttcttctgcaagtacttctagctgtgatatcaaagaacaatgtggtgacaagccacccctcttggttaaggacccatcacaaattaatctctgtgatagtgcactttgtcatccaaaagatatcttaagccgtttaactcttcctcatcgacaagatctagactctcttttagcacccggaagggagagcacagctgcagttaagccttatatgccttccatgacagttcatggagctagtttgccaccatttccttggtcacattcacaggctgggggctgtcgacaaggtgttgactgtggtaaacatggatcaagtaggagtaactcccagtggcaatgggtgcgggttggctccaacctcacttctctagatcatgaagacacgtctgtccatagaattgatgatctccttcaagagatggatgcagcaaaattatgtatattggatccatgtgatggacaacataatttgtgtggcacagaatcaacttctggatcacttgtacaaaacattcactccagaaaaattgggggtgagcatggttctcagcaactgcagccccaggatcatcttgactctttagatggtttccagaagcatgacattgattattctcttttaaaaacatctcaagtatcgccaaagatacagtgcgccgctgagatcttatgtgatatgagaaggagcactgaatcatggattggccaaggatacagcaatgggacaattaagtggccaaaatcaccacctgaaaaggcgatgaaagcccggaagccctcatcccagtttggtacaactgagagctcgtcaggttctcgtaacaatgaggcaacttggaatgggagcagtcactctaccaagaaaattgttgacaggaacaatgattctgcacgcttgaataaccctggtaagggaactataagatggcctgtccctgttgaagacaatgcttctcctgtcaggtccgagcggggtcttatggtcgacatgaggcagccccatggaaatggcggaaggcatctggtccaggtgtcatcacagacacggcttgagaaggagtatgagaaccagcagaagttgaggaaggcaacactgacctcttctctaggatctgcaggagattggaatagggagaagaacaggagaatgtgaagtgtacattattcatgtcaaaatcatagggtacggtatatcgtctgggggacagcgggaaccaggcaactgtttcataagaggtcacagaacattggcagatgtcataatttaggtggctggtgatgtatctattgggccatttgttgttggggggaaactgctgtatttagtgtaatttattttttattgccatcgtatcacaggtctcgtctcaaagtcgcccgttttgtattatatagtactattattatgtgtcgacttattcgtaaaagcaataatagcaggcgaggtaattgcgttccaggcgtcagccctcagtagtttacggcgcgagcggattatctgcggtaactttctggacgtagccgcgggtggatcacggcggtggtcggaagttaccgtagaggatccagctgcggaagctcagtg

SEQ ID NO: 120978 - DNA, 2592 bp, Zea Mays
aagagattatattcagatagttaaagtgcctaacagcagttgattaactgatttagtgagctctagttaggtaaagattggctcacctttttttgtttctggaattgatggcattgggtcagcacatcccattaggaaatggactttagccatctcattatagtaagtctagaaatcagttggcagaccgaatgagccaaaaagaagaaaaaaatgtgcccgatgttcctgctacttactggacactttgctcatacaaaattgatagccactcattaacaagatctgccatattagttactacttgtcatactttttttaaatcaggtttcagaatgcagattcaatgagccaaaaggaagaaaaaacatgtgcctgttcttcttgctgcttactggccattttgctcatacaaaattaatagccactcattaattagacctgcagtactaattactacttgccatacttttttttaaaatttgtatatacacacacatttgatttgatgtagttgagtgctcatttgttctactcgcattaatgcacatgatgctgttcggtttgatatgctgacaataaataattttgcacttatcctaattatatacagaaaaatctcggttgctcaagcagaagcgcatttctgatggaaagagaactgataagaagaatattaggtctggtgtcagatcgaaacatgattgtttctcatcaaaggctggtttagcaaattttgattctggtttctcaggaaacagcgtgcttggagcacatggccttaaatctgatattcgtgacatcacacatcacattgagaacctgtcattgatcgaacttcttgatggcacttacaagtattccagtttaggaagagataaaggaaagaaggtattgcacacgaaggaggaactcctagtctctgtcagaaaaactttttctatgctttctgacatggactatcgccatggaaaggactctaatctcattctgagccctaaactttcttctgcaagtacttctagctgtgatatcaaagaacaatgtggtgacaagccacccctcttggttaaggacccatcacaaattaatctctgtgatagtgcactttgtcatccaaaagatatcttaagccgtttaactcttcctcatcgacaagatctagactctcttttagcacccggaagggagagcacagctgcagttaagccttatatgccttccatgacagttcatggagctagtttgccaccatttccttggtcacattcacaggctgggggctgtcgacaaggtgttgactgtggtaaacatggatcaagtaggagtaactcccagtggcaatgggtgcgggttggctccaacctcacttctctagatcatgaagacacgtctgtccatagaattgatgatctccttcaagagatggatgcagcaaaattatgtatattggatccatgtgatggacaacataatttgtgtggcacagaatcaacttctggatcacttgtacaaaacattcactccagaaaaattgggggtgagcatggttctcagcaactgcagccccaggatcatcttgactctttagatggtttccagaagcatgacattgattattctcttttaaaaacatctcaagtatcgccaaagatacagtgcgccgctgagatcttatgtgatatgagaaggagcactgaatcatggattggccaaggatacagcaatgggacaattaagtggccaaaatcaccacctgaaaaggcgatgaaagcccggaagccctcatcccagtttggtacaactgagagctcgtcaggttctcgtaacaatgaggcaacttggaatgggagcagtcactctaccaagaaaattgttgacaggaacaatgattctgcacgcttgaataaccctggtaagggaactataagatggcctgtccctgttgaagacaatgcttctcctgtcaggtccgagcggggtcttatggtcgacatgaggcagccccatggaaatggcggaaggcatctggtccaggtgtcatcacagacacggcttgagaaggagtatgagaaccagcagaagttgaggaaggcaacactgacctcttctctaggatctgcaggagattggaatagggagaagaacaggagaatgtgaagtgtacattattcatgtcaaaatcatagggtacggtatatcgtctgggggacagcgggaaccaggcaactgtttcataagaggtcacagaacattggcagatgtcataatttaggtggctggtgatgtatctattgggccatttgttgttggggggaaactgctgtatttagtgtaatttattttttattgccatcgtatcacaggtctcgtctcaaagtcgcccgttttgtattatatagtactattattatgtgtcgacttattcgtaaaagcaataatagcaggcgaggtaattgcgttccaggcgtcagccctcagtagtttacggcgcgagcggattatctgcggtaactttctggacgtagccgcgggtggatcacggcggtggtcggaagttaccgtagaggatccagctgcggaagctcagtg

SEQ ID NO: 120979 - DNA, 468 bp, Zea Mays
cttctctttttccagggtacataaagataagaaggcaacgaaaagcactttgaaaattaagaaaccgatccactatttgaaacatgtcatccacgttagaaagagagccatgaaaagcatagatcctcaaggaaaggaaaaaacaccacttcgtctatttacaattccaggccgtgctttcttttatttagtaagctcagccgaagaccggtagcacctgcaaatgaaacatgcatgcctttcactgcgcgcttttacttgcttcggaaatcaaacaatgcatttcctctcaacataaacatataccgatctttctctcaccttgtgtacaagcctattattctatcggtatgcctatttgacccatatgtgctaaaccggtacttgttacttacttctatctattaaacgttaccggtacttagttactgtgacttaatcatgcttagtactaaaccttactatgta

SEQ ID NO: 120980 - DNA, 1284 bp, Zea Mays
atgacctgggatgacatatatggtgatgacattgcagatgtgatgactgtacctacatctaccatgtccttagaatctgcttttagtttggctggcagggtgatcgaggagcgtcatcaacggcttacaagtgacatggtggaggtcttatcctgcatcaaagattggcctaatacactatcgtgccgtacttggactgcgaccaagtacttggactgcgcccaaggtggtcgtgctggcccgacacgagatggccagcgtgttgtgccgggtcgtgcccaaatcgtgtcgggcgatatatttggatattgttccgaaggagccctacacaggggtggtgagcctcctgacgttggaagtgtcggtacccgggactccgcttatgggccgtcacagagcctgactcgtatgggcctacttgccattgatcggcccagccatttaatggtcctggaactctcgaagggcttccattggcaagggtttagggcgcagcagagtctggtgtctcttgctccgaccccgttggcgactgagacgcgatccccttctcctgcactgccgtcctccgtcgctgcgatgcctcggtattactgtgactactgcgacacctacctgacccatgactcgccatctgtccggaaacaacataatgctggatacaaacacaaggcgaatgttcgaacctactatcagcaatttgaggagcagcaaactcaaagtttaattgatcaaagaatcaaggagcatcttggacaagctgcagctttccaagcaggtgcccctttcaaccaacatctgcttgcattcccaggagctatggcccgccctcgtcttccaattctgccaacccctggcatgcctcatgggtttcctcaagcacctggcgcaccattgatgccaggaattaggcccccgattttaccagctccaggtaaacagggctgctatttgtatcattcattatgattgctagccccattaattctaatattgttttcttcatcaaagacgaaataactacatttacccctgcctctaaccttagcagaacaaatatcaaaagttgaatgttccacaaagagtgctacttgtttgctatgacccgattcaggttcttctgcatgtatctgcacagtacattctattttcatgttgcttattagggcattggtacactcgttacctaccatagttggttaattaggtttggtttatttcgtattcgtaccatgaaatttcatggatttcattatttcgggtacaacctgatactaatgactt

SEQ ID NO: 120981 - DNA, 1600 bp, Zea Mays
atgacctgggatgacatatatggtgatgacattgcagatgtgatgactgtacctacatctaccatgtccttagaatctgcttttagtttggctggcagggtgatcgaggagcgtcatcaacggcttacaagtgacatggtggaggtcttatcctgcatcaaagattggcctaatacactatcgtgccgtacttggactgcgaccaagtacttggactgcgcccaaggtggtcgtgctggcccgacacgagatggccagcgtgttgtgccgggtcgtgcccaaatcgtgtcgggcgatatatttggatattgttccgaaggagccctacacaggggtggtgagcctcctgacgttggaagtgtcggtacccgggactccgcttatgggccgtcacagagcctgactcgtatgggcctacttgccattgatcggcccagccatttaatggtcctggaactctcgaagggcttccattggcaagggtttagggcgcagcagagtctggtgtctcttgctccgaccccgttggcgactgagacgcgatccccttctcctgcactgccgtcctccgtcgctgcgatgcctcggtattactgtgactactgcgacacctacctgacccatgactcgccatctgtccggaaacaacataatgctggatacaaacacaaggcgaatgttcgaacctactatcagcaatttgaggagcagcaaactcaaagtttaattgatcaaagaatcaaggagcatcttggacaagctgcagctttccaagcaggtgcccctttcaaccaacatctgcttgcattcccaggagctatggcccgccctcgtcttccaattctgccaacccctggcatgcctcatgggtttcctcaagcacctggcgcaccattgatgccaggaattaggcccccgattttaccagctccaggttatcctggtcctccaccaaccatgcagcaaccaggcgccccacctgggtccatgccacaaccgggcgctccacctggttccatgccacaaccaggcgctccacctggttccatgccaatgcagatggccccactcccaaggcctccaacgctaccgcctccaacatctggagtcccaggtgctcccattcctaacagtggagcacctccagccatttaccaagcaaatccacaagcatctgcaggtccaacttctggtgctcctccagctccaccgactgctccacagcctgcgttctcctatgctcccccatcagaggggaaccactgattctgttccttaggcatgacttgggaggccatatgaagtatgtgcagaaaggctgttcctttggaggttgatgttgtcatcttttaactaaggtcatttctatcatcctgaattcaagatattattgagaaaatcttccaatttgtgtggctgggtctctgttgttcgatgcatgttaactatgttagtttttatataaatttcaataaaaaggacgcttgaaaaatcaaaactaaattctctgagaattgtttgtggcatgggatgcttgaactcggtgttgtgattcgccagtattcatgttttagatgttcttatgtccacttttaccatc

SEQ ID NO: 120982 - DNA, 911 bp, Zea Mays
taatcttagcgattgatgaaaggttaccagtcattttgcttcctctttaatcttctaaaattcctagaaatgcttatggatggaggtagttgcttaatgttgtgctgactttgcacagctgataagttagcctttggaagaatgccatttacatttttcataaagaccatcgatatcctgatacatttcacttattcaaaccaaccaatgactactttgtgttcctgttttttcaaatatttcaggttatcctggtcctccaccaaccatgcagcaaccaggcgccccacctgggtccatgccacaaccgggcgctccacctggttccatgccacaaccaggcgctccacctggttccatgccaatgcagatggccccactcccaaggcctccaacgctaccgcctccaacatctggagtcccaggtgctcccattcctaacagtggagcacctccagccatttaccaagcaaatccacaagcatctgcaggtccaacttctggtgctcctccagctccaccgactgctccacagcctgcgttctcctatgctcccccatcagaggggaaccactgattctgttccttaggcatgacttgggaggccatatgaagtatgtgcagaaaggctgttcctttggaggttgatgttgtcatcttttaactaaggtcatttctatcatcctgaattcaagatattattgagaaaatcttccaatttgtgtggctgggtctctgttgttcgatgcatgttaactatgttagtttttatataaatttcaataaaaaggacgcttgaaaaatcaaaactaaattctctgagaattgtttgtggcatgggatgcttgaactcggtgttgtgattcgccagtattcatgttttagatgttcttatgtccacttttaccatc

SEQ ID NO: 120983 - DNA, 709 bp, Zea Mays
gaatttgatatactgaaccgacggctttcaatcggaagggcccctgtccccctcctaagtcctaactcctatccacaatggcacaatattatcgctgccctcccctttcgtcatccatgacttccctccccgccgcggtcatggccaccgcgacgacgctgcccctaggcctcctcccctccaaaacgctgaccctctcccctctcccttctgcgcgccgatccctctccatcgccgccgtggagccccggcgctggctcctccgagccgccgctgaggaggcgcctgaggccgtggaggttgagttcgtggagcccgacgcggaggcggaggaggagcccgcggtaccggagcccgtagaggcgcagctcgccgccgcgggggctgggaaggacgccgacatcttcgctgttgtcatgattggttcaagacaatacattgtgatgccgggcaggtatatatacacacagagactgaaaggtgccaatgtcaatgatcaggtttgatgattcacctatctgcatactccaagctgatagtctaggttgtgagatgttgtatagtctccctcctgcaattcttttgatacagaagttaggagaatcttctgcttatcttgatgcatttgtgcccttgtagcagcaattgcttactaaatatttcctcaagagcttgcaaaaactacaacatatacatccttctttctaga

SEQ ID NO: 120984 - DNA, 1086 bp, Zea Mays
gaatttgatatactgaaccgacggctttcaatcggaagggcccctgtccccctcctaagtcctaactcctatccacaatggcacaatattatcgctgccctcccctttcgtcatccatgacttccctccccgccgcggtcatggccaccgcgacgacgctgcccctaggcctcctcccctccaaaacgctgaccctctcccctctcccttctgcgcgccgatccctctccatcgccgccgtggagccccggcgctggctcctccgagccgccgctgaggaggcgcctgaggccgtggaggttgagttcgtggagcccgacgcggaggcggaggaggagcccgcggtaccggagcccgtagaggcgcagctcgccgccgcgggggctgggaaggacgccgacatcttcgctgttgtcatgattggttcaagacaatacattgtgatgccgggcaggtatatatacacacagagactgaaaggtgccaatgtcaatgatcagatcatattaaacaaggtgctactggtgtcaactagagaaaaagcttacattggcatgccagtggtgaccaacgctgctgttcacgcagtggttgaagaacagggacgtgatgataaagttatagtcttcaagtacaagaagaagaagaagtaccagaggaaacttggtcacagacagccaaacacaaggttaagaatcacaggcataagtggatacgaagagtaccctgctgacccaatacttgaccctgctgcagcttaagctaaattgtaagttatgtagttacaaatcggctggtagtacagtagcatgcaagttttgttcttgtttactttttttttctctggaaggaacacttttcatcaaaattttaccttgttttgtgttccaaatgctgccagtcaacaagtggttccatgtatttatttcatgagctcttattcttgttccttttcaacttgtgtgtgctagccactagccagttgtattacatgacattccataaagaagagatttctttttactacaagttgggcattctagccttcatttgggcagtttgcatggtaggtgatacgctcaccac

SEQ ID NO: 120985 - DNA, 2730 bp, Zea Mays
cgctcgcccgcccgcctgacgcctcggcgctgcggggcccacgcacaatcccaggcagcgctcaccagcatctctctgctccatttctcctcgtccctccggcatcgcatcgcgtcaccgccgcctctcgctttctcccctctcccccctactgcgtctccgaggcgcggacgacggcgacgaagcgaacggccccgccgcctaggcacatttgctgggaattagggcaatcgacttttaagtacatttggtgtacggctgtttgattattactgagattcagtcattcggctggatgagagttgttgctggagacttacgagtgtagcactgttgtcggcttgtgattaaatagcatcacttcacatacagcactggataatggatcgtagggatacttcagggtttgttagtggagggtgcaaaaataatgaagcctactgatttctgtagatcttctaaattggtagctttgttgacaattatttaacccagaagtgaggccagctggtacttcccataaagcttggttactctaggagcaatggatcccaggcacgggcgttcagcattcactataagtttctcaaatccaaatggctttgcgtatcagtgcactcccattccagccgtcagttatccagcaactggttctagccagcttgatgtgctagctcctagaggttgcaagagaaagtggactgagttggccctaggtctgggtgactcatcaagctcagacagcagcaagaggagcatgggtactggctgcactgtatcttctgccaagggaagcgatgacgtctcatgtatggactacgacataggttttgagctatctctcggcaatgaaggtacttcgaggctgtgtaaacaggcctgtgactctacaaggaccatggagaagcctgggttggatcttaagttatctttggctccatctcaatctgatgtaactgatgcagatgtaattagaagcagtgcacctcaggacatgtttgtgcatcatcagtacttaatgtcgtcagcgccaacagttgatgaaggatctacatccgctcgacgcttatctggaggcatggtgggttcgtttcttaaccaggatgggatttctctggaccaagcgctcccggttaaccctaatcaggttcaagtcccagctccttcagcaccaaaaagttcagctgcctcttcttctgggtttgtccatccacagcagcgcagcagtatcacaaaaatctgttcgcacccaggctgtgcaaaaggagcgaggggttcatctgggcggtgcattgcgcacggtgggggcagaaggtgccagaaaggaggctgcagcaaaggagctgagggaaagaccatcttctgtaaagcccatggaggggggaagcggtgtgaacaccttggatgcaccaaaagtgcggaaggccggactgatttctgcatagcccatggcggcgggcggcgctgcagccatgaagggtgcaagagggcagcacgaggcaaatcgggcctctgtatcaagcacggtggtgggaagaggtgcgaaaagccaaactgcacaaagagcgccgaagggcgttcaggcatgtgcattgcccacggtggcgggcgccgctgccagtacgctggctgcgggaagggagctcagggcagcaccagtttctgcaaagcccacggtggcggcaagagatgcacacgccccgactgttccaagggcgcagagggaagcacggcgttctgcaaagcgcacgggggcggcaagcgatgctcggctgacgggtgcacgaagagcgtgcatggtgggacccagttctgcgtcgcgcatggaggcgggaagaggtgcgtggtggaaggatgcaggaagagcgcgagaggccggagcgaccgctgcgtcgggcacggcgggggcaagcggtgccactccgctggctgtgggaagagcgcacagggaagcaccgatttctgcaagtcgcacggtggaggcaggcgctgttggtggggacatctcgggtcgggtggcgctccttgcgaccgtctggcgagaggcagaaaggggctatgcgatcgacacaacccgctggtggacgacaacagcgtccacgggggtgtatcgtttggtggtttttccaccctttctgagggaggcgccgaaacaagcttcttcatgcacacggtggaggatcctcgccacgtggcgccatcggcccgtgaaggccgggtgcatgggggcaactttatgcctttcatgctggatggtggtgtgggactcggcaagaagccagccaacaacgctgactctagtacctctgcccctcgcagctgcaaaaatatggagaagcctggtgcctctgcgcagcgcagctggctgtgatgccagaagtccgtggcccgcccgcccttccccatctcggtgtgctctgctcgattcaagtatctcccctgccctctggtgtggtgtgaaactgaaatctattatgcgtggactgtcggtgtgtagactggttggtcaggacatgtttggtagtgtggacgttgtggtttgtttgtgcttttttgcatcagtcaatcagtctggtcgaacatacctggtagcaagagtagtgtgtgaatggcctgtaaaaggaacccatcatcatgatgtatgtatatatctaaataataaaaggaggaaggctgcatcagtcggtgtaattaatcgaagtgttaatggtacgtactgcttccatgggc

SEQ ID NO: 120986 - DNA, 1339 bp, Zea Mays
gttgcaatggatttattccaaatgtacgctgcaaaattcaacagttgctcacaacacatttctagaccataggaaaatccagcaataaacatcactgaaatgacatcttcacaacagattgacaacaggccaacagcaggcattcctcggttcagcagatgtgcccattggtgtagaaactcgtgataacaggacttaccatcatgacaagtgctataacactggccacacatctctagcatgtagccagcaaaggtcagcagaagctaccaaggttctgaacaggtgctttgctcaggaagaatcttctgagaaattgacagcaaggtcccagtagtgaggaacagaaacatcaacgaaaaccttcttagctgcagcctcactccggcagttatgtacagtgaacctgtggaaggtgggttttgccacactaccctgccagaccaatacacagctattcactggcttgtcagcttccatttctgtgtcttcatcaccaccaacagcagcaggccagtctatacggtttagcatgagcttattatatcttttgattgacttcttccccccttcaacaaccacaacactgatactatcagtgatgaccacagcacctgttagtttattctcttgagcattcacatcgactttgaagcgtgtttgtggatgggacaggtctcttatcttgtaaacacaaactatagtctctattgtgttagtaggatcatcaaaaagcttccgttctttcttctcgcggcgctcagatggtgtgagcttgcgggcaatgttacggtcaacgtgagcctgctcacgctctgcagcagcagttcttatttccatctccaaccgtgtgggatcttgcacagcttcagagcctagtactttcataagattgctcattttgaccttgggcttgggtggctccaagaggccttgcctaatcatttcttgcctatctttttccttagcaagacgcctttgtgttctcaacttcttctgctccttcttagtcaacttcagtggctggggcggtggtggtgcaggttcagcaggtggatcatatggttctggatgttcaacatatatggtgatcttgtccatattaatctcctccacagagatatcctcatatgtggcagaaagtaaaatttttgcatccctgaaaataataataattagtttatgttatttacaacattaaaactaaaaaacaccattcaaagaataaacaagaaacaaccatggctcaatttcagggatatcttcattctgcttttgttttggagctctcacaccaggagcaacctcaataaagtttggattaatgtctacttctgcc

SEQ ID NO: 120987 - DNA, 112 bp, Zea Mays
caaatgtttaatatagtggttggtaatatatgatccataactctgttgtagtatgtcaattaaagcctaaaagagacaaacaacgtaagataaaatattcgttgaaagaagc

SEQ ID NO: 120988 - DNA, 375 bp, Zea Mays
atggcctccctcgattcgaccaccacccggtgcctgcgtgcttggtcgcagttgccgccgttgaagccgtgctcggaggaataccaagtccctgtcgcaaagaacgtgggaggaagaggtaggggagagataggtacagggaatcagcaaccacgggagggcggtcatcctgctcaccagagttggggaaggggctcgggcgggggcatggccgcgcccttgttgcccttcttcttgagggactcgagcgccgcgaacaacttgtggcagcggttacgcattagcctccgcgccaccgacttacgcattagcctccgcctctgcttccgccccaggaaaagtcggagctgtgtcctcctcgtcctcttcctctag

SEQ ID NO: 120989 - DNA, 1935 bp, Zea Mays
ctttcacacatgacgtcagacgaggcgaggtgcctctctgccgccctgccccggaagattcgattgaagtatattgcgttacgtgcgcgcgtactgctggatcatcctcctgtgtgctgtctgcgcacttgtcgtccgtccattgagctgagcgagccatcccgtgatcgccgatcccccagttgccaccctcaccggctgcctgccgttccctccgcctctcaaatccagtgccgtgcgggcgcggcggcggctccccagttggcagttgcccagcccccagcagcatgactactacgaccaagaatcataagcagcagcagctgctgcatatgctgcccacggcggctgccccgccttggcccgtaaggaccaagctcctgctctgcgccgccctcggcttcgcgctcggcgtcgtggccaccgcgtccctcgtgaactccccctcctacgcgacgtcgtccgccgccgccgccgcgctacggggaggaggaggagcgctgggcctcgtcttaccgccgtccgccaccaggaacgccgctcaggaccgccgcccgccgcccaaacaagcaggcgcggcacgggcaacggtccgccggtcccgaccggagccgccggctggcacgggcatcactagcgctgcagccccgccgccgtctgttgttggcgccgagggaccagcagcgcctagtgccacctcccgtgtcaatggtggtagcatcgtcagcgacagcgacggcgacgacgaggagctcatggcccgggcggaggcgtcggcgccgcgggaggtgcctgccggctgcagggtccccagggtggcgttcctgttcctcgcgcgctgggacctgcccatggcgccgctgtgggacgagttcttccgcggccaccgcggcctctacaacgtctacgtgcactccgacccggcgttcaacggctccgacccgcccgagacctccgccttctaccgccggaggatccccagcaaggaggtgaaatggggcgagatcagcatggtggaggcggagcgccggcttctggcgcacgcgctgctggacgaccactgcaacgcgcgcttcgtcctcctgtcggagtcgcacgtcccgctgttcgatctccccacggtgcactcctacctcgtcaactccaccaggctgtacctcgagtcctacgaccagccaggcgcgacgggccgcggccgctacaaccgccgcatgagccccgtcgtggccgcggggcagtggcgcaagggctcccagtggttcgacctggaccgggccctggccacagacgtggtcgccgaccgcgtctacttcccgctcttccgccgcttctgccgccgtcgccactgctacgccgacgagcactacctgcccacgctcctcaacatcgtccggcgcccgtcggcgggggccaaccggagcctcacgtgggtcgactggtcccacggcggctgtcaccccgcgcggttcacgaggatggaggtcaccgtcgacttcctccggtggctcagggaaggcagcacgtgcacgtataacggcaggaccaccacagtctgcttccttttcgccaggaagttcctgccgaactcgctcaccaggttcttgaggttcgcgcccaaggtgatggggtttggttaaaaaccatcatgcatagacgacggggtacaaattttaaggatcagcgtctaacgtgattgactgattgtctttgtgaaggacctcaaatccattgattcattcattcatgtgcagtcataatttaatgttactctttactagctcagtagcttcgtgtgcaaattctttttgaattctcattttgtaaagaaaagtgtacagagcaccagaaaggggaaacgatcaaaagctcaccattgtctttaatatgatttcttttggacaaaaattaactagctggattcactgctgaaagcaa

SEQ ID NO: 120990 - DNA, 1945 bp, Zea Mays
gctgtctgcgcacttgtcgtccgtccattgagctgagcgagccatcccgtgatcgccgatcccccagttgccaccctcaccggctgcctgccgttccctccgcctctcaaatccagtgccgtgcgggcgcggcggcggctccccagttggcagttgcccagcccccagcagcatgactactacgaccaagaatcataagcagcagcagctgctgcatatgctgcccacggcggctgccccgccttggcccgtaaggaccaagctcctgctctgcgccgccctcggcttcgcgctcggcgtcgtggccaccgcgtccctcgtgaactccccctcctacgcgacgtcgtccgccgccgccgccgcgctacggggaggaggaggagcgctgggcctcgtcttaccgccgtccgccaccaggaacgccgctcaggaccgccgcccgccgcccaaacaagcaggcgcggcacgggcaacggtccgccggtcccgaccggagccgccggctggcacgggcatcactagcgctgcagccccgccgccgtctgttgttggcgccgagggaccagcagcgcctagtgccacctcccgtgtcaatggtggtagcatcgtcagcgacagcgacggcgacgacgaggagctcatggcccgggcggaggcgtcggcgccgcgggaggtgcctgccggctgcagggtccccagggtggcgttcctgttcctcgcgcgctgggacctgcccatggcgccgctgtgggacgagttcttccgcggccaccgcggcctctacaacgtctacgtgcactccgacccggcgttcaacggctccgacccgcccgagacctccgccttctaccgccggaggatccccagcaagctctctcgtctcaacctcccgtggcatctgtctcccgctctgcctccagccccacttcagggctatcgagtagcacgaacggaaacgatgtaaataacgtttctctgctggcgctaaactttagagaggtgaaatggggcgagatcagcatggtggaggcggagcgccggcttctggcgcacgcgctgctggacgaccactgcaacgcgcgcttcgtcctcctgtcggagtcgcacgtcccgctgttcgatctccccacggtgcactcctacctcgtcaactccaccaggctgtacctcgagtcctacgaccagccaggcgcgacgggccgcggccgctacaaccgccgcatgagccccgtcgtggccgcggggcagtggcgcaagggctcccagtggttcgacctggaccgggccctggccacagacgtggtcgccgaccgcgtctacttcccgctcttccgccgcttctgccgccgtcgccactgctacgccgacgagcactacctgcccacgctcctcaacatcgtccggcgcccgtcggcgggggccaaccggagcctcacgtgggtcgactggtcccacggcggctgtcaccccgcgcggttcacgaggatggaggtcaccgtcgacttcctccggtggctcagggaaggcagcacgtgcacgtataacggcaggaccaccacagtctgcttccttttcgccaggaagttcctgccgaactcgctcaccaggttcttgaggttcgcgcccaaggtgatggggtttggttaaaaaccatcatgcatagacgacggggtacaaattttaaggatcagcgtctaacgtgattgactgattgtctttgtgaaggacctcaaatccattgattcattcattcatgtgcagtcataatttaatgttactctttactagctcagtagcttcgtgtgcaaattctttttgaattctcattttgtaaagaaaagtgtacagagcaccagaaaggggaaacgatcaaaagctcaccattgtctttaatatgatttcttttggacaaaaattaactagctggattcactgctgaaagcaa

SEQ ID NO: 120991 - DNA, 162 bp, Zea Mays
tttttatttttagtattaagttgtcactagggatgaaaacggtttcggaatttttcggtattccggaaaccgatttcgaaatttttcgatcggattcctcgggaacggtatttttcgaaaacggaatcggttttcggaattttctatcggaatcggtatcgg

SEQ ID NO: 120992 - DNA, 340 bp, Zea Mays
gtttttttttggatagatggttttggaaggcagttgagattaacgatttggtcttttccacacactaggttttagggttttcctgtgaggttatgaaaaactttttatgtgaggaaattttttttcataagtaagcatgccatgtcagctagatcgagtggatattgtgaattgtgaactttgtgtctatgaacttgtgatctttatgaacttgttatactgtgaactttgttatattgtgaacttgtgatctttgtacactttttatattataaatttgtgatccttgtgaactttttatattgtgaacttgttatatcatgaattgtgaacttgtggt

SEQ ID NO: 120993 - DNA, 328 bp, Zea Mays
ttgactttgaacgcggcatagcagttttccaagaacctaggggctccatgcattggagaacaggtctacgcgtacacagaatgcaatgcaatataatggtccgactcattattcaccggtcaaggggctccgtctggtccatgatgacctggccctcggacacctccgcgagtgaccggaggttgcacttgagcagcgcctccacgaagtagcaggtctcgtccttggtgttgccgtcggggacgtcgacgacgaaggactcgatgacgagcgtccctggccggccgtcgatgacctccgggtggacggtgaggatggaggagtagtt

SEQ ID NO: 120994 - DNA, 249 bp, Zea Mays
atggacagcggtagaatctggtactgcttgtggcctgtgggacaggatccggcctctggcaatggttgcacccagcagaggcatgcaggcaccaggcagcaacgggagccaatggaaatcagtggaagggatcaggatccggcctctggcaatggttgcacccaacagaggcatgcaggcaccaggcagcaacgggagccaatggaaatcagtggaagggatcaggttctgggcagggcagggatgtga

SEQ ID NO: 120995 - DNA, 3236 bp, Zea Mays
tcttacccctgcattttttgcagagaaactgtgaacccaggacctttagctcagtggaaaggcttctcacgattgcaccagcatccttctaaatgttcagtagtgcttcaaagcgcaatgttcacaaaagtagtgcttgcatttggtgaccactggatcaacgaatggctcccgacaaatgaagcaggcaaagggcagcgcctcctcctcatcctcgtcatctgctgcctcatcatcactctcaccaccaccacccatggcaattcgtcgcttgcgggccttctcagcctcctcatattccttctcgagctgccacccggatttgtaatcccctcggtcgtgcatgaatttgcaggaatcgccgtaaccacagtaccccgtctccttgtagtccttgcagatgtcgggctggtagtcaaaccgctgggagaggcgaatgtgcgcggacgcccggagcggaccatgcgaaccgccggccttctcgctagataccgtgtgctcccgtcggaacccagccttgtagtccgtgtagccgtggatccccttgtacacctctccagcggtggaggcggaggcggaagcagcaacagcggaggggttcttcttgagggactcctcggcctgcttgagctgtctctcgcggatggagcgcgcgtcgcggtcaaactccgtctccgtctcgagcgtggcagttgcgcgggtgtccgtggactggatcgtccgggacgattcgtactggaaccgcggcgcctcggaggaagcacctgcggtggagaaaacgagcttgccagcggttgaggacggtggccccttcttggagcgcgcggcggcgagggcgccgccgccgccgtcgtcgtcgtcatcagaccccgcgggcgcggcggggcgcttccggatgttcttgggtggtttcctcacgaaactgcacaccggcgccgatgcattgccgccgcccggcccgcagttgccgccgtcggccatcgatttggtagggtttggatcgaaccagcaggagggattggctccgtagtcggtgtcagagtctggttccaacctatatctaccctcaaatcacaaatccgtaaatttgctattttgccactctcaaatttggctgcctgttattatgtcatcccgtgtttatgactgatgggaccatccgtgtctatgatttgtgggtccgatggcatactggcgaagcccacaaatgatagtggcaaaattgccaatggctcgtccacaaggatgtttgaatgcaagagctaagactgtctccagcagcgtccctaaatttcgttatattctctgtcatttacagaacactttaaaagattttgtcctctatataatctcagtctccagcagcgtcccctaaaattcggtctcctatagctacagtgttaacagattctctttttccattttttttatttttcgttgttttcttcccatttcacgctatacaaatgatgcgtaaaaaatgtatttattaatttttaaattaataaattcgaattgtcaatattaattacattgtctgttttgttgtgtgtaactgttgttgataaagcgccgcatagtatattatcggtacgaaaatatgttttgaaattgagaagcttccaccgtaagacagaactcttcttcgacaagccatggacttgcttccgctgcacggcaaccggatggcttgtctccgaagcgtacttcctttataaataccgagtgagccttgcatacttcactcaaccttgcctttacaaactccacaacaatgaacccctacttagaaaacaattttttgtgcggttgatggaagaaatggaagaggaagaagaagagttggagttggcgaggcacatgctcaatagaaggcggcgtgcacgcaacgagcgtcgtcatggtggttcgattccagggcgtgttaggattcatcgtgatcacatgagcggcgatgcaagaatccgagcggactactttggagcgcacccggtgtacacggatgctcaatttcgtaggaggttccgtatgcgtcgccatgtgtttgagcgccttgttgatgttgtgtaacaagtggatccatactttattcagcgtccaaactgtgcgggtgagattggtctttttgctctacagaaagttgttgctgttgttcgaatccttgcttacggtattccggctgatgccgtcgacgaatacgtacgcattggtgaatccacggctcatgaggcattgaaacacttttgcacggccatccaaaccgcgtttgctccgtactatctccgtgcaccaaatgcagaagatatcgcacgccttctccaagttggcgagtcacgtgggtttcctggtatgcttggtagtgttgattgcatgcattgggagtggcgtaactgcccaagttcatggaagggcatgtttacagggcgtggtaaacatcctaccatgatcttcgaagttgttgcgtcgtatgacctgtggatatggcatgcatattttggtctgccaggtagctgcaacgacataaacgttctccaccgttcaaaccttttccaaaggcatctgagcagtgacacacctcctgtttcattcattgtgaatggtcacacgtacaatatgggatattacctagcagacgggatttaccctgactggcccacatttgtgaagacaatctgtaatccctacgacgttagaacgcaacactttgcaacaattcaagagtctgctcgaaaagatattgaacgagctttcggtgtactccagaagagatggggtgtggtccgtggccctgcttacggttggagtcttgaacacattggggacatcatgaaaacttgcataatattgcacaacatgatagtagaagacgaaggtccattgtctttgaacacaacctttgaaaacatcggagtgctggcagacacaagtcaaggttcaatggaagagcgcaacgacttcgtcaatcaaaggtacaaccaactcaaagaccgcaacaaatatactcagcttcaggttgatctgatacaccatcactgggcgcgacatggatctggagttgcataggaagcaatgaaacgagttgtgtcatgtttgttcttatctagtgtcgaactgttattgtctagacatgtttcttagtttaccttgttctagtgtcgaagtgtctgttgtctgtactgtctgttgtagtgtctcatgctgctctttgaattcaataacaagaagtactactgtca

SEQ ID NO: 120996 - DNA, 1441 bp, Zea Mays
atgccaacgctcttcgtgcccgtcctcaggtggggtctccccggggccgccactgcctacgacgccatgtcctgggccgtcgcggtcgcgcaggtggcgtatgtgacgcgccactgcagggagcgagggtgggacgggctctcgtgggacgctctggggactctggcccttcaccaaactctccatccgctcgaggaggaccgccgcaagattaaggagctcaagaacaagtccgcagactggcagctcgacctcctccagtttggctccaacacctccgagttggtgttgaatgtacattccataccatatcacccaagggacaggactatgtggagggtgaaaatgcttccaaaggatccacatctgaatcgaaacaaaaggaaattctcgaggttgtcatcatggaagttcttggttatgggaagttttatgttagactgtgggtgcgacggtcgagtgattttaagggatgacgctttacagattggttcaaaaaaaagcatatcctctttcaggcatacattctcatctttggcattgaaagaactgaaccatagaaaaaataaagacaggagcacttctccagattcaatgccaatgaaaaaacttatagctgttgcacaagctagaaggttttctcgatcaacttcctttccagataacttcctaaatgccaagtatattcctgaaacatcaataaatataccttctaaggaaggcccacataggcagttttcaccctcaaatcggataatcatgtctacttctggaaatgataatgtcaattctaggagtccgtttgataatattcagcagaagaaattagcagcgcatggagccaatgcagcgagaaggtctttcaaagatttcctcagtacattaacaagaaccaaagaaagtatatcgcgcgcgacacgtgttgctatggaatgtgctaaatttggcattgctggtgaggtgatgtatgatgcctttggtgttaggctacatgcaggaaagcaagcaaaggtcttgaaccagattgtgtatgagcttccattagaacatccactggctgaaacaagaccgctgcgagagctactagggcacacacctccacaggtatttgctggcggagtgcttggatttgcagtagccacatttatagcgatgatcgctgggcttggtagttgactccgcatttgaagaaatggtcaacattcacattgaagttctggaattcaaattggacacatgtttcctagccagcttatgatagataatgtgttgtgtataggtgtatttaatatgcaaattgttgtcaatttgttgaagagaaacttgcgtcattcttttgtagttaatcgacgagtgaactatatgttgtattcgttcctgtccaaagtatttggactgattgaaagtacctcttgataaagcattcatgagatttccgcac

SEQ ID NO: 120997 - DNA, 186 bp, Zea Mays
ttcctccgccctgccttccagaaccttgcaccgccgctcgctcccctcgtctaccccgtgccaccctgcgacggagaccttcgcccccggtgccgtctcccggcggcgagcagccgtgcggctcctctccgcggggttcctgaccgccgtcgcgccgccgccgtcgctcgccgcgaggaggggacg

SEQ ID NO: 120998 - DNA, 1699 bp, Zea Mays
ttgataataataataatagttcggtgcctttttctagcggggaggaggcaggcggcgcaatctggcaccggccatcacgttccctccggccgcttccccctccctgccctccctttccccagatccgaagccattaaaaccagcggatctcacctcggggcgcgtccgcggcatctgggcaagcgagtggtagagccagcagccatgagatggtatgcatcggtagcctcctgagggcgctggtcctgagtgcggcggcgtctgcgggcaggcgccgggggcccaggatcctgtgtggccacgaggcggatgtacgcgtgactcctcggcacggacacggctggcgcggattccgggcagtcacgggaaggatgatgctggactcctctgactgtgcctctgctgccgccgccgcggagacggggcaggtgcagccgcagcgccgcgcggtgggggccgtgcccctggcgcacgacggcggctacgccagcggcggatgggagagagaagatggcaaactgagttgtggatactcaagttttagaggcaagagagctacgatggaagatttctatgatgtaaaactaactgaaattgatggacaagctgttagcctgtttggtgttttcgacggtcatggaggatcacgtgctgctgagtatttgagggagcacttgtttgataaccttctcaagcaccctgatttcttgacagatacaaagcttgcgataagtgaaacatatcagaaaacagatacagatttcttggaatcagaagcaagcgctttcagggatgatggttcaacagcttcaactgcacttttggtgggtgaccatttatatgttgcaaatgttggtgattctcgtgccgttatttcaaaagctggcaaagctatggcgctttcagaagatcacaaacctaacagaattgatgagcgaaagagaattgaaaatgctggtggtattgtcatttgggctggcacttggagggtgggtggtgtattggcaatgtcccgtgcatttggcaatcgtttactgaagccatatgtggtggcagaacctgaaattcaggaagaacaggtcagtggtgggctggaatgcctggttcttgctagtgatgggctttgggatgttgtggaaaatgaggaagctgttttccttgggagatcggaggacacgccagagtctgcagctaggaaattgacagagattgcttactctcgcggcagcgctgacaatatcacatgcatcgtggtccaatttcaccatgacaaaaccggatgagccgtatggctgccaatttcagttgtaccctgcttcagtctattattatcctgcaagctgggtggtgggcttctcccagatttaccctgcttcatgctattattatcctgcaagccgggcggtggggtttctcagatctatcgctcatgtagcaactttcaagcactcgtccattgattcttttgttgtcttgtaggaaacatttgttccgacaggtgtagtagacacttttaaactgataattcaataaacgtatgtttacgattactgtttagtggaaattggttttcattttgccttatataagaagattttaactagtctgtcatgtgcgtgtgccatccctaattaggtatgaaaatggatacttttttggatattatttttttgtctttttctttgaccgtgaataaata

SEQ ID NO: 120999 - DNA, 1123 bp, Zea Mays
aataataataatagttcggtgcctttttctagcggggaggaggcaggcggcgcaatctggcaccggccatcacgttccctccggccgcttccccctccctgccctccctttccccagatccgaagccattaaaaccagcggatctcacctcggggcgcgtccgcggcatctgggcaagcgagtggtagagccagcagccatgagatggtatgcatcggtagcctcctgagggcgctggtcctgagtgcggcggcgtctgcgggcaggcgccgggggcccaggatcctgtgtggccacgaggcggatgtacgcgtgactcctcggcacggacacggctggcgcggattccgggcagtcacgggaaggatgatgctggactcctctgactgtgcctctgctgccgccgccgcggagacggggcaggtgcagccgcagcgccgcgcggtgggggccgtgcccctggcgcacgacggcggctacgccagcggcggatgggagagagaagatggcaaactgagttgtggatactcaagttttagaggcaagagagctacgatggaagatttctatgatgtaaaactaactgaaattgatggacaagctgttagcctgtttggtgttttcgacggtcatggaggatcacgtgctgctgagtatttgagggagcacttgtttgataaccttctcaagcaccctgatttcttgacagatacaaagcttgcgataagtgaaacatatcagaaaacagatacagatttcttggaatcagaagcaagcgctttcagggatgatggttcaacagcttcaactgcacttttggtgggtgaccatttatatgttgcaaatgttggtgattctcgtgccgttatttcaaaagctggcaaagctatggcgctttcagaagatcacaaacctaacagaattgatgagcgaaagagaattgaaaatgctggtggtattgtcatttgggctggcacttggagggtgggtggtgtattggcaatgtcccgtgcatttggcaatcgtttactgaagccatatgtggtggcagaacctgaaattcaggtgagactaattgattatgccaaaatttcaaacatcttttgtcgttaacttaatttag

SEQ ID NO: 121000 - DNA, 2897 bp, Zea Mays
ttttttaaaaaacgagcccgaccttgctccaactccctcgattccctctccctattcgcgttccccacttccgttcgccgccgacaccgcgtgcgctctctccccccctccgtctctgtctgcgacgactgggtgggctaccgctgccgccctacccatgtgctgaggcttctgcctacctcttcgccggcgaagagcgcccagcagatccgtcctcgcttccacgctgcagttgaagatttgatcagctatcgccttcgatgcagttgaatatttgatcagctattgacttcgctgctggcctgttttctcctttggagaccaaagaagccatggcgggccgggaggagagatatgtgaggtttcatgactggaaatcagagcaatctgtttctgttatttcagatagggtagtatcagaaaaagggcataacatctttggcttgttaaaggacagaacagcaggagccttttcattcctggggaactcttcacattctgaagccctaaacaaattaggcctaggggagaagtcaaaaacaaaagttcttgatcctcaagggccatttttgcagagatggaacaagatatttgtgatatcatgtctttttgcagtttttgtggacccattgttcttgtatgtcccagtaattgatggtggcaacaactgcctgtacttggacaagaagttagagaccacagcaagtatcctgcgctttttcacagatatcttctatttactccatatactgtttcagttcagaacaggctttattgctccctcttctagagtgttcggtcggggtgccttggttaaggacacatttgcaatagcaaagcgatatctatcaacattgttcctggtggatttcttagcggttctgcccctccctcaggtgtttgtgttggtggtgctgcctaagctccaaggtcctgaaattatgaaggcaaaaattgtactgttggttattattatttgtcaatatgtgcctcgactgctccgaataataccactttaccttcaaatcacaagatctgctggcatacttacagagacagcatgggctggtgctgctttcaaccttataatttatatgcttgccagtcatggctttggagctctttggtacattctttccatccagcgagaagacacctgttggagacaagcatgtatcaatcagactggctgtgatcctacatctttgtactgcgggtatcattcacttgcaaataattctttcttacaaaatgcgtgcccaacaaatagcactgccaatccagaccctatatttggaatctttctaccagctctccaaaatgtttcacaatcgacgagtttctttgaaaaactattctattgcttttggtgggggctacaaaatctaagttcccttggccagaacatgaaaacaagcactaatacattggagaatctgtttgctgtttttgtctcgacatcgggtttggttctatttgcactacttattggtaatgtgcagacctatttacagtcagcttctgtgcgtatcgaagaaatgagagtgaaaaggcgtgatacagagcagtggatggcacataggctactccctgagaatctaaaggatcggattatgcgccacgaacaatataggtggcaagaaacaagaggggttgacgaagagggccttcttaaaaatcttccaaaggatcttagaagagagataaagagacatctttgtttgtcacttctcatgaaggttccaatgtttgaaaacatggatgaacagctgttggatgccatgtgtgatcgtctaaagcctatgctgtacacagaaggaagctgcatcattcgcgaaggtgatccagtgaatgaaatgctcttcatcatgagaggaacactagagagtaccacaacaaatggtgggcaaactggtttcttcaactctaatgttctaaaaggtggagacttctgtggtgaagagctcctcacgtgggcccttgaccccacttcagcttcaaatcttcctggctcaactaggacagtgaagacgttgtctgaagtcgaagcttttgctctgagggctgacgacttgaagtttgttgccacacaatttaggaggctccacagcaaacaacttcagcataccttccggttttactcacagcaatggaggacctgggctgcttgcttcatacaggcagcttggcacagatactgtaggaagaagctggaagaggctttatatgagaaggagaagaggttacaagcagcaattgtaagtgatggcactacttcgctcagtctcggtgcagcgctctatgcttcacgttttgctggcaacatgatgcggatcttacggagaaatgccaccagaaaggcccgtttgcaggaaagagtacctgcaagactgttgcaaaagccagcagaacccaacttcttcgctgaagatagctgaacttgtaccctgtagcaagcagggattcatggtccaaccggtgaagtttgtgcagaagttaagattggatgctgtagatagacagatcaggtgctctaaagccgtctggtttaaatcacctaattcgcgaaaaggcctggtccgagttagattctccgttgaaataaatttgaagctgacgttaaaaaaaaaatccgcttttgctccacgttaaattctggcttccatagtggtcggactagggtgctgagataagggtattgagattttttagatctgtgtgaaaagattttctgtaacgtaatatctgaaggctgtcttatcctctgtaggttattttaaaaaaaacacgtatatttcgattgtatacaggtttcatgtattataaacactctaatttaccttgtgcatttgaaaaaagagagaagatgctgtgaatataatcgattaattgtttgt

SEQ ID NO: 121001 - DNA, 3061 bp, Zea Mays
acgagcccgaccttgctccaactccctcgattccctctccctattcgcgttccccacttccgttcgccgccgacaccgcgtgcgctctctccccccctccgtctctgtctgcgacgactgggtgggctaccgctgccgccctacccatgtgctgaggcttctgcctacctcttcgccggcgaagagcgcccagcaggtattcccacgtcctctctttcctgtctgctatgcgaaaccgagttctcaaactttaatttttgaaattgacttctcaaactctaggtttaagctatttggctgtttgattcctactaatttctaactttttgccaaaaattattgggtgcacatgtatacactcatgtccctttactagatccgtcctcgcttccacgctgcagttgaagatttgatcagctatcgccttcgatgcagttgaatatttgatcagctattgacttcgctgctggcctgttttctcctttggagaccaaagaagccatggcgggccgggaggagagatatgtgaggtttcatgactggaaatcagagcaatctgtttctgttatttcagatagggtagtatcagaaaaagggcataacatctttggcttgttaaaggacagaacagcaggagccttttcattcctggggaactcttcacattctgaagccctaaacaaattaggcctaggggagaagtcaaaaacaaaagttcttgatcctcaagggccatttttgcagagatggaacaagatatttgtgatatcatgtctttttgcagtttttgtggacccattgttcttgtatgtcccagtaattgatggtggcaacaactgcctgtacttggacaagaagttagagaccacagcaagtatcctgcgctttttcacagatatcttctatttactccatatactgtttcagttcagaacaggctttattgctccctcttctagagtgttcggtcggggtgccttggttaaggacacatttgcaatagcaaagcgatatctatcaacattgttcctggtggatttcttagcggttctgcccctccctcaggtgtttgtgttggtggtgctgcctaagctccaaggtcctgaaattatgaaggcaaaaattgtactgttggttattattatttgtcaatatgtgcctcgactgctccgaataataccactttaccttcaaatcacaagatctgctggcatacttacagagacagcatgggctggtgctgctttcaaccttataatttatatgcttgccagtcatggctttggagctctttggtacattctttccatccagcgagaagacacctgttggagacaagcatgtatcaatcagactggctgtgatcctacatctttgtactgcgggtatcattcacttgcaaataattctttcttacaaaatgcgtgcccaacaaatagcactgccaatccagaccctatatttggaatctttctaccagctctccaaaatgtttcacaatcgacgagtttctttgaaaaactattctattgcttttggtgggggctacaaaatctaagttcccttggccagaacatgaaaacaagcactaatacattggagaatctgtttgctgtttttgtctcgacatcgggtttggttctatttgcactacttattggtaatgtgcagacctatttacagtcagcttctgtgcgtatcgaagaaatgagagtgaaaaggcgtgatacagagcagtggatggcacataggctactccctgagaatctaaaggatcggattatgcgccacgaacaatataggtggcaagaaacaagaggggttgacgaagagggccttcttaaaaatcttccaaaggatcttagaagagagataaagagacatctttgtttgtcacttctcatgaaggttccaatgtttgaaaacatggatgaacagctgttggatgccatgtgtgatcgtctaaagcctatgctgtacacagaaggaagctgcatcattcgcgaaggtgatccagtgaatgaaatgctcttcatcatgagaggaacactagagagtaccacaacaaatggtgggcaaactggtttcttcaactctaatgttctaaaaggtggagacttctgtggtgaagagctcctcacgtgggcccttgaccccacttcagcttcaaatcttcctggctcaactaggacagtgaagacgttgtctgaagtcgaagcttttgctctgagggctgacgacttgaagtttgttgccacacaatttaggaggctccacagcaaacaacttcagcataccttccggttttactcacagcaatggaggacctgggctgcttgcttcatacaggcagcttggcacagatactgtaggaagaagctggaagaggctttatatgagaaggagaagaggttacaagcagcaattgtaagtgatggcactacttcgctcagtctcggtgcagcgctctatgcttcacgttttgctggcaacatgatgcggatcttacggagaaatgccaccagaaaggcccgtttgcaggaaagagtacctgcaagactgttgcaaaagccagcagaacccaacttcttcgctgaagatagctgaacttgtaccctgtagcaagcagggattcatggtccaaccggtgaagtttgtgcagaagttaagattggatgctgtagatagacagatcaggtgctctaaagccgtctggtttaaatcacctaattcgcgaaaaggcctggtccgagttagattctccgttgaaataaatttgaagctgacgttaaaaaaaaaatccgcttttgctccacgttaaattctggcttccatagtggtcggactagggtgctgagataagggtattgagattttttagatctgtgtgaaaagattttctgtaacgtaatatctgaaggctgtcttatcctctgtaggttattttaaaaaaaacacgtatatttcgattgtatacaggtttcatgtattataaacactctaatttaccttgtgcatttgaaaaaagagagaagatgctgtgaatataatcgattaattg

SEQ ID NO: 121002 - DNA, 1962 bp, Zea Mays
cgtgtcaccgtccatacgcacaagaaactacggatggttcccaggctcccagcacagaatccacctccgccgtcaccaccgagcaacgcgcgccggcgcccttctatttctccagcccccgctccgccgccgccgctctcctcctccgcacccccgccctgtttcgccatcggcccatcgcgcacctgcctgtgccacctgcagcagcagcagcagcagagataaagttggctggtagttggctgcccacaccgtctggttcccgttcccatgtcagagggccacgtttcccatgctcctcggtttgtgcctgcaatcgcttgctgcttagcctccgtgctgctgctttgatccagaggctgggaactccaaagaggaacagcgtccatggaggctggaggcgcaggaagtggtttgaatggggcggtgcaggcaaaggggactggggctgatgatggctctgccaagcggctgccgccttgctgcgtcaaggccagagccgccgcgccggagtccgaggccaggtgccacgccaccgtcgtttcaggatggttcactgaaccgcgatcgcgctgtggcaaagccagcaaagttcagtattacaataacccgatgtggccaggagaggccaattctttgaaagtggagaagatcttataccaggggaaatcgctataccaagaagtcttagtcttcgagtcgtcgacctatggtaaagtccttgtgcttgatggtattgttcagttgactgacaaggatgaatgtgcataccaggaaatgattactcacctgccactttgctcaattccatcccctaaaaaagttttggttattggtggtggtgatggaggtgtacttcgagaggtatccaggcatagttcagtggagtccattgacatatgtgagattgatcagctggttattgatgtgtgcaaagatttcttcccacacttgtctgttggatttcaagatcctcgtgttcaacttcatgtcggcgatgctgtggagttcttgagaaatgctcctgaagggacatatgatgctatcattgttgattcgtcagatccaatagggcctgctcaggaacttgtagagaagcctttttttgatacaattgctagagctttgaggcctggaggcgttctttgtaatcaagctgagagtatgtggttacatacacatttgattcaggatatgctttcaatttgccgtgaaactttcaagggttctgtacgctatgcatggacaagtgtcccaacatacccgagtggggtgattggatttttactatgtgccaaagaaggtccattggtgaactttctgactcctataaatccaattgaaaagctggaaggagctacaaaagctggaagggagatcagattttataactcagagatgcatagggcagcatttgttctcccgacctttgcaaggagagagctagaagcatattgcgtttccactgaaacagagcaagcggaggaaacaccggcggcaccactgaagttgactcttgcatccaggagtgaaattttcgctacatcctagctagaccaggactcgcgatgtaccacaagatatcaagaaaccattccttccttcctggtgccgtacctccagtatcgccattggttcatagtcttactatcacatgctatgagacgcataatgaggcatcatgtcagtaattcagtatccaaacaatgagatgagattggcatgctaagaaaggacgagctgatattacaatgtactcccttcaccatgtcagtaatttattgtccaaacaattagatacattgcgttatatgaaggagtttcttaggtgtatctagtgctcggagaaccgaaacgtagtatctaggttgtacatgttcacccttgtacttctacttattaagtgatgtaataaatgcagagatagtcttgctcaatacaaaatgttagaaatcctgatct

SEQ ID NO: 121003 - DNA, 1858 bp, Zea Mays
cgtgtcaccgtccatacgcacaagaaactacggatggttcccaggctcccagcacagaatccacctccgccgtcaccaccgagcaacgcgcgccggcgcccttctatttctccagcccccgctccgccgccgccgctctcctcctccgcacccccgccctgtttcgccatcggcccatcgcgcacctgcctgtgccacctgaggctgggaactccaaagaggaacagcgtccatggaggctggaggcgcaggaagtggtttgaatggggcggtgcaggcaaaggggactggggctgatgatggctctgccaagcggctgccgccttgctgcgtcaaggccagagccgccgcgccggagtccgaggccaggtgccacgccaccgtcgtttcaggatggttcactgaaccgcgatcgcgctgtggcaaagccagcaaagttcagtattacaataacccgatgtggccaggagaggccaattctttgaaagtggagaagatcttataccaggggaaatcgctataccaagaagtcttagtcttcgagtcgtcgacctatggtaaagtccttgtgcttgatggtattgttcagttgactgacaaggatgaatgtgcataccaggaaatgattactcacctgccactttgctcaattccatcccctaaaaaagttttggttattggtggtggtgatggaggtgtacttcgagaggtatccaggcatagttcagtggagtccattgacatatgtgagattgatcagctggttattgatgtgtgcaaagatttcttcccacacttgtctgttggatttcaagatcctcgtgttcaacttcatgtcggcgatgctgtggagttcttgagaaatgctcctgaagggacatatgatgctatcattgttgattcgtcagatccaatagggcctgctcaggaacttgtagagaagcctttttttgatacaattgctagagctttgaggcctggaggcgttctttgtaatcaagctgagagtatgtggttacatacacatttgattcaggatatgctttcaatttgccgtgaaactttcaagggttctgtacgctatgcatggacaagtgtcccaacatacccgagtggggtgattggatttttactatgtgccaaagaaggtccattggtgaactttctgactcctataaatccaattgaaaagctggaaggagctacaaaagctggaagggagatcagattttataactcagagatgcatagggcagcatttgttctcccgacctttgcaaggagagagctagaagcatattgcgtttccactgaaacagagcaagcggaggaaacaccggcggcaccactgaagttgactcttgcatccaggagtgaaattttcgctacatcctagctagaccaggactcgcgatgtaccacaagatatcaagaaaccattccttccttcctggtgccgtacctccagtatcgccattggttcatagtcttactatcacatgctatgagacgcataatgaggcatcatgtcagtaattcagtatccaaacaatgagatgagattggcatgctaagaaaggacgagctgatattacaatgtactcccttcaccatgtcagtaatttattgtccaaacaattagatacattgcgttatatgaaggagtttcttaggtgtatctagtgctcggagaaccgaaacgtagtatctaggttgtacatgttcacccttgtacttctacttattaagtgatgtaataaatgcagagatagtcttgctcaatacaaaatgttagaaatcctgatcttgggttggctggcacacaaacacaagtgtgacaatgatagtcttgctcaat

SEQ ID NO: 121004 - DNA, 160 bp, Zea Mays
gagactctttccactgcttctagttcttgtttcttgccaaaaagattattgttcattaaggatctttaacatatgtttttttgttattttctcgagacctaaatgttcaccgaccaaacttgttttgtatcagtgtataatattattgtcactgtttttg

SEQ ID NO: 121005 - DNA, 720 bp, Zea Mays
acctcgcaacccccaccctcttattgcgcctcacttggcctgcgcggctgctgtaccaaaccaacccaagccacccaataaaccaaccaacgacgtagctgttgagcagtacgttgagctagctctagctataggtacagtacagtcacggagtctcggctcggccatgggcaactgcgtccagatcagcagcggcggcgtcggcgtcggcggcagtagaagctgcgcggccgccgtagaagcagggtgccagcagccgcaacggaggagaagcactgccggcggtgatgaggaggaggcaataattgatcaagcgatgacaccgtcgtcaatcttgaaggtgaagatggtgctgaccaagggcgagctggggtggctcgtggcgcagctcaaggccggcgaccgccgcctcgcggacgtgctccgggagatggcgcgcaagcgtgagggccgggcggctgccgacgggtggcggcccagccttgagagcatcgtcgagtgccctgccgagacggcgccggcgccggacgccacctccgataatagtgattagctagctataggagtacttgtagaggatctggaactcgtagatgtgttgcccgttgggcgtttcgattttttttttcctccctctctccctctcttgttgcttaaaattatttctacttttaacttgctgatccggtcccagttaaatgaaggtcgtttcttctgcca

SEQ ID NO: 121006 - DNA, 339 bp, Zea Mays
catgtagaattcccagaagaagatgaaattcaagaagtagtttctgaaaaggagtttgctccagtgcctattcagcaagtggatggagctatctaactggttattgggtagaaaggtcttgagcctcttcactgcaacaaaggtgatgaggggtactctagatgttcctgaggctggagggcgtttccagttctggaggaagattagttaggcttatgtataagctttggagggtttctaccttcctgcttttgtaataagttatgcactttgagtatatcaggacttataataaatattactcttttgaaacatgtaaaacttgagttttgaaaaggt

SEQ ID NO: 121007 - DNA, 417 bp, Zea Mays
ggaagaaagaaagaaagaagcatggacaacaagagcgtcgccaccgcccgcggcgtcaaggtgacctacatcgagacgcagttcgtcacctccgacgccgccggcttcaaggacctcgtgcagcggctcaccgggaggtccgctactccgccggtgccgcacaggccgcgcccgtgccgacgagactacgactacggccgccggggcacggccgccgccggagctgatgctgggcaaggctaccgttacgcggtggcgcagacgcgcccgccggccgttattaccagccgcacgccatcgtacctgcacgaggacggtatgggcggcctgctgcacgacatcgacatgtgcgacttctccgacttcttctacgtcggtgccagccatcggagcgacggcggcggtttcccatattga

SEQ ID NO: 121008 - DNA, 3435 bp, Zea Mays
tttgaaatctaaaaatcattccttatacataaaagaaaaaaatgatagggtaaaaaaaatcaaggtgcaaggtacataggggcgggcacagcgcctcggagggaggggaaaaaaggaaaaaaaaaagaaggaagagtgaacccaacttcggaaccactttggtgaggcgcgatcgctccattccagggcaaacgatcgccctcactcgttcaggatttgggtacagaagtagacttgaccgatgacccccacaatccacaatagtccagccggagctaacacgacaatactcatcccaggtccacggtcgactgcacatcacattcggtctatatacagtacaacggcggcacagtgcgacagcccggtccattcacggaagccatgcctacccttctggtcgtcgtcgtcgtcgtcctcctcttgcctaattgcatctccgattcggcgcaggccaacgacgccgagctccgagctctcttggccatcaagaaagattggggcagcccagctgccctcaggtcatggaagaacagcagtgcctctgcttcgtccactacccactgcacctgggctggggttgcatgcagcagcagcggtcaagtgaccgccttctccttccaaaacttcaacataggccgcccaatcccggcgtccatttgtagtctcaagaacctggcgtacctagacctctcctacaacaacctctccggcgagttcccggcggcagcgctccacggctgctcggctctgcggttcctcgacctgtccaacaacatcttctccggcgtcctcccgactgacatggacaggctgtctccggggacgatggagcacctcaacctgtcaagcaacagctttagcggcagcgtgccgttggcgatcgccgggttcccgaagctcaagtcgttggtcgtcgacactaatggcttcaacgggagctacccgggcgccgccatcgccaacctgacgcggctcgagacgctaacgctggcaaataaccccttcgcgccgggccctatccccgatggctttggcaagttgacgaagctcaagttgctgtggttgtcagggatgaacctgactcatggcatccctgacacactctcgtccctctctcagctgacggtgttggctttgtcagacaatagccttcaaggtgagatcccggcgtgggtttggaagcttcagaagcttgagctgctttatctttacggcaacagattcactggtgcaatcgggccagatgtcaccgccatgaacattcaagagatcgacatttcctcgaactcgctcaccgggccgataccggagagcatcggcgatttgaggaacttgacgttgctcttcctcaacttcaacaacatcagcgggccgattccgtcgagcgtcggcttgctcccgaacctcgtggacatccggctattcagcaacagtctctctggccccctcccgccggagctcggtaaacactcgccactggccaacctggaagtgagcaacaacttcctcaccggcgagctcccggacacgctctgcttcaacaagaagctctacgatgtcgtggtgttcaacaacagtttctccggcgcgttccctgcgggctttggggagtgcaacacagtgaacaacataatggcgtacaacaaccgcttcaccggagagttcccgggggcagtatggtcggagttccccgcgctgaccaccgtcatgatacagaacaatagcttcgccggagtcctgccagcggaggtgtcatctaagatcacgaggatcgagatcggaaacaacagattctctggcgcaataccggcatctgccactggcttggaaacattcatggcggagaacaactggttctcccatgggcttccggaggacatgtccaagctcgccagcctcattcagctatctcttgccgggaaccaggtcagtggatccataccagcgtccatcagagcccttgagaggcttaactacctcaatctcagcggcaaccagataacaggagcgatcccggcagcggccattggattgctccccgtactcagcgtgcttgacctctcaaacaacaagctcgacggcgagataccagcggatttcaacgatctccatctctctcacctgaacctctcgttcaatcagctcgtcggagaagtgccaaccacgctagagagccccgtgtttgacgccgccttcttgggcaaccctggcctctgcgccagacagggctccggcatgctcctccagacatgcccccatggaggaggtcatggctccgcttccgccagaatgatcgtcgtcgtcctaatcgcgacagtttccggcgtttctgccatcggcttcgtcgctgtcgtgggatggttcgtcctccgccgcaaccgcaagagcgactcgtggaagatgataccattcgggaccctgagttttagcgagcaggacataatcagcaacatgagcgaggagaacgtgatcggcagaggcgggtcagggaaggtataccgcatccatctcggcggacacgaagcaaggggacacggcggcggggccggtcactcgacgacgacggtggccgtgaagaagatcggcaacgacgtcgacggcgcgaaccacgacaaggagttcgaggcggaggcgaggtcactgggcggtctccttcacggcaacatcgtcaggctgctctgctgcatctccagcgacgacacgaggctgctcgtctacgagtacatggagaacgggagcctggaccggtggctgcacgtgcaccgccgccgtggcggcggcaagcgcgcggccgcgtcgggccctctggactggccgacgaggctgagcatcgccatcgacgtcgcgacaggcctcagctacatgcaccacggcctcacgagccccgtcgtccaccgcgacatcaagtccagcaacatcttgctcgaccgtgggttccgagcaaagattgccgactttggcctcgctcggatccttgccaggggtggagaatcggaacacgtgtcggctgtctgcggaacgttcggttatattgcgccagagtattttagcagagtgaaggtgagcgagaaggtggacgtctacagcttcggggtggtgctgctggagctcaccacaggaagggggccacaggacggcggcacggagtccgggagctgtctagccagctgggcgtccaagcggtacaagaacggtggcccgtgcgcggacttggtcgacgctgaaatccaggacctggccaacctcgacgatatggtggccgtgttcgagctcggagtgatttgcaccggcgaagatccgtcgtcgaggccgccaatgagcgaggtcctccaccggctccggctcctccagtgttgccggaaccagatgtccattgacgacgactctgctaaagacgtgtgtggcgttctttctttggagtccatggtttaa

SEQ ID NO: 121009 - DNA, 1123 bp, Zea Mays
ggcagagaaagtctatatttgattacagcagatttcagagtgttcaaaaggttatagtgaagagatgacaaacagctgtgttcttgtttcatgcagtgtgtgtaatatatataatttggaggcaagaggcaagtgaatttgtagcaacaacgccctcggagaaagcctatgagtactgagcaccgcttgtgtcggatgatcctcctcatgcactccaccacgggtcctggccggtcctgaagtcggtctccacccacgggacgaagaggaccttgccgtcgtcgacgtcggcgtgaaccagggccagcgactaggcgccggtccgcggaccaccttgccctggttgttgtactgggatccatggcaggggcagatgaacttgttctcggcgccgttccacggcacgacgcagccgaggtgggtgcacacggcgttgatcccgtaggtggccagcgtcttgtcctgctccaccaccaggtacgtggggtcaccctgcaccccctgcgcgagcgtgcggtcgttgggaccgtgcgtgttgagccactcctccaccgtgatgtcgttgcccagcttgtccttggcgtaggtcccgccgccgccgttcccggagctgcgtgcaaaatcggccggccggccggggtgctattcgttaatagttgctgcgcggccggtaacacgtacacgtgtatacagtgcgccgctagctagctgttgatgcaaagcaacgcggtcgagacgacgacgacgacgacgactcacccggcggggacgaagaaggcgccgtaggggacgaccatgccgacggtgggcagcgatatggcgcccaggaggaggaggttcatcagcttccgcttctccatgtcggggacgcggtcggcggggatgctgctcgccgcctggcacgtgatgctccgctggcttgcgcgctcccgccccatccccaggccaagccccttcactggcttgcccaacgcagcaaggaagttgctgctcacctgggtggggttggcggcggtcgagagcgccgcggaggtcgccatggccgcagcagggaaggagcgggccaagacggctggtgttcactcactggcgtccactggcttgcggatgagccgcccggggc

SEQ ID NO: 121010 - DNA, 555 bp, Zea Mays
gggtggttcacggtggcccagactgctgcgcctcaccaaccaacgagagagcacgaagcacctagcagcccggccttgtcgttgtacggtcccaccggcgccgcagcggaagagatggaagcttatgcccccgccggcagctaccggccggtgtgcgacacggtggtgttcgtctgcctcgcgtccgcctccgccctcatcgtgttcatggtggccgtctgcttccgcaacgccttcgccgccaacgggtacgcgaccgctgccgtggccacaaacggtgccgccggagccaccgctgccaacggcagaagccggtgcgggctggcgccgtccgcgctgtcggcgatccccgtgctcgcttaccgccggaggggcgccgggtgggcgcagtgcgcgatctgcctcgccttggtgcgggacggggagacggtgcgattgctgccggcgtgcggccacctattccacgtcgagtgcatcgacctgtggctgcgctctcacgcaacatgcccgctttgccggcgtggcgtcgtcgaggctcccgtcgaaaaggtttga

SEQ ID NO: 121011 - DNA, 207 bp, Zea Mays
atgacgaccaacaccaagcacgcctacaagctccaggagtttgtggcgcactcatccaatgttaactgcctcaagatctccagggacgccggctgctacaaggtcatcctcgactgcacccctgagctgcgtgcctactatgccaagtgcggattcgtggagaagggtgtccagatggtcgtctacttctgagttctgatctagagg

SEQ ID NO: 121012 - DNA, 694 bp, Zea Mays
acttgtactaactctttttaatctaggggcaagttgattattttagataatgcacactttgagctattttacatgaatttatcgaggaggttaatggctctggtagagcttgatcagctgagatatgcattagtagggaagcagggttcttactgggttatcaacagagcaaaggaagcgcttttactaatttttcaaattatgttgcttactgtagcagattgcccagagttaccttacttttttctgtaaaagaactattttgtttgttactgaatctcaatttagggggaatacttccacaatatctgcccatgatatcattaaatgtttttctaagatacttgttctccacacaaggccctttttatctgatactaatattgtatcatccaatggaggtaatttcaatcttttggaggatcgtgcttttcttttggattttgtcttcaactatccttgtaagggttgtgttcaggttgagctgtcctgaattatttggatctcatggttctctttttctcttcttttttagcattaacctttagatttgtgtaatggatttctgcaacatcaagattgatactggcaactccattgataagactgcatgctcaaataaagcttggaccatgaagtgagatcgagctcatggacaagtagcgatcatcttttatccaatcttagtgtattc

SEQ ID NO: 121013 - DNA, 1562 bp, Zea Mays
gccgtggaggccactgccgcctcccttatcttcatcccgcccacgcttcctcgtgcttgctctccaccgccgctcgaccggcaccctcacctcgctgctggtcgcgtgcaggcggcgattcctggtgcacatggcctggacggagtccaccggcgtcatcttcggcttccgcgcgccggatttgaagtttcagccacggcgcgcccaagtttctccctgtgctcgcgtccttctctttctctctcctctctgctcggtctcccttaccgctccctctctgcctcccttctggccgcgcgcgcccggccggagcggtctccaacgccggcgcccagttcctgtgccacgttcttgctcgcgaccctcttcctcgcgtccctgcggtcctccagttcacgcgctcctctctctctctcatctctctcctctctgtcggcgagtttcccatggcgtgcgcctgtccgctggccgtcagcacgctgcgcgtcctctgtcttccctgcacgcaccgagcagctccctcggccggcgctctgcccagtctccaagctcgccgtcgaagctcccctgccgcgtccctggctcggctctgcgcgccgtgcgcgccgctccccgagctcacccaaatcagacagtgcctccctcagctcgatccctgccgtgcagctctccggctcgccggcgtttcaccagtgcgcgcacgctcctgccgagctcagtcctgtccatctctagctccctgtgcgcgcctctgttcatggccgtggtgatgttgtggcgtggcaacgtcgtgtacgttgacagcagtcctggccgcgaggcagtccgcgccatagtgttcgcccgatcacgacctcgctttactcctcgcgtcgttgtttgccgaatccttccccagtccgtgccctctcggctcgctcggccttaatccctatctcgtcatcgacctcgccgtaacttagttcgtccgtcgtgctggtcgctgtcccatactgtgcctattagttcggatcctgccctagctcgtcgttgcgtcgttcacagtcgagtcgtcgaacccgtcatcccctgctcgacccccacctcaccagctcgctccagacttcaatcgaaggtcgtcgtcgttccgtgcgtcatcaagaaatcccaagcgtcgggtcaagacgaagccagcaacgtggtgttcaccaagcacgcgacaaaaagctcgaacatcctgcgcaactcaagttcgattcgtcaaaaattattcagttgaggagaagatcttcatcaattgattaccgaagaaaagaaggcccctggatgacgtcaaccggaaaccatcatcgtgcttccgactatcacgtcgaattagtcagggtaagcaaacttgttattcgtattagtggattgatggatggtttggctaggtctaatatttattagattgcctgagtcgctttggtaaattggtcgatgtcgtaggataaaagaggtctcaataggtctcagtgttgcgggactgtaggcgttaaaactggaaagttttattaatatatatgatacacaggttaaccggt

SEQ ID NO: 121014 - DNA, 306 bp, Zea Mays
acgccctctctctggtgctgcagctcgccccccctctgctcaccatctcctccctggttcccatggtgccctccccttcttggtggccgacgccccccctctctctcctcttggcgacgactgggcggcatgtgcctaggtcttcttgggacccttcgccggcgacaagcaccaccagcatcgcgtcacgcctgctgcttgtacgtgcgtgctctctccgtcacgcgtcgggggtggattggatcagagccgatcgagtgcgaagaacaccacgccaggggtgcttcagatggcagtaaagtcagt

SEQ ID NO: 121015 - DNA, 414 bp, Zea Mays
tttgttttttgcacagtattattagtattactaaaataaggatcaagtgactctgcatggttttaactaattattatgcatgcagcgagtggtgtgatggcaactcttcttgtattcctgtccgttggtttagttggtgctactgatggtataggcttccatttaactgggaaggtagtaaactggagtggcatgccctttgccattggtatttatgggtttttctactctgggcattcagtatttccaaacatctaccagtcaatgtctgatcactctaagttttctatggcactattcatatgttttgcaatttgcacagcaatatatggctctttttctgtcattggttttatgaatattgcatttcttttaccgttctttgaaggaagtatatccatcaaaagggtttga

SEQ ID NO: 121016 - DNA, 504 bp, Zea Mays
atggatgaaggcagctccggcataccttgcagcactggcgggggcaaaggtgtcgctggcgggccaagaagcacaggcgggggcggcggagcttcaaccgaggacgacgccgacgagcaaaaaaacaatgtcggctccgaagcagcaataaccgagggcggcgccggcgtagccacaaccacgcgcgacgggaaagattcaggcggcggggaagattggggctgcactggcggtgattcgggtgaaggagaaggcagcgccggcggacggtcgggcggccgttgcagctcgggaggtgctgccatggcgcctagagagcgaagacgccgaggatgtcgcgaatcgagctgtcgccgtccaggatttgctcaaccctaccaaattaaggcgttgccacgccgggatgggaggtggactgcgcggcggcggaggtgggcatggacgcgccggcgcggctcacagcattgggcggccgtcgtgtcggaggtttgcggggaagagtaa

SEQ ID NO: 121017 - DNA, 507 bp, Zea Mays
atgggcgagagcagctgccacgccgccgccgaccttggccagggaggcgcaggcctgtgcgaggtcgacggggcgctcctcctcatggagctgatgcaggagcaggacccgccctcctccgacttgcttcttctagatggcgatggggatggcgatcgccggctgagccatgtcatccggtccctcgaggcagagatcggcggcggtgaggcggtagcgatggtcgccgacgacgatggcggtgtgagcatggacaggatcgaggatgcgctgtcgtcggacggcaccgatggctacgactacgaaggcgcatgcgcgtcgtcgtcgtcgttcgggtattggccgccgtcgtccttgttgttagccggtgggtatgatgacgcggagggttggtgcgtctacgctaatgggtatgagggtcctggcggtcatgttgtagggtacgatgactactgctgttgcgcagaaggttctgctgagctcatgtatctcccgctgtgggaatga

SEQ ID NO: 121018 - DNA, 135 bp, Zea Mays
tataaacaaatatatttattatttagaaataaattcttgaattacaatagtatccacatacaatgtcattttttcttgttccgtacaaagattgtaaggggaaaaatagtataaaagccatattgaaatctacca

SEQ ID NO: 121019 - DNA, 1581 bp, Zea Mays
aggaaacacgcacgcccacagccttggatgcctgtcacctgcagcatatatagatccagcctccagccctccacgccatctgcatgcagagttgagaggcaaagaaagaaaaagaaaacaaacatgactcaagctcattcaaagtcatgcttccaacaattttgggatggagttcaagttaagaggaacagtggcagcttcaccatcgagctcctgccatctcttggcgcaacaataaaccaatctaacaagctgcggaagttcatcatatctccctacgatccctgctacagatactgggagctgttcctcatagtcctggtcatttactccgcctggatctgcccgtttgaactagcgtttttgcgggacttgccctctaagcttctgctagctgagaacatcgtcaatggcttcttcgcggttgatattgttttgacgttcttcgtagcttatgtcgacagcaaaacacatcttcttgtggatgaccagaagagaattgcagtaaggtacctatcaacctggttcatctttgatgtatgttcaacagctccatttcaaccaatcagccttctcttcacacgtaaggggaacggccttgcttttaagatactcaacatgttgaggctatggcgtcttcaccgagtcagctcgctgtttgcaaggctggagaaggacataaggttcaactatttctggactaggtgctcaaagcttatttctgttactctgttcgcggtgcactgtgcggggtgcttcaactacatgattgccgacagatatcctgatccagagaaaacgtggataggtgctgtaatgcctaccttcagatcggagagtttatgggctagatatgtaactgccctttactggtcgattacaacactaacaacgacaggttatggggatctacatgctgagaacccaagagagatgctgtttgatatctgctacatgctgtttaatctgggcctgacagcctatcttattggtaatatgaccaacctggttgttcatgggaccagccgcacccggagttttgtatgtttctcaacttattggcaaagtccattaatcctgaactcggttacttctgcctcactaacaatcattcagggacacagattttatttatgaagtgcatgcataagggacaacacattaactgagccaacaaataccatgccattataggcacaacctagctttctttagtcatggtgacttggtggggaaatgacatgagcatctttatacagacaatgcttattcaaagtttgtataagaattcaagggggcaaaactctacacactatggcatctactaaactgagagggaatcagagagatagttttgactggacatcctaataagttcttacacaaactccgagcagtaggactccaatcaagaaaatcagtcaaggcaaccaattaatggaacccaatttttgatagtcatctctcatatgtgctgtaagcccaaagttgttatatcctttagtcatttaaacattcttataacaatagcaccaataaagaaaaaaacaaaattcatggttagtaatatacaaaaatatc

SEQ ID NO: 121020 - DNA, 2754 bp, Zea Mays
atgcctgtcacctgcagcatatatagatccagcctccagccctccacgccatctgcatgcagagttgagaggcaaagaaagaaaaagaaaacaaacatgactcaagctcattcaaagtcatgcttccaacaattttgggatggagttcaagttaagaggaacagtggcagcttcaccatcgagctcctgccatctcttggcgcaacaataaaccaatctaacaagctgcggaagttcatcatatctccctacgatccctgctacagatactgggagctgttcctcatagtcctggtcatttactccgcctggatctgcccgtttgaactagcgtttttgcgggacttgccctctaagcttctgctagctgagaacatcgtcaatggcttcttcgcggttgatattgttttgacgttcttcgtagcttatgtcgacagcaaaacacatcttcttgtggatgaccagaagagaattgcagtaaggtacctatcaacctggttcatctttgatgtatgttcaacagctccatttcaaccaatcagccttctcttcacacgtaaggggaacggccttgcttttaagatactcaacatgttgaggctatggcgtcttcaccgagtcagctcgctgtttgcaaggctggagaaggacataaggttcaactatttctggactaggtgctcaaagcttatttctgttactctgttcgcggtgcactgtgcggggtgcttcaactacatgattgccgacagatatcctgatccagagaaaacgtggataggtgctgtaatgcctaccttcagatcggagagtttatgggctagatatgtaactgccctttactggtcgattacaacactaacaacgacaggttatggggatctacatgctgagaacccaagagagatgctgtttgatatctgctacatgctgtttaatctgggcctgacagcctatcttattggtaatatgaccaacctggttgttcatgggaccagccgcacccggagttttagggactcaatccaatcggcatcggaatttgcatcacgaaatcagttgcctgataagataaagcagcaaatgttgtctcacttctgcctacagttcaagacagaggggctcagccagcaagctatgctaaattgtctcccaaaaggaattcgttcaggcatagcatacaacctattctttacaatcatacgaaaagcctacctctttcatggggtatctaatagtttcattgcagaactggtaatggaagtacaggctgagtatttcccaccaatggaagacataatgttgcaaaatgaggcggcagcagatatttacataatagtttcaggagtagcgaatttgataacaacagcaaatggtaatgaacaggtgtacgaaaaagttgaagagggagacatgttcggagaggttggtgctctgtgtgacataccccagccatttacttgccgcaccactaccctatcacagctcttgagaataaggaagataagactgacagagatcatgcaagaacacaaggaagacagcaagattctaatgaacaatctatttcagaagctaaagctgcatgagagtttaccagaattaaaacaactagatcgaagattcatgcacaagtacgagctattccatgctcctcaagaagcatggttgttacctcagccttacctgcagtacacagagcacaaattggaagacattggtaagaagatcccaacattttgtggagatcatggttcaacaaaactagcagctgaaacaaaccagatgaggttgacacaacaaggaaacagccatgaccatggcaattatatggcgacggatgggatggcaggcgaagaaggcgaacgcaatgaggttcacataaattgtgaaaccaaagaagtctccattcatataaattctgaagattgtgacgcagcaagccattggcaaacagaccatgaaacggtgaggctggggtcttcccacaatacatccgatggcataactatgagagaaaaccaagatagcagtaacataaaatcatccaacaaaagggtcacaattcacacatatcctcgtaatgcagcaggttctttagtacagaacgggaagcttatcaacctgcctggttcactggacgagatcttcgaaattggatgccagaagtttccgggtctccgccctacaaaactattcagtggagactatgctgagatagatgacattagtgttatacgagatggtgaccacctattccttcttcagatgtaaaaccagaataacattgaattaacctaacgtaacaatagaggattcaagtcctccaatctggcaaaagcagcagattgtaaatcgagatatgcatgtggagatatgaagaggaataccgttttacaaattgttctgatcatttctgacattgtataaatatctgttcttgcataagctgctatctcatgcaaaagttatgcgaggcggtttcctgtttttttttcttttatttgataaaacaatagaatctccacaaaccgaacttacggggtgtttgaatgcattagagctaatagttagtgtttaaaattagttggagacatacaaacaacctaactaatagtttaactattaactatttttagtaaattagttaatagtttgctagttaattccattagtaattttttagataactaaataaaggtgagacaataaaaacaccagtaatggggaattaaccactaatgcagtatcatg

SEQ ID NO: 121021 - DNA, 79 bp, Zea Mays
gctattataaatttcattccaagcggcttctacgtaatagtccctacaatttggaattcgataaaacagtcttttctac

SEQ ID NO: 121022 - DNA, 1609 bp, Zea Mays
tttcccgcccaatcaaacccaaaccaccgctcacctccgctgacggccgccagcccgccacgatggagctctccgccgccttcgaggaacgcgtccggcagatggaggacgcccgcaaccaacgcctcgccctcctcaacgtctcctacgacgctcccctcctcatctcgaattccttcatctgcctcctccccgaaaccctccaaaccctgactccgtggcctcaccgcggcgcccctttcctccccttgccttgatgcgcaggcggagaaggagacccaggccgccaagtcccgtattctctcggccaagctcgccgccacgcgccgactcgagtgccgccgtctcctcctcgagcgccgcgccgccgacctcgccttccgcgccctcgccgcccgcgccgacatcgacgccgcccgcgcgcgccgcctccttgtcgcccgcgacctcaggtagccaaaaggcagcccatctcactttctctccctccaccctgaaacaactcagggcatttcgtttttggttaatctgcatgctctaatcgggcgcgcagctcggtaaggggtgagatcgaggaggctgagaggagggaacaaggctgggaccgcttctacgaggccaagaggaaggacatggaggagttccagacggagtcgcggcggttcgaggcggagactcgcgaggaagtgcagaggctgagggatttggtatctcgactgaaatctacactgcaagagctgcagagcagcgagatgtactcgaacaacacggagattgctgctgcagaagctaggaagtccgacctgactgctaagaaggcaaagatggaggagagcctggcttcagcccgccagttcagagcgctgcttcagcagcagctccagaaagcctttcagtcacaggtggacgatggggatcaagaggcagctcaagctaccatttgaacttgaagtgctacttcaggtccaatcgtgcgtaaggaaagcgagcgagggcgcctgcatcggtacgcccggtgacttctttcggtttcatgcttgacgcattgcatcggttgtacaggtggaagaaatctggcagggtccaagaaacaccgaatgtcttttttggttgttcgccgaagaacaccgtatggcacttctttcacggcaatggaagcatgtttctcaattgttacctggtaggctggtactatagcttcattgcgacgcttgaccagaactcatcaggcaggaggcatgtgccttcgccatatgcagcaagtgcaatgtactcatcgcatttgcttcaggatctttggcgaagcgtgagcctttttcacccagctagcggactggattggtactgacactgcaaagtgttcattaatgtgtagggctagtcaccctcatttgcatatttgcatgcagccgagaggcaaagtggacgctttagggtttgtgcctcctctccaactactctcgcacttgtaccatctcgttaaatgctgctgcatgaggaagcttttcttgctatgtcaggtgaatcgtccgtgcattgtagaacagcgaaatacggctgtaattcgtaaattcttggaaataaatatcgtgtcagtggctggatatcg
